United States Patent Application Publication US 2018/0305689 A1 - sequence listing, part 128

SEQ ID NO: 1879559 - DNA, 4001 bp, Homo sapiens
ttttactgttatgcatttcattatattttatttccatttcctgctgctgtgctttaatcttgaaaagagctgatcatgtgtttgaggcctttcaaactttacagtgttttgttcggagagagagagagagagagagagagaacatgcacgctacagcaatctcaaactcggtcctgtttgtcccaatttcgtgcagttttctgcgcagagtactgccagacttcactgagctgatctctgttttcacaaaatagcatgtaattcaaagccactgctattccctggctaactggatgccttttttgtttgctgtctaacaaaaaagtggtgaatactctaaattcatttcatccgcattctctgttaaacttcacagaatggtactgcgcagtgggtgttctaaggtcacctgtgcagaatgcacattccatgaaatctcatggtgttgctattgccaacagtgaaggctggcccctgtcatgctaatggggatgtaaaactggtgaccattttgtatgttcaagattatggaactctgtgaaaaatgatagagcatagtgacagctcttctgtaggctgatgtaactcgggctaaattctatacctctgaagtgatcattatgccattcatggcaatatttcaggactaatatattttgaaattatgttctctctcctggtattctacataaaatgctcagagtgtatttttccccaatgagcttactgaataatcatgctaattcaaatattattttttggcacttaaaactgacttatatagtaacttaatctttcagaattaagagacatggggctatccccctaccataatatgaagttgcctaaattttattttatgggaagaagcggaatttagaaaatgtgggcctaaggaggtaaaataaatgctttttcagtaccaaaagttaaattagaattatccattaatgtgttttccaaataacagaactatatttctttgcaacaaattagcttgttaaaaagtaggaggcataaaaggttttccaaggaagactcgaaagtctagcaattgtatctaaccaccccccttcctcaaaatgtagtgctgcagaggacaaaaatgattggtaattaatgactcaagccctttatgcgatactaatcccttactatttgctaggtttcggtggttgcatgaaggatgttaaatttacacggggtgctgtcgttaacttggcatctgtgtccagcggtgctgtcagagtcaatctggatggatgcctatcaactgacagtgctgttaactgcaggggaaatgactccatcctggtttaccagggaaaagagcagagtgtttacgagggtggtctccagccttttacaggtaatgtggaggtcctctaaattaaatgttacatgtctcttattcatccccctttccctccctgccagcccctcattaatctatatgagtattattttaatcttgctgcatcttatttccatttaagaatacctgtatcgagtgatagcctcgcatgaaggaggttcagtatatagtgattggagtcgaggacgtacaacaggagcaggtaaatacttatcttcaaatgcatatgtgcacacacacacatgcatgtatttgtgcatttatataaaaggaaggactattaccctgaagcagtaatatttttgtagtcttctgacagagcatgccttggtttgaaaatacatctgtcaatggctaaaatgcttagtagatcagtgcttttcatttaccaagaattcactaaatacttgctcagacttgatcctttcctcttaggatgcagaagtaaggaaagttcaggttgtcttaaggatgtaatagtcccacctacctaacatgtctaaggataggtaacctttacagatggtgtagatagcaagaagctgaagtcagggattaggattatccttggctgggagtggcaccttcttgactttctcacagaaagcacatttgaaacctgcaactggttggaatcaggggtgtctatgacatcattgcagatgtttgccccgttgttgactattagaatcttagaatgactctcccaagagagaaattgctgattggtttaatatattttgaattggaaaagaaccaactaggagacagtatacattagacctaatctcagacaactgacttgttttgtacttctgactggccacaaaatcttttcccaaaataccaccacaggaaggcattcagcacaaagagttttgtgaatcagtgacattctactattttgggtcaaatatttgtcaggaaactgaacacatctccagatgattgccacttatgtctcagcaaggaagtttattcagcgagtatcaatttgtctaaagacgtgtttccatcaaggtattctcttatacttaatcaacagtaggttactatcccaggcatcctttgaggaatcttcttaatctaaaatataattaaatactgagatgagcaactaagaataattttcaagactctctacctacatattttccagaagaggacaacttgacacttttccaggatgatttaaattatcacctatttataggcaagacaatgagctgaacgatctcttaaaattcttttcaacttcagagctaagagaaagctccaatataaaatactcacttgttactgacatgttctctgctcctatttcacactcttctactttattaacaaatataaagcccgctttgagtataattcagcaacattaataggcgtctggaaagcacattgcttacttagcttaatagtccccattttgagtactactgagaaagtacacaaatagagctctgaatttatagcaatgatctgaccacagccctatgccataaattcatatttacaatctgaccacaacactgagcagctacatgctcccaagggttggagaataattgcactatttaattatttttgagtcagttttgctctgtcccttatgagaagaccatctgttagactgtactgtactttgccctgtaccacatttccgaactaataaaatcagcgtcactcccattgtccctttccttgcaactcgatcttgtggcctgtgtgttttctataggtgtctgtagtgttttaactgctcagagagtggttctcccctttggtgtttcctcttatcttttatgttcactttgtttcccttaaagctgtcctactttattggtctggacagtaaagtcggagaggaggagatttgatgtggaaaaaccagagtgatcctccatcgacagggctcaggagtccatgagcagctagagcaggtctctcatccatcatcctgccacggagttccttgggctctttctttgtgtccccagtgcactcagctgtgatgaagtttttactgatcagaactgtagaaatgtctaataaatagttaaaggtaatagattttttaaattagggggctcagcttgtaagtaaggttttgcagttcttttaaacttcctcattttgtgatattattttgaaatattctgcagaacaagactttgaaaatgactttgtagaatctcaaaggcaccagctcctttaccccacccccacccccaaaaactgcaactaagaatatattccatatatcatatctggtagaactttgctttttaaaaattaattagaaaaacaattgcatttggaaaatgggtctaggcattcaagtacaacacaatcacatttgtgattttttttttggctaatacatcgaagatataaaagtgtcaaactactatgtataataacagtctaattatcttgcttcaaagggggtacatcattatattgcttgaacttgttatctgcctaccatccacctccttctttatgagtgatgtttaaacatgtctgatacattaaatgtttttggaaaacctggactagacttgaaagaatgttatgtcgatggagttttgatggttttgaaatatcgcttaaactgaat

SEQ ID NO: 1879560 - DNA, 4001 bp, Homo sapiens
aagtagaccgtatctttcctagctgttcaccgcccaccctcctagcctggcagtgctggcccggcgcctgtgtgtccccagcactgaggctggggcgcggctgtgcccagcacacagacgagggatggatggacagacgcagatggtgcagctcccacccctacccaggctgctacccgccaggtgtctacccgccaccccagctgctgctggcacgggggactgaggggggtcagctctggggccagaggggcaggcctgggctcctgggaagtgaaaagtgacccccgaggcccccaagacctgtccttgaccccagtgagcaggttgagtctaggagctgcgtgggccctgctctcttggtgacccctgctctgccccacttactgttgtggggtgggctcaggcacaccccagagcagtgcctcaggcccgcaccgctgcccctcaccgccgctgcccctcaccgccgctgcccctcaccactgctgcccctcaccgccccgtccatctgctcctgtgtgtgcttgagtacgtttgtgagatacgtgaaaacagcaacaaaaggcgccgggtgcgggcctgggcgtcctgccctcagctcgggtcaggggtggggtcagaggcctcaggagttgcccttttacccagggtcaaacatgaccacagccagctggggacaaaaggcccttcatcttctgcagaagcctggattgtgcggaggagggagcattcccaaaggcgggtgggggcaggggcggtgcccgggtgacagcagcctccccagcttcctggaactctctccacctgcctgcagacagaccggcagggcaggctggctccgggaagtgaggcacagggactcccacagcccaggcccagaccgtgggggcggggtggccgcagccaaaccaggctgctccccaccccatggggccccaggccaccaggatcagacaggggctgtgcctgcaggaggcagagggctcggggccagcacccactgtgatctggcctgacccgtccttgcctctgcctcttaccccgggcccttctccctggagagtggagggttccggctgttatatttgtgcttcctccggtgtctgcctcaagtccggcccgggccctgacactgcacctctggctgaccccatgctctctgggaccctctgtccacgtccctcctccggggtggagacagcggggggagggcaggacacaagaatgagtcctgaagactgaggggcacggggagagctgatggggagggtctcctagctggagggactccaggcagagccgggagcaaggcaggtggctgagctcggcccaggctgggtggaggccaggcctcctgtgccttctcccgctgatggcgagctgaagggaggagggcggccgcttccttgagggcctgagtcacagccaagaagacccgctcactttttccagaagtgagggaaacttccccgtcagccctgcaaggctggctgaggtgtgactgtggcccgcctgctgggcgagggtgggggacaagcgggccactggctgtgagcctccccagggtgggggaccctcggcccagctccctgcctgactacctggacgtgcctccgcagggtctgcagccagcttccggtcagaccccaggtcctccagcggctgcggccttcagcgtcatctccacggcagcccctgtgtactgggggctggggggcctggcgaggcccctcgaagtggtacagcttgcactctggggacccaaagtccccccaccgggcccaggcggaagcaccaggcatttctggtcccagccgaggtctgaggtctgtggagcgcagccagcacctccactgccaagatccccggcagggggggtggggggcgccggcggggacacagctctcccttgttcctgccgccagctcctcagcctcagcctgctgcttccttttttaggcaaagtcgagtgctggccgtccgcacggccccgcggtgtctcacctgcctgaaagggaggaaggaagcctgtggagccccatccgttctcccgcggcgcatcctccaggagagggtggggaaggaggagacatcctggcagacacccccccacgtcccccacctcccagctctgagctgaggaggccctggaagagggccatggctactccgagggagggccggggtagggttctcctgtccaggggacactgctggcccagccccacccaagcaggggaaatctgccctgggagccactgtccctcaggacgccccctgcaaccagccacctctcgtctgggcctcaccaagaccccaagactcaagagctcctgtctcaccagtgggaccctccagtcctgctgggggtgtgtcctgggtcctggagtctgggcccctcactgggtagggtatatgggtaacaggcccagtgtggtcccactggacagggcctcaaccaaccatctcccactcccatgcctcttcctccaagaagcccaggtggcgtgggtgcttcgagtctctctcgaattcctgtcttctgtcccctttcaagccactgtgtccttgtaagttccaccccatggtccttcccatccctgctggtcagtccctgggatacatgtcctgttactccagacacctatccgcctccagcgcggaggccaaggcgaaaccacggtctggacgtgtttttttggtgccaccgccagcccctggggttctcttgggcctggctgctgggaccccagcacccagagtcacggcagtggtgggcatggggagggcctagcctggtacctccctgctcggctcccgcggctgggggtcggagaggggtggagagcgtgggccgcacagcctcggccgggagagggagactggagtgtgtgtgtgtgcgtgcctgcgcgtgcgtgcctcggtcgtatctcggctggtgctgcgtgtccctgcgtgtcggggtccgctcgtgcgcgcctctccggggtctgtgcgcgtggccctccgctcgcgccggagggcgtgggcgtggcctcggcgtgggtgtggccgctcggggaggggcctcccgggggcggggccggcctggtccgcgcggtgacgcgccctgcagccccgagcgagcgagcgagcgagcgagttgccgagcgcgccccgtccctcgcgcgcgatgctcccctggacggcgctcggcctggccctgagcttgcggctggcgctggcgcggagcggcgcggagcgcggtgagtgcggcgggcggccgggccggggctggggcttctggtgaccgctctgcgccgctgcccgcgcaaggccgtcgctgtcccctgctccggacgggcgggcgggctgggaggctgcgggagccgggcgggggcgcgggcggagcgtcctgctcacctgaggctggcggcccaggtgctccaggcgacaccgtccgtgagcgccggggcataggggccgtcccggcccgcatctctgcgggatcgcgggcctggacaggaagagggagatgtctgtcaagggggcacccctgcctcagtttccctacccttgcgagggcccttagtggagggatggtagggaagttggagtcgccccaccgcactggggaaaaccgcaaggccgggactagaattgaggcacgctggtgccctggcttggtggggaggggcggtgtagggggcatcagcctccaccccggaggtgcccggaggaagggggaagcctgcgaggggctgttccggctttcaggctgctgggggttatatcttgttgtgtgagtccaggtgggctggaggatggaggccaggggaggggccaccatctagtaagcggggtctgggctccagccaggccatccggcgtggtcattgctgtgcctccgacaccttcccctgctgctgtgtgcatgcccagggtgcctcacctgcaggctgagctgcgtggctgaactccagcctcaggctgctcctctgaaagccatgcctggaggg

SEQ ID NO: 1879561 - DNA, 4001 bp, Homo sapiens
ggaggcggaggttgtggtgagctgagatggcgccattgcactccagcctgggcaacaagagcaaaactccatctcaaaaaaaaaaaaaaaaaaagaatcttggcccataaaagaatgttggcctataaacacataaacattagccattgctactactgtcattatgatttggtccacaaatagaaccagggctagggaccgggcatggtggctcacgcctgtaatcccagcactttgggaggccaaggtggggcggatcacgaggtcaggagatcgagaccatcctgtgaatggtgaaaccctgtctctactaaaaatacaaaaaattagccggccgtggtggcgggcacctgtagtcccagctactcgggaggctgaggcaggagaatggcgtgaacccaggaggcggagcttgcagtgagccgagattgcgccactgcactccagcctgggtgacagaatgagactcagtctcaaaaaaaaaaaaaagaaccagggctagggacagtcctcaaaagaacagctagtttctctctagaattcacttccttctcctagcaaactcctactcctacgcatccttcaaaacccagctcaaggccaggcaaggcggctcacgtctgtaatcccagcaactttggaaggccaaggcaggcagaatgcttgagcccaggagttggagaccagcctgggtaacacagcaaaacccccgatgtgtgcagcacattgtactttttatttttctactaaaaatacaaaaaaaaaaaaaaaaaaaaggctgggttcagtggctcacacctgtaatcccagcactttgggaggccaaggtgggtggatcacctgaggtcaggagttcgagaccagcctggtcaacatggtgaaaccccgtctctactaaaaatacaaaaaattagccgggcatggtggtgcgtggttgtagtcccagctacttgggaggctgaggtggaaggaagccaaggctgcagttagatatgatcacgcggcgacagagtgagatcctgtcttaaacaaaacaaaacgaaaacagctcaaatatctccgagctttttctaagcctttattgagcactactgtgggtcaggctctgggcttgactttgtaatcgcaagaggggcagaaacgggctgctctcaggacactcaggagaacacgggcggagaaagctcactgatcacgtcgacctagcaagcgagcgcacgctggagaaaacgctgggatcaacacgcatctgccaggcccagacggcagagggggcactgctggaaaggccgggaacctcccctctcaacctcccacccaaacccatccctcttttgggaacttggcaggcaatgaggatagggccttaattaagtggacgcccagtatgtgtatttcacgtgcgttattccactggggcctcacccattatcaggacaccagttctattttaacccagcgctgaggctctgagaggtcagtaacatggccaagagctcacaaccagcgaaaggcagggctgggattacagggcgtctcactccgcctcccaagcgctggaaagtcggtggaggggcgtccgctgctctctggcgcccccaattggccgccgaggaaatgaggcggcgatgacctgttcagacccaaatgggatggaagagtggggattagcgggggtagggggtggggtttggactcttttttttttttaagacagtctggctctgtagcccaggctggagtgcagtggcgcgatctcggctcactgcaacctccgcctcccgggttcaagcagttctgcctcagcctcccgaagggcgccaccatgcctggctaatttttgcatttttagtagagacagggtttcgccatgttggccaggctggtctcgaactcctgacctcaagctatctgcccgcctcggcctcccagagtgccgagattacaggcgtgagccaccgcgcccggcctacccttgaagaccccgcagccaaggtcctccggccccgctctgcgcggcgctctggtcttggggctccggactctgtcatgccgggcaggggccagtccgatccttgcacccttgcctggcaccgtccctggagccttggcgtcctggcctctcctccccgcgggctggaggtggagtggccgggccggaaccagtgcgcaaagcagatggcgagcgcggaggtcggttcggccccgccgcgcctcaaggcagcagccaccctggggaaggtggatgccggaagaggcgtcgcctgcgggtcacccagaggacacccggcggggaattccgagggtgggagtgaggagaggtaggagaggccacggcagagggaggccccgcgcagagtgggaaccatcgcccggtgcgggcctgaacttccagggccggctactcctcggcagagcgaccgcgcggtgtctcagagcgcggcccggagccgcactaagagcgctggacggcgggagagaggctcggaggaccggtagctcccagcaaagcggcccagcgggtaggtacaaggccccgcccctcgccagtcctcactgcctgttctccctgcgccggggagctccaggccccagccctaacctgggccctagcggctccccactccatgacctctggacgcccagtcgggtccaggcgcgatagggagggcgcgggcgcccgggcagaggggccgcgggagctcaagcggggctccgtgcgtgccccagccgcccgcttgcgctgtcgctgcagatgtcgggagctatcttcgggcccctggagggcccgagctccctggatgccccgagcatccacccgctggtgtgcccgctgtgccacgtgcagtacgagcgcccgtgtcttctggactgtttccacgacttctgtgccggctgcctgcgtggccgcgcgaccgacggccgcctcacctgcccgctgtgccagtaagtgtcccaaagttccccaaaaccccccagaccccatcccccgggcccaaggttggctctgcccgagctgggacccaggtgccaggagagtaaggctccaacttcaggcagaacgactgggagatactgcacccggtccttagctctccccgccagaagttgcaggcttcggtccattttatagatcagcttaactgaagcctggagattgcagttactggcccaagacctcccatcaaaagtcagagggtaagggcggggctccagcactggtcaggacgctcccggttactcgcttgggggtcctagaagtcttaggtccacaaaaccacagtttcagttatgtgggctcaaggaacccaggagtggctctgatttgcccaatgccgtgagaagatgtcgaggagcagcttctgcttttgatactaggggaccaaccccactgtctgcaggagtgcccaggactgggcaagggtagggaccagggcagggtgagtgctggctgtgatatttatagcagaccccagagctgtggtgcaccccacctcccaacacagctatttttagctccagcctggaatgtgaggggtgggggtggggagccctggggaaggggtatcagaatctcggggcctgggcttctctgcagacaccagacggtgctgaagggtcccagcgggctcccgccggtggaccggctgctgcagttcctggtggacagctcaggggatggcgtggaggcggtgcgctgtgccaactgtgacctggagtgcagcgagcaggcaggggcggcagggcgggtgggtgaggagcagagggtacccggttgcacagtccccaatgcttgcacatgcactcagcatgtcttcagaggacgacctggcagtggattctccagcacctccctagggcaccttggccccaaatgtgaaccccattataccggtggggagactgaggtccagaacaagggacttgagccagtgtccagacagtggcagaggctaaggccattcgatctggggagagctcactggtccccaattcagggt

SEQ ID NO: 1879562 - DNA, 4001 bp, Homo sapiens
gagcttgagtcttgccccacggtttctctaagggttaaatccatgacctccaccaaaactgagcgtgagatacttactgagtccagcgaagagcagagaccacagtcaaattaagagaaacagactcagaaggcacgggaaggaacgtcgatgctatcagaaaagccagattccacataaatcctcctatttacaaatgaaagattcagatgacgggggaaggggctgcttgcagactctttcccacatctctcggcacagtgcccatcttaagggggaaatcaacgttaagaaatgacattggtcgggcacggtggctcacacttgtaatctcagccctttgggaggcggaggcgggcagattgctgagcctggggggttcgagaccaatctgagcaataaagtgaaaccccatctctacaaaaaatataaaaattagctgagtgtggtggtgtgcacctgtagtcccagctaccgaggaggctgaggtggggggaccacctgagcccaggaggtcaaggctgcattgagccgtgatgtcaccactgcactccagcctgggtgacagacctaggtgaagaccttagctcaaataaaaataaaaataaaaagagaaaggataaaaaagatatttttcaccctctaacctgagaattcttccagatacaactgagataggtccacccccaaattcctccgccacccagggcacgcggcagtcgggactggagaggctccctcagcggaggctacagccaaacatgaagcttgcattctttttttctttcttctttcttttctttccttttttctgtttctttctggtagagacagggattcaccatgttgctcaagctggttgccaactcctgggctcaagggaactgcccaccttggcctcccaaagtgttagaattacaggtgtgggccactgtgcccagccctgaagcttgcattctccctggtcttcgagtctctgttacctctggagccatcgcagacatccaagcggctgctcacctctggccaggcttccccggcctatggccaatgtggaagctcagacccttgccctcagatgggcccgcccagggggtttaattctctgcaattgccctcttggacttcttttttttgagacggagtgttgctctgtcacccaggctggagggcagtggctcgatctcggctcactgcaacctccgcctcctgggttcaagcgattctcctgcctcagcctactgaatagctgggatcacaggtgtgtgccaccatgcccggctaattcctgtattttagtagagaagggatttcaccatgttggctagtctggtctcgaactcctgacctcatgtgattcgcccacctcggcctcccaaagtgctggagttacaggtgtgagccacgcgctcggcccctcttggatttcttaatacttttctttctgactttgtggtttgtaaatgaaatccagtgggacaaaggatctgctggcaggagggcacggactgtggggatcaaggacagttagggtttcagggttgggactcaagcaccctgcccctgggcacctgagtctgtgagactcccagagatgtctttgagaaccccccgtcccagggagcacaccattcaatcacaaataaaaaccactgtgacaggtgaagggaggaaaggaaaaagcttttctcctgcttttggaaccaggagtcccgtgttgtcgtgttgcacgggacctggcagtgacatcgctggctctgcctctggccccaacacatcctccagtgtgtgtctctcacctggacgggctctccaggccgatgcgttgggatgctgacttttagagttttgtgtgtgacaaagcagaggacaagcttccccatcacccagaggccacttggtggaggagccggggaagctgctggcttctcgggcttttgtagtcatgggttggccaccgaagcccaaggccaactgtcacctactccaagtcttgacatcctcatctgcaaaaagcaaagagataacatgattttcaagatgttttctggctctacgaatatctgacgattccgagtacacgataaggctcattttctgcttgggaaaacccagtgctggagagaacacaggatcccccagcttcccaacaccagcctagggaaatgatgttcatctgacaatgaaaatttctagggccggggtggtgactcacacctagaatcccaacactttgagaggccgaagtgggaggatcgcttgaggccaggagttcaagaccagcctgggcaacacagcgggactccctctctacaaaaaataaaaataagccaggcatgatggtgtgtgcttgtagtcccagctacgcaggaggctgaggtgggagcattgcttgagcccgggaggttgaggccacggtgagtagtgattgtgccactacactgcagcctgggcgacagagtaagaccctatctcaaaaaaaagagaaaattttagaattagtggcagtggaaaacgatgcaaaggttcctatgttttgaggtgcatcctataacccagatttattgtaggagaaatttcatagcatctcagatcctaggcttggtggacaatgagaggggaggttaataaatattccttctgcctttgggagggtagaataaagaagctgatgtacaaatcaaaaatatttataactaataaatcctatcaaaaccctcactgtgacaatgggccataatttttgttctcttttaaaactgctattgtcgaccagccgcggtggctcacgcctgtaatcccagcactttgggaggctgaggcgggtgaatcacctgaggtcaggagttcaagaccagcctggccaacatggtgaaaccccgtctctactaaaaatacaaaaattagccgggcatggtggtgggtgcctgtaatcccagctccttgggaggctgaggcaggagaatcgcttgaatccgggaggcggcagttgcagtgagcagagatcgtgctactgcactccagcctgagtgacaagagtgaaattccatctcaaaaacaacaaacaacaaaaaacaaaaaaacaaaaactgctatcattgggggataaatggaaaacatgagatgtaattcatcatggcgtcctgcattagctaacattgtgttgacgcagagcccacctcatgctgacagctgcacgaggttcacgcacactggctctttttttttgagatggagtctggctcttgtcgcccaggctggaatgcagcagcacaatctcggctcactgcagcctccacattccaggttcaagtgattctcctgtctcagcctcttgagtagctgggattacaggcacaaaacaccaagcccaactaatttttgtattgttagtagagatggggtttcaccacgttggtcaggctggtcttgaactcctgggttcaagtggtctgcctgcctcggcctcccaaagtgctgggattacaggtgtgagccaccgcgcctggcctcacgcacactggctcttatgttaacattctcccagagaccacggaaatatgtttagaaaagaaagttacagattggcagcagaagtctctgcttctggatcattatgttaagtctaaagacaaccagaaaagaaacgctgctctgtgtccccggtcattgtaaaagtccccagcatggagctcgtcagatgacactgcaatcctatggcctccaggcaaatccttttctgaactgaaaatgtggtctttggcccctcaaaaccaactcaccgagcctggggaatacgacccacttataatgtccaagaccttcctctcatcccaagtttatgacaatttccacccataatcaaaatttcctaaacttactttctgtttttttgttttttttcatttggtagagacagagtctccttctgttgcccaggctgatatcaaactcctgagctcaagggatcctcccacctcagccttccaaagtgctggcat

SEQ ID NO: 1879563 - DNA, 4001 bp, Homo sapiens
ggccagataaagtgggactcaggatgaaatctatagttgggaaaaattccttggcagaggcttttaaatggctggatgggggagatggttaatagcctagttattaggaaagagagataaaggtctggcctgggactgccactagcatgagcaggaaaggagggcgttgaaagacactttttttttttttttttttgagacagagtctctgtcgcccaggctggagtgcagtggcgcaatttcggctcactgcaagctgcgcctcccgggttgacgccattctcctgcctcagcctccccagtagctgggactacaggcgcccaccaccatgcccagctaattttttgtatttttagtagagacggggtttcactgtgttagccaggatggtctcgatctcctggccttgtggtctgcccgcctcagcctcccaaagtgctaggattacaggcatgagccaccgcgcccggctgaaagacacttcttaggaagaatactgaggactttatgatttgacattggacccgagaagaggaaagtacagactcatagaaaatggtaacagaaaatagttaccactgtagacgcctgcctgcattttacagagtgtggctctgaggatttgagggggcttaagtttgaattctggctttgtctctgaggagttgatctagttacctatctgtgcctcagcttccttgtctgtaaaatggggataataattgtacttcttcttaggttgtaaagatttcgaattaatatatatgaggctcctggcatatagtaggtacttagtaactattggttgaatggatgatgttcaaaggattgcatcacaataaatggaagaaacaggatctgaatttgtttgtccaactctgccaccttaccctgatgttccagagtcagcctttctcacatgctgcctttattgtgtaggcctcttttactggacctgttagatgtcacttggtatcaagcccacgttccgattgcatggtcctggcgttccacagcctggctcactccagattgcccgccccaagtctgtgtagactgtcccctgtaacccacctcccattctccacctctgaccttcacggagggcccggtcaccaagccacctcccacccctgcaatagttgcccaccccttgtgatctcgctgatgtcactgccttggcgaaggcattctgaactactacagaccactgcagtctagccttcttgggtcccttgctgcactgatgagctgcacctcacttctttatgcttggccagatgacatctcagaatgttctgtaatgacttcacacatacttatcttacgtgcaaaaatgaatcacagttcagtaaaggtccatggcaacctttattatcttcctagacccctctcagctaggtgctcagtaaatacctgaatacttgaagaatggattaagcggcaggaattctgattactgaggtggagtgtgccagtagttgaggtcctcatctcatacctgaactgtgtcagcagcctctttaactggtctgtccctaatctacacttaggccacactgccactggcacagtcctcatccagtcttttcatggaaagctccagcttcagcctttctgccagcctacaattaggaactcttccgtgcggcctgaagggctctctgcaaccggatccttgcctgcctctttcgtcttatctgctggcactccattctgcacaccctgtcctccttgcagttcccagaatgttccctgtgccttttcctggctgacttctgctggaagccctgctggagcccacctggcaggctcacactcttccttgtcacttcctctaagacatcagcaagcagagtaagttgcttcctcttcctagcttcacccaccaccctttgttcctctgctgcttttcttgcaggccctaggactggtttgtttacctgtctgccttcctgggcagactgcagctccttgagggcagggccatctttccgtgccgtctctcccggtgatatgctgtgtgcacacagcgtaggatgcctgttgatcatataaacgatacttttgtcaagtaacaaaggtcactcctcacactagaggagagcttgctgctttcttgtgccttgagagattttcccttcgaactgtatgaattatattgaaaattgacaatgatgagtcatatctcagcaagggtgaaattcaaaaacgcaaagcctccactactggagtaggaggttgcagactggtcttaaaaggctaagtctggcccttcactgaatccgcctggcgggtctcaaacacagggagtgggagggaccctctgcccggtgggcaggtgatttattggctgggaagcttccgcggtgatttagttgtgaagcggcggccggggaagtgcaggctaatgcctgggccgccagggagaggccgcccacaatcgcgggccggaagggaccgcggggggcgtcggggccagccccccgtttcgcagctgaggcggggttggggcggagggcgtgcggccggggcgcagccgacttcgtccatccggaacgtgggctggagacccagcagcctgggaagggccccagccctgtgggcgccctctccccacgcttgctgcggtagggaggaagtttctgtgctttaccgccttgatgttctcctgtccggaaggaggacacagattccagcgccgggtgccctggaggctccggcctcggggtgggggtcgggccgggggcggggccggggccggggcgcggggccccggctggcggacaggagggcggcggcaatccaggccgccttttgcagccgcccgcggccgcgccgggctctgcgcgccgcgctcctgcctcctcccccgtcagcggcggccccagccccgcgccccccgggccccgcgccgcgcggccccgccgcggtcacacgccgagccacccgcggccgcctccgccctgcgctttgtggagccggagcccagtgacaggcgacggcctcttgccgccccggaccccgggcgcttacctgtggctgctggggtcggccgcccgggaccaggctgggagccccgaggtgggggctcggagccaggagctgcccccaccggggcggggaggggtgctcgggaggcatgggacaaagtgaaagtctccgggctggggttagggacgagtctgctgcgaaaatggatgggggcggcgagtggcgtcgggagggcggaaggggtgctggttattctctggtgtctcggagtggcttttaatgacggacggtggggcaggcccgctggctttcgtgttcccggtgggcttctgtgatactggtgccttccggtgcctcctggcaaattctttggattaaggaaagcggccttttaaccccctagggttcccttctggagaagagtcaccgggtttggttctgtttcccctttctgctcgacacttctgggaagcttggttctcaggtgggaaagcagttgtgttttattaaaacatggagcatatttataccttcgtgcaccagaatgtgtgcctggtggaagagggggacagattgcttcttagcctcagacgcaggacgtccttctcttaaacgcgctgccctgcgtggtgggtgggattggggttctgatgaaggtagctggggcctgccctggccagtgggtcccagctgagctgctgacatactctccgagcctcggcagtattccctagccgagactttttttgtggttgttattctgctgattgtagatatctttgctttgctgacatcctgttttgtttttggtttttacatcccatttgtttctttttatcacagaaacgcttcgttaagggactcaggcagtacgggaagaacttcttcagaattagaaaggagctgcttcccaataaggaaacagtgagtacaattggactttatgtaacttgattttttcctctttgctcctgctgcctctccacatttgatcttatgaaatggt

SEQ ID NO: 1879564 - DNA, 4001 bp, Homo sapiens
tcaaattcctggaaaatgccacggatcagatcttgcttttaacttcttatgccttacagagaccaaaacaagagcgaagaaacggacatttcactccaagatgtcttcccttcacctcgccctcgtcggccacccaaggaggccagttcagggaaaaacaattccattcgattccattctattctagttagatgctaggatattactcctctagctaatgtaaagcgttcttttgccatttccctttgtctgatatccatgttttcattctcattcttttgtttacaataagcctggtacagatttgcaccactcttttttgttgttgttgtttgttttcttttctttttaaatgttttatttccaatttttactttaatttcaggggtacacgtgcaggatgtgcaggtttgttccatagataaacctgtgccatggtggtttgctgcacagatcatcccaccacccaggtactaatcccagcatccattagctcctctttctgatgctctccctcttcccagccctaccctctggcaggctcgagtgtgtgttgtccccacccccactctatctgtccatgtattctcatcattcagctcccacttataagtgagaacacagagggtcatgatgatgccactcctccaaggatttcaggcttcccagacgcctagttttcagtctagttcttctgtgagatcttacacttggggagctacacgttctcgcgtttggggctctttcaggttctatctccattttcccctcaattcctccccattctgctacaataacaaaacaattctcacctccggaagatcccgcctctgcctccgcacgagcctttcaggaggtctgaatgtctggtccaccgctccccggcttctttccccgcttttgcttttcccttcccccgctcccgccctcccgcctcacgacccgaccaccgcccagctgagcccccgcggctccactgcgcagaaggtgcactggaggccctgcccgttgcccgccccgcggggtgccgagaagtcaacctgaataaacgccttgtaaaaagaacttcctaatggaaaaaatatcttatgatttccattctcaacgctcttcagaggactaaaagataaaggccatgatggattcattcaacaagtcctaatcctgcgccctggtgtgtgccagaccctgctccccgcgaggggatccacgagcgaccctcaccactatccctgccctggtggaccctccgtgcgggacacagcatccgaagatggcagcggaagctcctcagcgccccgaaagcgactgggcagggggcacaggctccctcactgggtgaaggccgcacaaagaaccggaagagccatccgggtagctcacccggcgttcagcttcccttgggccccctggctgctcgggcccggatcgcggaccggggcgtttccggggatttctgaagcggaggaggggcagggcgggcgaaggccattcggctctccttctggctccagaatctcccaacccgcaggtgtgcagtgtgaccagcgcgactcaccgctctaatcgctccgattttccaaggccttgctcagtagtcctgccaggcgggccctgaggctggaagggatgggggagttcggtgagtgcgccctgcctacagcgcccagtggaatcgctagtacctgtctctgtggcgcaatcggtcagagcgttcggctattaaccgaacggtgagtagttcaagaccacccagggacgcctgttctagcttttaaagcattcatgtattatcatcactagagaatctccccctattcttcccatagtcctaagtccgaaaggttggttccaggccagccagggatatgcccatttcaggaaggtttttctcttctcaggattctagtcacagttaacagggatccctatcaagagccaccccactcagagatccaattctgacagagcatctcctgaaatgtcaggttgtcttgtgcctgagtgcaagaatcagagaccaaacaagtcacttctggtgcgataaaatcctcatgcctgccccttataggcttggatggattatagaccagcttccatttttttcatttttaataggaggcctagagaggtgtcctatccccaggatgggcctggatttagtgattgctcaatcaataatgtgaccagtggaatcattgatcatcataataatcctctccatcatttttgaaaacagcatttcccccttcagtttgtacatgatttacttaacccttttcaaaatgtgtttgaagagattggcttcatgattttagtactacaaagaatcttgaaaccatcattcttgtacatatatctttgaccactgatatttctatagtgtagagaactagaggtgccactgctacattacaggctttttaatttttatttttagtttttatgacagggtctcattctgtctctcaggctggagcacagtggcccaaccatgtctcatggcagcctcgtcttcccaggctcaagtgatcctcccatctctcagccttcccagtagctgggattagaggcgcgggccatggtgccctgctaaattttgtatgttctgtagagaaggggtttcaacatgttgcgcaggctggtctccaaactcctgggctcaagcagctccgaggcctcccaaagtgccaagatttacaggcatgagccactgcaatggaccttacataatgcctctaacttcagcacatttagcacatttatcctctgcacgagcgataccaaatcatattccaatttatttctcaactctcatactgcccctttcttcatttacttgctggcacaacaaactgtctgccaccctacccacccccccacccccactttattttagactaggtctcactctgtcatccaggatggagtgcagtggcttgatctcagctcactacaacctccaccccctgggctctagtgatcctcccacctcagcctccaaagtagctggatctataggcatgcaccaccgcattcaccatttttttttttaagagatagggtcttgctatgtcgccgaggttggtctccaacccctgggctcaggagatccatctgcctcggcctcccaaagtgctgggatttcaggcatgagccaccgtgtttgccatgtgcccatgatattctaataaggggacaggttccctcccggcttaactaaggggacaatacaacagaaggacatggtggacattacacacagatattctgttgcataggatggacagctaaacttctaaggcattttatgtttattttattttattttattttatttttcgcgacaaggtcttcctctgttgtccaggctgcagtgcagtggcatgatcatagttcactgtagcctcaaaatcctgggctcaagtgatcctcctgcctcagccttccaagtagctgcaactatgggtatgcaccatcataggtggctattaaaaaatgataataattctgtagagatgtgatttcactatcttgcccaggctggtctccaactcctgagctcaagtgatcctcctacctcagcctcccaaagttttgtgctgagattaccggcatgagccaccatggtcagccctgtttctttttaaaatttatttattttgggacagggcctcactctgtcacccaggctggagtgtagtggcatgatgacggctcactgtagcctcaacctccctgggctcaggtgatcctcccacctcagcctcctgagtagctgggactagcagcatacactatcatgcctggctaatttttgtatttttttgtagagatggagtttcatcacattgaccaggctgctctccagctgagctcaagcaatgcacctgccttagcctcctaaagtgctggtattacagtcgtgagtcactgtgcctggcttgtcattgtttcctgtggtgaccaagtcacatgggtccagagaagacagatcacag

SEQ ID NO: 1879565 - DNA, 4001 bp, Homo sapiens
gggtttgatttgtacctggggcaccagtttgtcatgttatgaatcatgctggagtattttataacaccatctctcaaagtgagagtttcagtcctttcatggaccagggctgctaggatacgcttaatgcaaatgaagccacagtggaaagagaagtgagcagcacataccacatgaagaatgctttgttattaattttttattccttttagtttctcgactaaaagcctgaagatctgttaataattttttggcatgtgcttagaattgtttttctggtggtaaggatgagtttgcatcagatcaccttaattgtcttttatctaggttctctcatgacttgtctcttatctatgttgtactgtgaggaaaagttcagttttaaagaatgacccctgttgatgagaggtgttacatgtggccatgggacaggatttttcttttccttatagcaagttggcacatgaagatagcatgctccacttaaatagaagaattaactcgcagtggccagtggtgtccactattgctttcaaagacatatggaactgaatttggggaacactaaacttgttttggacttgccattttttttttaaattcttttttagctaagttacctattgaatgcccataattaccacatccattgtccttttttgtcaaaaagcttcactccagttagaagatacctgaaggcagaaactgcggctttgtcaactgttgatttcctcatggcgcgcagtgtaaatttactagtactttatttagtagaggcttagtacttactggttggcagatttattaatagttcctgtacatctcaggaaatcaacagatgatttatgttattctaaccctaactttattaaatataataaaaactttcagcatttattgtcaggcccagggctaggtaggctcctgagatacagaagttaataagggaagcagcccagaaggtaggggaaacaaaaaaatagttacaacactcttgatatgtctcagcatctatagacattaacatcaggaaaagcgggggtgtggggggaaggaatttgtcagggagggccctttggacaaatgtcacgtttctcagagtagcttttaaatatgggtgggaaaatgagggcaggggaattgaagtgggatagaagggagatatttaaactaaagtcattctatggctgcaatcactggacactatattcacttatccatgcaatcacattcattgagtgcttcctatgagttaggcagggtgcacagtgtaagatacaaatgaatgatacaggttcacagcggttgtctagtgggataaaatgctgcacagggcaacctggataagcctgacatgttaggtgccacaaaactacagaacaaagtgctaaggagattcggaaaatttacaggtcatttctggttgcaggatctagaagaaggatgtccacaattcaaggatcagtacaatcttcgtagcgaaaaagcgttggtttattctacctctacctagtttgtacctcaacatcttttaccccaaaggataaaaaggtgcaaatgagggcacattttcttcatataatacgtaatggtgcttacttattgctttcctgttcattccccgcaggtgatttccctcttcagtctcccccgagtctcacagaaggaactaacaagggagcgcttcacaagcacacagacaccttcaaacaggcgcagaagagtacttggtgaaaaagtattctttcaggtgactttccttaagattactgagcattaagaatgaaaatatgtaaaccaggtttacgagcaagaaaataatctctccacattcagagttaatcttccgaactcagcaactgccagtagaacgcaccccggtcagggcgggctcgcgggcgcggtcccacccccaggcccctccgccgcggaggttctccagcgccgcccgtactcccgcctttcgcgcgtccctgctctaacagctctggttctgtcaggacctcactcctccgctcccggcgcaaccgcggccacgcagcgacgtgcacgcgcgtgtgcgccgccgccgcccggcagagtgggcgcctccgacatcaggagcgcgcacgccgcgcagaggggcctggacgagcgcgcttccgacccgccgccaccgcctcctcccctccttctcggcccgccccctccctcgcctcttcctgccaggcggcccttctcccctcccctctcagttccctccgccctcctcgggctccagcggtggcggagcgaacgggaccggcccggcttcagagcgcgaggtggagggtggaacgcgggcgcctgaaggagttgttgtctcggcagcgcccgcggagacgtgaagaggtgaggcgaggacggcctcctagggacacgagggcggcccggcggcccggatccgcgggccgaggctgcctgggtgtgttggcgtcgggctgagcctggggagggtcgagatggggccccagccgaggactgggatgcgggaggaccgcggtaaggagggtagggggcgggttcaggactgtcggccgcctcccggacaccgcagttctcccaggtggccgctcctcgcggatagggcgggcggggtcggcgcccttacctgggggtggggtagtggctttggcggccgcctcctccagctgtgccctcctgacattgctgcctcggcggctgccgcccgctgctacgctgtggctgctgctggattcgcagtcccagccgccctgcgtccggtgggcgagtggttagggtattttcttacccacacgcaggcttctgtactcgaccatttctctccctcgcccttcctcttcctccgccgagcactttgctcggctcctgctgttgatgcttgtggttttgcagtttgggatgggatgcgttccgggcagatccctacctgtagggaatgccccgcttcaaagttgacctcctgagccatgacaaacacctccccccaacccccacccaccttgtgagtgctcagtgtcctgataactgagtcaaagtttctgagactgggctagtactttgcactggtcgccaacggtacagggctgggcagtgcgtcagcatgtggaaaggggccaccggctagcgggaggtggccgggtgcatgggagctgaactgacgggtttcagatactaggcagtgtgtccaggtccttggatctctcagatagggttatattagaatatgtaccaaaacttgggtggtcacttgcaaaattggtttcatgcaagtaaactgaaatgccagccttattacactaatggtaaggagaacttttgcttgcctgacagatttcagcgcagtttggaaaatgattttaaggcctttatttttggcactggaggggtttagggatttttaatacatttaaatttcctcgtgcatagtgggaggtaagtagttgcttgttaaaattctgaaaacacagtttcatgaaaaccttctgacttttcttacagtagtgtttatatttggcatcttccgtagaatatccattagttatgatgtcagaagatacggatgtgaagtttgctttttgtgatcacattggaagtggattttgttcatggaaaatactggttcacaagctcctagtactagaaaactggcctgtgattcattttctcagtagagcgtcccttatgaaattgacaatgagatttctaaggagaaagactagttgaactttatgtatacattatcatcaaattgtattaaatgtacacctgcctgaggggttagctctagactttgagttagactggtgtctatactaaatcagttcaataaatgcgctgatattatgtattattcatttggagagaagtagataaagcagggcagagtttatattttaacatattatgtagcctacatttgctctgatgtgtattattattattattattattattattattattatttttgagacgaagtttcgctcttgatgcccagg

SEQ ID NO: 1879566 - DNA, 4001 bp, Homo sapiens
tggacaacagagcgagaatccatctcaaaaaaaaaaaaaaggaattctgtccttgaaagccacacacccacatggtccacatggaccctcagcctctttcagtgtacccctgcaacttcaggggaattcaattcaccgtgacctttcagaatgtgggggcactgctcacatgcctgccccacaacccccaggccctccctctccagcccatcctctggcctttggacttcagggcacagttcatatctcctggcagctctcccggggcaccctcctgggcctagatgagtcccaggtctgctgctatttggagtttggggaaatgatcttcccctgggctcagctttcttatctttataagtgagtgcaggcagaagtactggtgtggttgtaggggtggcctctggagtctgggatccctgagcctggggaccagctccacctctgatcagctgcttgggctcccagccaccccgggagcatgatgaggccagccagtgaagcaggtggagcactagctcggttagccagacgtggtggcacgcacctgtaatcccagctgctcgggaggctgaggcgggagaatcacttgaacccaggaggcagaggttgcagtgagctaagattgtcccactgcactccagcctgggtcacagagccagaccctgtctcaaaaaaaaaaaaaaaaaaaaaaaagcatcagcccagtcagcccagtctcagctgctcactgaggtcactcagagaaccccagaaaaagtctggaagcccagactgtaccctgaccattaagtcagaatctagcagaatctagggtgggaccctggtgggcatcggtacctcttgaagcccccagtgattccagcatgcagccgctgtggggggcagcagcgtggaacgctagcccagcgtctggcctgtggcgagcaccctttcagcccatctctttcacagcggccagggtagggtagcccctgcttggccaccctgcacagcctgagggtgaggctgggtgggtcactcacctgccccttctctagctccttcttccagggcctgcagcagcggatgctgcagcgcagcctgagatggtggcacttgagggcactgggcccagatgccacatcaagctgcaccaagaccccctcggctctggagccactgagcagcagcacactccaagactctctggagaaggtgagaggtaggagggtggggaggggctggggcaggtaggggtggatgggtggagattgtgggaaggggacagggtaggggaccaaggactccacatctccttccccaggttcccagggcccccaccctcccggacactctccaggggagccttctgtgggcagctgggcagcggcagcaggggcagtgccttctgctctggcaggcacgggcccagcagttccagggcacagccaggtggtaccagcatacccgccagaggcggtagggatccctccccatccgcccgccactctatggacttactgtttcccggccccttctcccttccacccttggccttcacagcagcagccccttggggtctgcacctcagggggcttcagttcctcctgtcttcctgccccgtcctactgagagggtgtcggggagtggtgaggcactctacagagtcactgttcctcttggagattttgcagctgaggttccttcatttattcatttatagcacaatgcataagagttggtctccctgggttctaatcccagctttgcccctcattggctgtgtgatcttgggcaagttgcataacttctctgtgccctatttgcctatctgtaaaatggggttaatagtactggctccagtggggcaatggcgaggcacggcacatacattccccaatgccgtgtgtggcacgttgtgagtgctcagtccatagcaatgtttatggctagtggttgagcacaggacttggcagtgggggtctagaatcccaccctatccccaccactcatcatcgtgaccctgggagaggtgcttggcccctccagtccccagcaacccaccctcccataatggaaacagaagagtcacccagagcctcctgctgctggggagaggaagagaaaggagggtggggcagggctggcctgggatttgggggacagtggccatcctcagggtggaccctccctttcccagcatcttcctcagctggagccgctgggcaacagcccaatgggcctggagagagctggcttcccaccgggcctgggatcggacctgcagggctgtgctgggcctgtggcgtcagcggctgctgcagtcacggctggtggagtggtgggcccaggagcggggctggcggctggcacgagatgccctatgccactggcactcctgttggcagggtgagtggagacttggtcgggggcactgcgggtgagggcagggccagggtctgtctgagacccagactgcagccctggccaacaacttgactgtaaccgcatgggagaacttgaggcagaggctaagctacatctggactcctgacccatagaaactgtgagataacaaacatctgtggtttaaaactaataagtacttgggtaatttgttacacagccatagctaacaaatgcagttgatcagagaggtccgctgagctgtgacactgacctagctgggttcaaagaaaacaggctgaccaactcttacacattgtgctatgaatgagcaaatgaatagacctcagctgtgaaatttccaagagggacagtgactctgcagagtgcctcaccaccccccataccctcccatcccgtagcaaattctggtgatgagacccccacagggcacacccaggagtcaggtggcagagcagaacctgggggcttggactctgtagtcttgagtttgaatccctgctcttccataccctgactgtgtgaaacttaaacaacctagttaacctccctgagtctcagcttacacatctgtaaaatggggataatgtagtccctatgtcatcacctttatcttcatccttatcctcacctggcctctaggagtcactggtcggagccctgagttgggagagaagtgggcagagtcatggtgcccttaggggccagcagagttagtcagggagggtcccaggaggaggtgaggagggctcagcgggcagagcagtggcgagagaggttgaggcgtgggaaggggtcagcaaaatagggcagtgggaaggactggatttgcagaggctggctgagggtgcagtgtgttagaagccctgaggaatgtggccagtgaagggaggagggatggtcccaaggcaggcttgctctctgggtcttggcctctgggcaaaaagagctgttgcatggcccaaccagtcttttttttttttttttttttttgagacgatctcgctgtgttgcccaggcatgcagtggtgcgatcttggctcactgcaacctccaccccctgggttcaagcaattctcctgcctcagctcccctcgtagctgggattacaggcgcctgccaccacacctggctaatttttgtatttttagtggagatggggtttcaccatgttggccaggctggtctcgaactcctgacctcaagtgatcaacccgcctcggccttccaaagtgctgggattacaagcgtgagccaccgcacccggccccaaccagtctctttataacctgatatcagaagtgacatcccattgcttctgccaaattctgtctgttaaaagcaaattagtaaacccagcctgtattcaaggcggggcattgcccaggacacgaacacaggatgctgtcttggaggctgcccactacaccgacatatcgcattaatgagctggcaggcagggctgtggtggttctagaaagtcatgtcctgtccgctggagacagctgcttatgcagcccaatcattccccggcaggaacactgagccagtgtttccagaacttctagtttttacagaaaaattgaaaatta

SEQ ID NO: 1879567 - DNA, 4001 bp, Homo sapiens
tttgccttttttaatcaccggatcagtcgcttctgctttctcagtgttgactccatgcccacttctccccctcccctgcccttctaggtctattgcagggctttcctaactcatttcagcctctagtctcttcctgtcccatttctcctttattctaccacaactcccaatttgatcatgttactaataggcttgaaatattaaaaacaaatcttccaaggctcctatgaaacaaaattcccaatccctagctgacattcagccctgatattttggtgtcttctcttctcccctttgatctatacacaaaacgtcctgcacactagattgtgcagctccttgctgatgctatactgtttccacatcagcgccctcacacccccgtgccctttcccagacttccccttacttcactcttgcacctgcaagctctgtttgtgccaggaaagttcaagttgtcctgaaagtaccggcttactgtgacatctttcctaggttgctgtctccttggctcaatgcaaagcacacccctccccttcccacatcactctccgaagacctcatagacctctgctggctctttatcacctgtactcccatcatttgcatgcagttctgatcctaccaccaacaagggaattgaagaaagggcccagatctcatttattttcttctctctagcccttagcagaatgtctagagcatattagattttcattaaatacactcattcactgaacaaatatttctaaatcatctattctgtatcaggcagtatttaaggccctagagatgtagcagtgaaacaccatgggggacaattatctgccctcatggagcatacacggtggtatgggagccagggagtaaaccagataaatagtaaaaacatactgtgttacccagtgatgagtgccaaggagaaaacccaagcccacctagaggagggatgtgaagaaatacgtgctgagtaaatgagctgttccttctcctggggaattttataaaatttcaggacaagggaatggagggatacacttgggatgaataaatttgagagaagcatgagatctagatagtactcattaatgtttgaaaaatctggtattgaccctccagtgagagagattcagaagaacctatggtctgtgagcaatagaatgagcaaatgtttatctaaaataaatgattttgcaaactgcctgcaatatcaaaatcttgcagcttctacctgaatattagcatctagatctgtgcatttctttcccttgacgggactgaaggcttttttttttttcctgtgttgctctctcacatgaacacctgggtgctcctcattgcagatgccttgccctgcctcctgccctccccagtaatctgtggtaaaggtggaaaggtaattcaggcaacctggccactgtcacgattcctcctagcaccacacacacacacacacactctgtcacacacacaacactcacacccacacaatgcacacacacttattcactcacactacgctcacacaatacacaaactcacacagcactcacaatactcatttactcaaacacacacacaacactcacacatattcattcacacaacacacacatagcacatacacaattcacacacattcacacacaacactcacactcacatagcacacacaatgcacacttattcactcacataacactcacattcactcacagcacacacacaacactctcattcacacaacacccacacacacactcacacaccactcatgtacacactttcacacacacccttatacacacaacactcacacttccttacacactctcctacatgcatgctcacttgttcacacacatacacacacagacacaccctttcacaaacacactaaaatcccagcagcagaggctccactctcctttcttacttgtcattagcccgtgaagaggttcgcttaggctgccacagcacagagtcccagctgcgccgtttctccccacaggcactttggaatgtggtaacttaaggcctgttgctgggtcacaggtcagttttaaggaagtaacctccgagctgtttctgcttactttgctgtccaagaactctaggtttcctcattccagtgtctgtgggggtgactgctaggggctgaattgtgtttcccctgcctgcctcaaaaaaaaaaaaaaaaaaaaagtcacacactgaagtcctaaccctctaccacagaatgttactgtattcggagacacagtctgtaaagaggtgattaaggcaaaatgaagtcatatggaagagccccagtccaatatggctgggtccttataaaaagaggagtttaagatataaacaacacacagacagagggccgacctatgaggacgcgggaagagggcagccctctgcaagccaaggagagaccttaccagacaccaacccttctggcaccttgatcttggacttccagccttcagaatggtgagaagataaatttctgttgtttccctactttgttagtgagcctaatacagctgactaacacagtgacattgtcctttctcatctgtggccacctgcccttagtgcactgacctcctctttcacagtggatgtgagaggcaggctggatgcagcctccttcccaggaaaacaaatctcacattatagaactcccacgacttgtgatgtgtgaggcagctctccagcgcaaccccatgaaggctttggagcaagcctctgttctctgacacaggtgtggctctattctccttgagtggaacacccatttccagataccccttcatgtcctcaccctgcccagcagggaggaagcagccctccaggaaggcaagaacttctttgatctgaccaagtggccctgcctggtattttccaaagaaactcgcttcattagacatgttattgaccagtcaaggaagaaattaaattactccaaatcagaaactgaattaattaaaacaattattactctcacctgcaggaccaaaatggggttgttaagattgtgttttccccgcctctaagagaaaaatcttctttgctttccattttgagactcaataagtagaaaaatagcagcacacttctgaaaagggctagaaaatgaaaaaagaatgataattcattattcagtaatcaactccgattgcaaaagcagcagattctgctgagaacatagggctgtggagaaagacaaacccagaccctgcccagctcgcaccctctggggcaaatcctctccacagagaccttattaagaggagaaagttggggaaccagcatggggtaccacaatttgcagcctctctacctttgtacagcacattaacatgcagagtcattgttttatgggccttgcacccctcctctccaaaccccactctcagattaagatgtattgtataatcatctgccttaaggttccagaacgcatccctctccactggggcctctgaatagagaagcagataaagtctctgcaagagaacaaacctgtggagcagcttctatttgtcagtcagtccttgctctgtgctttcatggtaggcagaattctaagatggtctgcaagattcccacctcctggggcacacacaccttctcccaattatccaggcaaatactaatctaggtgctgccatgaaggaattttgcaaatgtaatcacctgccaaatcagttgactttaaggagaatatcctggctgagcctgacctaatcaggtgagcccttaaatgagactgggttcttcctgaagtgtgagagggatttgaccccagagacattctccattgctggctttggagatggaagatccattggatgagagatatgggtgacttctaggggctgatagcagcccccagctgtagctgacaaggaaacagagaccttggctctgcaaccacaaagaactgaattctgctacaatcacatgagctaggaagaagaccttgagctccagatgaggaa

SEQ ID NO: 1879568 - DNA, 4001 bp, Homo sapiens
aagagaaccctgttgatgaagtctgttaagtcaaccttctctagggataaaacaggatggagaaagatagaacgtgaattttaagaagcaaatggagaatatccaatacaccacctaaccaccaagcctgttagactcaacagtcctcatcttacttaactttcggctacattgaatgctgattaccaatcccaaattgaaattctttcctcactttggttttcataataccactctacagattcttctctgcttctgtgaccgggggcatgcatgctccttgtctattggtgtttttctggattagtctcctccctcacacttcagatgctgttattccctctgacgacttcaggtaccatctacaccgaggcttctgaaaatcaccactgtttacattttggaccagataattatttgctgtggggagttgtcttgtgcattatagtatgtttagcagcattcctggcctctaaccagtagatactattagcatccctccctcagttgcaacaactaaaactatcctcagacattgccgactgtcctctggaaggtaaaaatcatccccaggaaagaactgcttacctctacatacagaatatgtatcttctgtcctgagttccaggctgatggaaacttaattaccatcatctgtctcctggacaattgcaatcatttcctaagtgggctccacaactcccagttttcatgctcacatcagactgatccaaaaaagactgtgaatgtgtgagggaatcccaaggctgtcaagccatgcagctgaaaatattcttaaaacatctacgagacacatgaaaagaagtggaattgtaagagtttttgacttacactctgaaacatttggggatgtagatgctcttcttgatgacctatgacttgtgggagtgaagtagctctgtacagaaatattgtacctcccattacaggaaaagatattctttcagaagaaagtaaactcaacagcagcatttctctagtcaattttcaaaagtttggtctctaactggaagtttaaaacgtgaaaagagtataatgactaaaatggtacgaacatatatttagataaaaatatgcaggctctatgacaaaacagttatcttttacaacaattggatttgaaaaaattacacacacaatacacacacacacacacatatattatatacacaaacaataatcattttaacttgacttttcaagataggtgctactgcagtaactcctgtgcttttaataacaaaaatttgaaaaatcatttaagaacaaatacatttgtcataggtagttgtttatatgccttgctatgaaaataaagtacctcatgaataagttagatattgcattcctgaaacatatataaaagtcaaatactatgtatgttcataattactaaagaattgatgtaaagacagtataatccatgctgtggaatagctttgttgcaccaaagatagccaacatttttatgatgtgttatgttacataattatttcacatacattatctcactggaagaactacgagacacaattgctctatgaggtaggtagaacaatgttttcaatatgtcctcctcaaggatgacaaaattgaagtgtttgtggttagctgactagtccaggttatgcaaccaggaagatatagaggttgaatttaaccttgggcctcccatccctggttcctgtgcttttcatatcacagcatacttcatactggcaatcatcaatgcaaagaatgcattaacaaaaaaattcaggattatctaagattagaagatctaccttaatatatttcaggcccatatatcgattctgcaggaaaaaaacaaaaacaaaagaacaaagttacctggaatccagagaaagcttcggttaagttccacaactctaacaactaatacagtgggtaggactctggcagagagaacaaagcaaagtataaggtaatctcagttttcaattatggatattcattatttgggcaatagcatttaaggaaaacatttaattttatctttacttgaggctctcacctataacagctgtcaaagtctgttcatctttcagggatttttttacatagtataaaagaaaatgctcctaaaaattagtttttcataaaataaggtgtttcaccctaggttattttatttcttagagcgttcactccctgcttccaataattgaacacagactagcttgaattaaacatgctatatcaaaaacattaattcatttttaaaggtttacatatattcattgctaacaacatacaattatttcccctacagggttcctgttataacaaatcagatgcactttcaataggcaataataatcacacatgaaattgaactttccgggtaacttgaattacagagacttacataataaactgtgtaagtcccacagaagtttagaagaataaggccatggctctacattacatttatcttttattaaaaataaataaagatgtcatttttgccaatcattgtatctccaatttattttttcccttcttcaagcatttccagagaatgaggatttttaattttcttttttgttgcttttgttttggtagggaaatggaaaggacttttaaacctccatttggctttctctgaaggagcagcaaggagtttctatttgaaaccagagttattttaccattctttccagttccagagtaagaatttaaagaggcaatcattccaaacataataatagtaacaaaaaccataaatgatttcaatttaacagttatgaggtatatattgtctaattagacattttttaaacccaggtattggctattcaaaagagatacattcaaaacataaggatacagaaaagcaagatgtaaaatgatggaaaaactatatctagcaaatacaattctttaagcaagtatcaattaatatcagacaaatacatttaaagagaaaaagcattattagatatagaaatatatcttatatacataatattacttacattattacataactataaaatggtacagtaccactaggatgatctaaaaattttaaacatatatatggctaataaaatgtcacagaatatacatagtaaaaactgacagactacaggaaaaaagtggcaatccaccatcagaaatttcagtgcagttctttgaacctttgctagatcgcgtaacaaaaaattagtatctatgtagatattaaccacagaattaacaagtttgatctaaaggacatattaaaaacactgcaactggccaggcgcggtggctcatgcctataatcccagcactttgggaggccgaggtgggtggatcacctgaggtcaggagttcaagaccagcctggcaacatggcgaaacccgtctctactgaaaatacaaaaattagccaggtgtggtggcaggcacctgtaatcccagctacttggaaggctgaggcaagagaatcgcttgaacccaagtggcagaggttgcagtgagctgagatcacaccagtgcactccagtctgcgccacagagtgagactctgtctcaaaataataataataaaataataaaaataaagcattgtaactaataattagtaaagtagccacttttccacctccaacacacaaggaacattttcaaaagttaataatgaactagtatactgtaagacaaattactctttaggaccacaatgcaattaagtagaaattaattacaaatatgtatttgctattaataataaatacacatacatctaaataacttctgtgttcaaggaataaattatactggaaatctgaaattcttaaaacttaaaaaaaaataagagtattttatatcaaaactttggaacatcaagaaaatattactattaaaaacataaattacaaaagaagacttaaaacaaatggcctgagtttccaactaagttaagaaaataaagcaaacccacaaagtacaaacataaggaaataagtaca

SEQ ID NO: 1879569 - DNA, 4001 bp, Homo sapiens
agctttattagagacctgagctcttagtgtttcactgggcttgaggaaagggcctctttgcctcctaagtgggagtgggagtgtagccacggtgggaggtaggagggagcctcactttataaattcttattctcattgcatcctgagaggacttccctcaaggttacacagctagtgtaagttactggcaacttttggggctcagcaacatggagctcttctgcttttgggtggttgcccctctctgcagctctctacctgtatataagagccccatggtggggacacctgtggtgacccagaacttattcactcactcactcattcaacaaatacctgttgagcaccaaccatgtgctaggcagtgtgctagacactgaggatgctaaagtgaatgggacagtcagacagagccagaggggctggggcacctagggagggaactggggtccaccttggcccccacctcttggccactaacctatactatattctagtcggggagacagatggttaaacagagaggagttgatcactcattgtgctgggtgctatgacagcgctgtgcaaggggtcaaggagcccaggggaaggtacctgttccaggctgggggacgacagaaagagaaagtttgctaagttcagaaggctgtgcagaagtcagcctggcaaaagagaagaaagggcattccaggaagcagggcagacagtatggtcaaaggtgtggggaaacaaacagcttggcacattaagctgtttgtacacacttaagagaaagatctgaaagggtgtacacccaactgctaaggcggattatctgaggaaaatgagattatttagacgtgcttttttatttgcacactactatcttgtttgaatttttatagtgggcaaaaaattactttcataagcagaaaaatatataactaataaagagcattctctgtatgatggaactttgagaagcgtgatgtttgggaacagaaaattggaggcggtactgctgggagtggaggagaaaagccagagagctgtcacaagtctctggacccagggaagcagcaggttgacaccagcctccaggcagtggcctggggtgttcattaattgggcgattcctttcctgggaagctgcagggcagacccagggggctggggggagatgtcagtcagttcaaactgatgtcttctagctaaagctccagggagtaagcagatctttggggttctggttgcccgccgcccgatcccaagctaaaactctcatcttcctttgggcaggagtcatgctagagtgaggctgagaggtggttcccaccagcagcatcaggggtttctaactgggctgtctttcttgacctctgacttttttcaccatctcactctccagcctggacctgggctggactgctaaaggacaaaatgcctgaagctctttgaacaaggtcatttgcaaaaaaaaaaaaaaatcttgacctttcaaatgagtttttacagacttccatcatttttcttttttttttttttttttttttttttattgaaaaaaaattatattttggaagaactcactacataaggtgacagaattccaaaatcaaattacatgaaaatatacatcgcaatttctttgtacaataggtgagaaaaatctgcagtatagaagaatagaggcagagaaatatgaaggactaaggagaagggtatgagagtaaataggatttgtaatagcaaacccagaagttaagtagaaagcctgtagctgtgcatgcttcatttatccaaccttaataccaggcaactgaagagggaaaagtcagatttgctattgtttggggaaattttcagtaagttgaattaagaaccatctatttttagttctcaggggtaatgactgggatcaagagctcacaacggccaataaatgttattgctatatccaatccaagaggtgggtgcaactagaatacaaaaaggacaaagcacctagtgatgactccttcggacttccatcatttttctctagaaaatcctctatttgtcctttgccagaggaggcagaaataactagcaaactgtaactcaggtgtgtcattcaaacacacacacatttagtttcttctccattcagtgtgtcccataggaaatggctgcaatttgaggagtgacaacactatccccaattcagaataacctcttcttcactggtgcttggaattttgttttggggttatcatcttcatcctaaagcttgtttgttcagtctcccgcttttcttttttttttttttttttcttttttcctacagtggatgccgtggaatggttaggaggggtgatttcccaaccatttaatgcaggttcgttggtgcatattttcatgcgtggaagtcacaggccgagatggtattatcagttccactgcttaatatgagctcagtaaggaaatacagtgcctgcggacaagctaggggttctggctgatgtacataaccaatactttcttctcaccttggggactgtggagagtctccccaaaaaaagattggaagaatccagttgttcagaggaagaggggcttgacttggggctgagaccgagacgcacatggagccaggccccagtgtgaccattttgctattggctagaaaaatgtagagctgcactctctgccagctcagggctgccttctagagcctcaagaggttaggagcagctctgggagacagggatgagtcttctacagtgacactgctgataaagatgatgggcctcatggacgaggtagaaacagtaggcagacagagggacgtttcagagagtatctgattttaaaagtgatgatgtggaaaatcatcaattaccaatcaaagtcatgtcatgtgtgccagaaaacacagaacacatatttgggaggcaagtggggaaagaaggcagggttgggggtaaggcagggctccgctgacctagctgtgtgcttgaagcggctgaggagcttttacacaatgctcacaaccaggtcccaccgaggcacagtcaacctgaatttcttgggataaggcctaagaatctgtatttttaaaaactcctccagaaggttctgaaatacagccaagtcagataaacctaactgtggttaagatgaagatgggggctggaggaacaaccacagggttagggcaggagggagaagggagcctaggtctggaagggaaggactggagggaacaggctggcagcaggtagctctgtgcccatttctggtggcctcctgacgccaagagagccagtgaagaaagaaccagaaccccttcactctgagttgcttcagaagcaagcttcctgtggctcagtcagcctccccaggggcagaggccatttggggaggaggaacaccccctcttccaaccaaagccctgataaaaggaacaactagggtttcccttcgggaccagcaggatggactaagagcaattttctgggtccctcaggccacatataccatttgtcatttcccatcagtgcctaaaatgcctttgccaaaagctgtgcctctcccgctaagccatgccatggtgggtcagggaactccaagtgaagggaaaactgtgacacagaacctagggcctcggttttactcgaaggtggggaggggagaactgctttcgtatcacagataaacttgggcatagtggggagtggatgcctcatccacatgcactttgtttaattaaagacaggatcagttgggcacagtggctcactttgagaggccgaggggagcagatctcttgagcccaggagttcgagatcagcccagacaatttagtgagaccctgtataaagaaagagaagaaagaaggaaagaaagaaaggaaggaagaaaggaaggaagaaaggaaggaaggaaagaaaaggaagggagaaagaaagagaaagagagaaagaaaggcagtcttgctaggttgcccaggctggtctcaaactcccagcatcaagtga

SEQ ID NO: 1879570 - DNA, 4001 bp, Homo sapiens
tccacaaaaggcattaagcaacctgctcccctctgacaacctcccctgtcacccaggctctcctctgggaagttgggggcatctctagcccccaagtagttactcattttcaaccccatctcaaatcttttgccaaactggccacagccaccccacactccccacctcccagatacaaatcctcactctaagccttccccatctctttcttctctgtccttctttctctgtggtcctctgagcaacttctcccagctctgggaggtagaggggtggtgggagacccagtaattggaagagggagggggaaaggttcctacagggaactcctccgggcctcaggggccctggcactcagctctgcccatctcagctcctggaacgtcagccaggttgcgcaaaaagtgaggaggagaggagcggcagtacacaagggtgggggaaagattaggcacaggaagccgtgggagagagagccggcaggtggaccatcctggtttccccacacacaccattgtccccctgggaaacctgttggtgaagttctagatgtcttatccaagaagggtcctcttgaggtcatctcagctatccccctgcctctaggcaagctgttttctgtttcttccaagctgactggctgaatggtaggagcctttctgccagggaaactgaggtctgggaagggagtatggcttgtggggacaccaggggtcaggggaggggagggtccacctgctgaatcaagtggggcctcctgccctcgtgattcccctttgcctggtgctcagtgggggtgatggtgacgccacaggtgtggagtgccagccacgtgctgagcgccaagcaaaacagccagggtgagtctatgcatcatcagtgcctgggaaggaaggccactgcgagcagggagtctgacggaaaaacttgacagagggaagggaggcaccttgctttatcggggcggggaaggccagaataaaactctgctactgcaaggaccagagagagaaggcctgggctggcactagggagggatgttccctcaccctcccctcctctgcttctcccaaagcttgtaaatgccccagatatgagccagcccaggccccgctacgtggtagacagagccgcatactcccttaccctcttcgacgatgagtttgagaagaaggaccggacatacccagtgggagagaaacttcgcaatgccttcaggtaactggtccagagcccagacttctgcctcctctgctccctaccaaaatcctttctgcaccaggacacggcttctgcactggtatccctaagatggggttaagggaagccctggggaagtgaggttctgaatgatgaatttaagatcctacaacctcatctgtactgagacccccagggaggatggggagcaggagcaagaaccatccagaagggttatatggcattcccaaacccctgcatggcatctcccatattctcaattcacccgggtctctctgggtttgttaaggcatggtagatgagcatctacgttatggaggggtggggagcatcagagcccttactccatgccctgttccctccttacaaaaaatacctgaagttaccatcaccccaggttctttgtcctttccctcccggatgttccttcctccacttggtccagagaatgccaaaaggaggccctaaatttctgaactttcctgaggggacctaccagggtgtagtcctaccagcgcccagggtctttccactctcatctccctggaaatgcgatggtgggtatgaaaccttgtccctaagtaggcgctacacaaggtgatccatacccacaccccaggaggctggggctgcgggtgtcaccctccccattcccagactcctggcagacctcctctggcccagctataggccaactcactctccctcactcccttggggaaacggctgattcagttacctggattgaggtcactggcaatggctgaagtggagacgcaggtggaactggttcaggccgggggaatcacccacttgagtttgtactaaaagccccagcccagccctgtttctcttgggaggctccatttctgcccagttacagtctgtcctcacagctgtgctcctcagacaggtggtctctgccagtctttgtgcccaagactttagggcacaaagtctgaggatgagaagatctgctattgtcctaaaagattaggataatgaaagctgtaaagggatatagcaaactaacaattcctatgatactggcatgagagccttgaacagtgcctggcatagagaaggtgcaccaataaatatttgtttcatgaatgaatgaatgaatgaatgtctagaaagctaatccctctcagcctctgtttccagttcttctttcaagcttcagattgctttgcccaacatacagcagacttgcaagtaaggttgggcatggactagccctcaaatgagttgtttttctttccctagccagctctctattcataagtccggctttctctgccacaaacagacctgatggagcccctgcagggctggttctctcttcaagcaaggctttagagttgcattaagcaatttatcccccgtccacctccccttccagcatcccagggatggcagaggcacccatgagccccagaaaggacagggggtaagatattgatgatgatgctttttcttggagtgttagttggaagagaaaatctgcccagactttccaaggtacaaagcattgtctttgttggtttcagtcttgggtgacatccaggggaccgagtgtcagggaaactattgttgagcaagagcaaagagcaggaattggtgctgggcaggaaaggaagcctcatcagagcaggccagtgagtcaccaaatgggccctaagtatttgagttccctcaactgggagaaggaaagcaaatgcccctcacccacttccagtcatcaatccaccggctgtcacccttgagtttgtaagcccttgttcctaccgctcctgagtttctatgaaaggaccttgaggtgttcaacaaacagggaagggatcaactctccccaccctgcgttgaccaatgaattcttccctcctctgctgcccagtgaattaacaggagaaagaactccggtattggagttaccacacataaaggatagtgagtcagcagagtgcaccctgcaggaacaatagagccttccttttcaaggaagttctaagaaaaatggcagcaggcaggccccactcgggtgtattcactcattcatttattcaacaaatatttactaagtgcccctgtgcaaggctcgaggtgtacaaagatgaacaggagagctagacttcttgccatgcgtggtggggtttgctgcctagtgggagagacagacaaaaagcaaggaatgcacacacaggatgcacacacagcggcaggagccaaggtgcagttacccaggcctgggatcagacagacaggactcagaggagactttcccagagaaaagccatctgagccaagggatggatctgatacctccgaaggctgagccaccataacactcatacctttaagccaagtcttataaactccccaggtaagcagctggcagtcagaagacctccagctaatgcccaggacaagttgatgagctctcaagaaaaagttcctgccttttcttctcaatatccctggcacacagttcagtgaattttgaatgaaccaatgaatgaaatgagcaggatatgataatccctctccaacacggaatgtccaagccatgcagagccgactggaaattttccccgttcccttccagatgttcctcagccaagatcaaagctgtggtgtttgggctgctgcctgtgctctcctggctccccaagtacaagattaaagactacatcattcctgacctgctcggtggactcagcgggggatccatccaggtcccacaaggtgaaggggctccttcagccaggcctggattg

SEQ ID NO: 1879571 - DNA, 4001 bp, Homo sapiens
gcacaatcttattcataatagaaactcacatttgcatcacactttacattttacacaaccccttcttatccattaactcatttgatcttcacaacaaccctgtgagatatgtctgttactcccactttagtgatacagaatctgaggtttgaaaagtaatgctgaccattctgcctcattaataaaagcaggattaacccaggctcctggacccttccacaaaaggcattaagcaacctgctcccctctgacaacctcccctgtcacccaggctctcctctgggaagttgggggcatctctagcccccaagtagttactcattttcaaccccatctcaaatcttttgccaaactggccacagccaccccacactccccacctcccagatacaaatcctcactctaagccttccccatctctttcttctctgtccttctttctctgtggtcctctgagcaacttctcccagctctgggaggtagaggggtggtgggagacccagtaattggaagagggagggggaaaggttcctacagggaactcctccgggcctcaggggccctggcactcagctctgcccatctcagctcctggaacgtcagccaggttgcgcaaaaagtgaggaggagaggagcggcagtacacaagggtgggggaaagattaggcacaggaagccgtgggagagagagccggcaggtggaccatcctggtttccccacacacaccattgtccccctgggaaacctgttggtgaagttctagatgtcttatccaagaagggtcctcttgaggtcatctcagctatccccctgcctctaggcaagctgttttctgtttcttccaagctgactggctgaatggtaggagcctttctgccagggaaactgaggtctgggaagggagtatggcttgtggggacaccaggggtcaggggaggggagggtccacctgctgaatcaagtggggcctcctgccctcgtgattcccctttgcctggtgctcagtgggggtgatggtgacgccacaggtgtggagtgccagccacgtgctgagcgccaagcaaaacagccagggtgagtctatgcatcatcagtgcctgggaaggaaggccactgcgagcagggagtctgacggaaaaacttgacagagggaagggaggcaccttgctttatcggggcggggaaggccagaataaaactctgctactgcaaggaccagagagagaaggcctgggctggcactagggagggatgttccctcaccctcccctcctctgcttctcccaaagcttgtaaatgccccagatatgagccagcccaggccccgctacgtggtagacagagccgcatactcccttaccctcttcgacgatgagtttgagaagaaggaccggacatacccagtgggagagaaacttcgcaatgccttcaggtaactggtccagagcccagacttctgcctcctctgctccctaccaaaatcctttctgcaccaggacacggcttctgcactggtatccctaagatggggttaagggaagccctggggaagtgaggttctgaatgatgaatttaagatcctacaacctcatctgtactgagacccccagggaggatggggagcaggagcaagaaccatccagaagggttatatggcattcccaaacccctgcatggcatctcccatattctcaattcacccgggtctctctgggtttgttaaggcatggtagatgagcatctacgttatggaggggtggggagcatcagagcccttactccatgccctgttccctccttacaaaaaatacctgaagttaccatcaccccaggttctttgtcctttccctcccggatgttccttcctccacttggtccagagaatgccaaaaggaggccctaaatttctgaactttcctgaggggacctaccagggtgtagtcctaccagcgcccagggtctttccactctcatctccctggaaatgcgatggtgggtatgaaaccttgtccctaagtaggcgctacacaaggtgatccatacccacaccccaggaggctggggctgcgggtgtcaccctccccattcccagactcctggcagacctcctctggcccagctataggccaactcactctccctcactcccttggggaaacggctgattcagttacctggattgaggtcactggcaatggctgaagtggagacgcaggtggaactggttcaggccgggggaatcacccacttgagtttgtactaaaagccccagcccagccctgtttctcttgggaggctccatttctgcccagttacagtctgtcctcacagctgtgctcctcagacaggtggtctctgccagtctttgtgcccaagactttagggcacaaagtctgaggatgagaagatctgctattgtcctaaaagattaggataatgaaagctgtaaagggatatagcaaactaacaattcctatgatactggcatgagagccttgaacagtgcctggcatagagaaggtgcaccaataaatatttgtttcatgaatgaatgaatgaatgaatgtctagaaagctaatccctctcagcctctgtttccagttcttctttcaagcttcagattgctttgcccaacatacagcagacttgcaagtaaggttgggcatggactagccctcaaatgagttgtttttctttccctagccagctctctattcataagtccggctttctctgccacaaacagacctgatggagcccctgcagggctggttctctcttcaagcaaggctttagagttgcattaagcaatttatcccccgtccacctccccttccagcatcccagggatggcagaggcacccatgagccccagaaaggacagggggtaagatattgatgatgatgctttttcttggagtgttagttggaagagaaaatctgcccagactttccaaggtacaaagcattgtctttgttggtttcagtcttgggtgacatccaggggaccgagtgtcagggaaactattgttgagcaagagcaaagagcaggaattggtgctgggcaggaaaggaagcctcatcagagcaggccagtgagtcaccaaatgggccctaagtatttgagttccctcaactgggagaaggaaagcaaatgcccctcacccacttccagtcatcaatccaccggctgtcacccttgagtttgtaagcccttgttcctaccgctcctgagtttctatgaaaggaccttgaggtgttcaacaaacagggaagggatcaactctccccaccctgcgttgaccaatgaattcttccctcctctgctgcccagtgaattaacaggagaaagaactccggtattggagttaccacacataaaggatagtgagtcagcagagtgcaccctgcaggaacaatagagccttccttttcaaggaagttctaagaaaaatggcagcaggcaggccccactcgggtgtattcactcattcatttattcaacaaatatttactaagtgcccctgtgcaaggctcgaggtgtacaaagatgaacaggagagctagacttcttgccatgcgtggtggggtttgctgcctagtgggagagacagacaaaaagcaaggaatgcacacacaggatgcacacacagcggcaggagccaaggtgcagttacccaggcctgggatcagacagacaggactcagaggagactttcccagagaaaagccatctgagccaagggatggatctgatacctccgaaggctgagccaccataacactcatacctttaagccaagtcttataaactccccaggtaagcagctggcagtcagaagacctccagctaatgcccaggacaagttgatgagctctcaagaaaaagttcctgccttttcttctcaatatccctggcacacagttcagtgaattttgaatgaaccaatgaatgaaatgagcaggatatgataatccctctccaacacggaatgtcca

SEQ ID NO: 1879572 - DNA, 4001 bp, Homo sapiens
gttgttcacaatttactaacgaaatgtgcatctctcattcttcccccaaaagaaagaagtcatccactccagctacatataagtctccaatttctgtcttacaactaaacgtgaaaaccgaaataccactcattgaaaaaaaaaatgtacagagaattggcaggctgcatgtttatgtgaaccttcagaaaacatggaaacacgcagccccaactcaccaggaaaatcaacacttgtgatcaaactattttgtgacattttatgtcttttatacatttcacttcatatccagtattccagttttgcaccggcttgcctgtatcaaccccaaatcgcctgagagcaatctagtactgtagcagaaccgtttcaacatgaagagttctgctcatcgcctgtggcatggtcttcgaaacacctgaatcaaacattgattcccctccccctgctatttaaaaccgagggacgtcaggcttgggttgtaggtaaagaaaagccacagtaatcaaacaagcaaccaaaatacccgaacacggaacacgctaagaacaaaggaaacacaagagtgtgaacaggaaatgaagcaactctacacccataaataccttctggggccgccaacataggtaaaagtaaaggtggagtctgagtacctgaaatctgaaacagaaagtcctgtcaaaagctacccctggagtggatttgttttaaccccgatcaggacttgggccctccatttggtggagtcaggggaggcctggccgggcgggaggcgagggctagagggcggcgaggtctctccgcgcagcgtccgaggggatgcggcgcgcccccgactgggtgcagcggcaggccgcccccggcagcaagtgccgggtgccatggcaacggcgggaatttcccggtcggggaggccggaagcagccccagccgggctcgcggcagcgaaagcaaaatccgatctctctcccgggggagcaaaatggacgaaaggcgaccccccaggcaggggcgctgggtgccttgggaatccgaggaatcccttctctttgccagtcggaggggactagatggagccgaaggggccggagatgggccgagcgctgccccccgggggtcctcggcgccgggcgcagcttacgagcgcagcgcagcaggctccattcccggccgccgccgctcagcccattacgcaaacctggcgggtccaaccaaccccgctgtgccgccgctgctggaacccaggaggcgtgcttgcaggcttcgggcactacgcggggctggaaataccacgcactgccccttcgcctagacccccgctcgggccacgcgggttctgccctcaaagctggtagctgccccagacttgggggtggggggaggggaaggggcgaggctggcgccccctcccgcttttggctcccgcgttcgttgcagcagctgttgccaaatgaaccccggaatgcggacgtgcaaaccctccaccccacccccagccacacacgtcgcggtcagagaactgggaagggggcgctgggtccgaggttctggaaaagcaagaactcacctgcaaacaggcagtcctcagctctggacttctggatcacgacgtcgatatccttctgaattcggtcttgccttgaacacatccccattaaataaatccttggaaaagaagcagccgctatttccaccccacccccctcgcacgctttcagctttcgtaaatattcagttaaaaatgaaacctctggccgaggcaggggctgaaggccaagtggtttcggaagtgatcctgggtgagaggaggaggaggaggaggaggaagaggtggaggaggagggggaggtcggctttccatttccagatgtgaccgcccagctgctgctcgccgctgctggattccagtttcctccccttctggcgacggattggtgatgacaccgagtctcactttctccttcccccgccgggaccaaccgccgtggggggccgagggtgccggggacggccggagagcgatcacgggctgggcggcggaagccgacgaggggcgagccccgctccggctcaagcgatcacacccctcacggcccgcactccggccttccacacccgtgcacactctcgcccgcgggcggcggcagccgtgcccaggctgctgcagcgccacccgcccgccgcggaccctccgcgccctccgcctagtcacccggcccggccgcgggccgccggggctcgcagagtgtcagccatcccgggcaggagtcgcgtctccccaccccgacctccactcgcgccgggagctgagcggcagtgtaggtagtgaagactccctggggctcccagccttccctctccgcgctctccccccgtcacttttatgaattcgactccactttctaaaggaattatgagtcttgtggcaaacacaaaccggagtggccgggagggggaaaaggggggaaaagaaaatctttaaaaattaaaaaaataataaaacgaacaaatctttacttgttgccacctcagataacacggaaaaagccttgaaattactccagatgtgcaccctccccttccctcagtgcctgagtctttttcctccagatcgaagtatttcagcccttttggggcgccgtttgcgaaacacagccccttttgagggacttcctcctcttgaaaagactcaccagttctcccttcctaggtgtttctgttcatgagaaattgtcagaatcaactggcacgttccagggtcttcctaaaggatggaaacctgtttggcttgctttttaaaaccacctcctttgacagtcagtccagggaaagctacaatccaggtgttcagaaatgagatactgctctgattctcactttctgttctgcctaaggacacctcaggctgacgtagctgccccacctctatattggtttatgccctaggagaggtctccagcaggcacttttcttgttgatcttttctccgctgagaaggctcccgccagtagaccatgactcgttttgctttgcattctcagtgccacgtacagtgcctggaatacaggagggtggcctaaatgttggctgaatgcatgaatggtcatttcttgcagcctcttttcattaccctgtctcatcagctttcttatcagaataagtgcccaagagtgccaaactgtttcagacccttaatcaatttagttctgattctcaccgtgacaacatgatgttcagcacggtaggaatgactgccatctctgaaggagtcttaagattctgtagaatcagtgaaagattctatgttctaacgcctttacctttcaggaaagaaattacaaaatagtttcattgtccagtcatattcactatgagttataagaggaaacattctatctagaattagaaataccatttgacccagccatcccattactgggtatgtacccaaaggactataaatcatgctgctataaagacacatgcacacgtatgtctattgcggcactattcacaatagcaaagacttggaaccaacccaaatgtccaacaatgatagactggattaagaaaatgtggcacatatacaccatggaatactatgcagccataaaaaatgatgagttcatgtcctttgtagggacatagatgaaattggaaatcatcattctcagtaaactatcgcaagaacaaaaaaccaaacaccgcatattctcacttataggtgggaattgaacaatgagaacacatggacacaggaaggggaacatcacactctggggactgttgtgggttggggggaggggggagggatatcactgggagatatacctaatgctagatgacgagttagtgggtgcagcgcaccagcatggcacatgtatgcatatgtaactaacctgcacattgtgcacatgtaccctaaaacttaaagtataataataataaatttaaaaaaaagaacaaaacatcacattgtaccacataaaaaaaaaaaagtt

SEQ ID NO: 1879573 - DNA, 4001 bp, Homo sapiens
gacattcctggcagggggcgctgagggccaggatgtgagtgcaccagggaaacagcagatggggctcctctcccaggctccagctgtggggtgggagtccatgctcctgcgtgtctcttgggggcttttcctccactgggtgccacctggtcccccaccctgcctcagagtattggggtctgggctcgtccaccctggatgctggccaggagtgcacctgcctctggagctcgggacgcttggccccacaggacggtgtcgcacaccacagccggcctaacttcacccctgcctgctccctctccagggccggcctgcagggctgcacactttctagttggggtgcaggtccccgggctcctgccacagattcctgtggctggccaccctgccaactctcctgcaggtgagggtgggcgcaatccccaaggtcctttccaccagatgccactgagtcccccaggggccagggctggaccctggagggggtcacctggctgaagtcaggaccaggaggggcagggggcagtcgaggggcagggggcggtcctgggccaggcgtctggcagatgggcttgctggaggtgggggttcctggtgtgcagcaggcggtgccagagggggtgactgggacctgctctgggcaagcacaggcggtgcgtgacagacctgggcttccattgactgcatcacgtccagcagcaggaaggggccacgggggcactggcgtcgtcacgtgggtcacgaggttccatgtgatgcagggagcgaggccgtcacgagggactcactggtgcctgccttggggctccgggactgtgggctgtctccatccggaggtctccctaccaccaggctctgtggggcagggaagcccagtggggtgcagggagccaggaagctggggtggggtcagggcagggtccacagggagaccgggcgaggctggcagccttcccagtccgcgcagcgtctctgcagggggagcaagagctgcccttccacccctcccaggggacgggtaggggcactctgggcttttcccaccccctcacgcagggacacaggcctggtgggtctatgactgaaattggccagaccgcattctggtggttttattcggaagggaagtttaccctgttcagcagaagctgagatgggaacaggaaacccacagggcccctttattcggcaaaaatgtcagtcagcgccccggggagcagccgagggtccctgagtgtgtgagtgaggtggggaaacacagatggactttggggggctcccccttctacaggaaacccggagtggactggaatggtgcagggggagaactcgcccctcccatcgggcgcctccttcataccggcccttcccctcggctttgcctggacagctcctgcctcccgcagggcccacctgtgtcccccagcgccgctccacccagcaggcctgagcccctctctgctgccagacaccccctgctgcccactctcctgctgctcgggttctgaggcacagcttgtcacaccgaggcggattctctttctctttctctttctcttctggcccacagccgcagcaatggcgctgagttcctctgctggagttcatcctgctagctgggttcccgagctgccggtctgagcctgaggcatggagcctcctggagactgggggcctcctccctggagatccacccccaaaaccgacgtcttgaggctggtgagcccccgagcctcctctccgtctgctcgcagatcccagttctgaccccagggcctcccacagatctcttccccatgcccctgtcctggccgttgctggctccggcgtccagcccgtcccctgctgcctggggctctcgggtcaacccagacccccagcactgggctcaccacagtggggtgagcagcagagccacagccctacccagcagacctcctcctgcgtgtgtcccccactcaccactccgtccacgggcagctggtgagcccccatttggccggatgtgggcacttctgggggctgggtgtctctgggcgtctctgggcggggccctcgagcaggtgacccaactccccggcagccctgaccttggtgacaggtgataagatcagtgtgcagcagggggctggacccaggtgggtggggtggggatactctccatgctcatgtggcactcctgcctgtccagccactatccccatcaggggcccccgactgcccatcagccagcccaggaacgaggccacggcagagccaccctccccgatgtggccctgatcagcctgtcacccactgtctggcttgtgagcctctggggcccatccctggctgcccctgctggctcttcaggggtcagcaggtccaacctaggccagcaggggggccggcaggttgtctgcccagtgggctcaatgctcccaggtgtggggtgtggggtccctggcgagggcagagttccagttcccagggctccgcgctgccaggcagcgtcatcagggctggaggaggggcggtccccaccctatcccgggctccagcggtcggcaaggttgttccatgagcctggcctggggcccgcttctgtcctctctaccaggcactgccgctcctccccattgcacagagggagattcaggctgtggggccaagcctggcagagcccacagggcagccagggcatctcccaatgcctgtcctgacccccttaggtgctgtatctcaccttcctgggagccccctgctacgccccagctctgccgtcctgcaaggaggacgagtacccagtgggctccgagtgctgccccaagtgcagtccaggtaggtgcagccctttggcgggccagctctgtgggccgagggcagacactcttgcccccttctgccccagacacccctgtgttctctgcccccacagccatgggtgtgatgaagccctggggctaggtgtgcagacagtgagggcagaacccccaggccagcagcttggactcttcaccctgggggaccctcacagtcacactgcacagggggtgggtctgagagacgtggctggcccaccgtggccagagacatgggctcgggggcacataccagagccgggccaggtgtcccaggaggccccatgtgcttccagaactttccgattttccccagagcagctctgctcatggctgatggggctgctgtgtcccgtggggctcatgggccatttgagtccccttagctggtgtctccctgcttgggctctgggcgcgggtggagtgatgggtgggctcccgaaggggcctcccgcagacttgcgaagttcccactctctgggcggcaggttatcgtgtgaaggaggcctgcggggagctgacgggcacagtgtgtgaaccctgccctccaggcacctacattgcccacctcaatggcctaagcaagtgtctgcagtgccaaatgtgtgacccaggtaagaggccagcacagccggcccagcctccgcttgggcagcctggatgcccccgcaccctgcaccctctctccatggccacagtgccccaggaaggccccggctgccccaggccaggtcccaaccccatctccatggatgcaccctgcaggggacgccttgaggtcagcctccggcccccgtccacctctgtctcacctctcactttgtcaccgccaggtgggccatcctgagcttggcgactgacccttatccctcgtccttggctcctctggtgcccggggtgggtgcccagacctctcctgtgcccacgtccctagctgcaaagtggaatgggatggtgctgggactctccggccggcactcgggcctgctgcttccccacagggcttcttgtccctttctcctccagatattggttccccctgtgacctcaggggaagaggtcacctggaggctggtgcccacctgagtccaggcagacagaaaggggaaccagacccagaggtggcctttgagtcactgagcgcagagcctgtccatg

SEQ ID NO: 1879574 - DNA, 4001 bp, Homo sapiens
aactgtcccttaaccccaagggtgatgcacacttctcccctggtctttctgccccccgatgcccctacatttacacagcagtgcgcagacccttgccgcaacctgcttgtcttgctgaccctgctgtaggagcgcctaaactgagtgcccgtctcccctccaaaggcagctggcttgaatcctgtgggaacgtgcccttcaccctttgccagcagttgctggggagtctttccggcccctttctcagactcaccacctacctccaacctgcgcagaacaatcagcgtcctgaccacttgctagagatggcttcaggccgaccactccatcctcactgcaggccttcattccttctggcttccatcactgcatggccccctaagaggtccccctcctggcccttgtcactgtgcctcatgacagccactacgccctaagcctttggaggccagggacaaagtctcgttcactgtcctttccgctgcatgagtgcagtgtctggccaggtgcacggggcactcagtgcctgtcagcccttggtaaacagtcctggacaacagggtcaaggacagagccctgggcggccacattcggtgcgtgctcctgtgttgtggcaaagctgccttttctgcgtttcatgtcagtgaaggaagacagggatgtggcagagccctgcgggttgctcccatcactcactcggtttgtgccatagtcctcctgttcccaggcggtcccagggcctgcccctgatgggctggaggcaccaccaacctcccactcctctggcagtcacagctcagggaatgggcaagcagcaccaatgagaaaccagctgtgtggtggggtttccagagaagaggaaattccttctttcctggagagcgtgcagctgtaactcacagacgagacatccctgagctaccagcctggggaaagaggacatgagtaaagctgtaaccataccgtgttacccataacaggcggtgaggagagtgggttttggttggcactgtttgagctgcagtatcaagtcatggcagagctagtggacagctgacctgggggtgggggtgaggagcaatggtggcttctgaatttgagcccgtctgagctgggcagttactggcagctcagtgtgtgaacctgcaaccactcaggcctctgctgcccttccctcttcctgcctcaccgttccctgccccacgcaggcttccccaccatcctcacccgtggtcctgtactagtcctggcaaaggttccggtaactgcagcaacagatacctcctgcccctcctgcacagctgtggtcgatcgcaggacagccgcaggtgatgaaaaaccgtgaacccaggacgggcagggcgtgagaccgcctgcgggaggatcagcgatgtcaagacgttacaaacgcacgaaccccctcgccgtctccctggcgtttgtgaggtcctgtccaagctccttcacacgtagatcaccgggcctcgctcccccgactccttccgtgggcctgaaccttgaggtacttaggcctccccacgctggaggggctctgtagggacgtcgaggccacgtttccagtcatccctccacccgtctctccccaggggctgagtgttgaaggcaagactttgcaggagtctggcgttaatacgcatccccaaagtctggagtcgataaggactgaagacacgacgccgacggcggccgggggacaccgggcatgcgcgtctcatccagggggaggccgagcggagcctctgaccctgccccgcgcccagggttcagcagtgggggtcgtcccgccccagatcccaccgagatggccccccttgacccacaggcctttcgagacgcgagcttccgcgatccggggtctctgtgcgaacgtgggcatcttggaagagtcccagccccgctcggggcgcacaggcaggcgctctcagcacggcacccgcgcctccgctagggacagacatgcttccgggtcggccggcaccgcggagtcccctgggtaacgagcccgccccacccgcgccaggttccggcgtcggcgttaggcgcgttgctgacgggcaggttatgtagccaattgcggctaggcggcgtcgcgctggtcgcgggccgaaccaatggcacgcgacggggcggggcggtggcggccgtggagcttcgcgaggagccgccctgagggaagaagccgaaggggagtcggcggcacaaaatggcggcggcggcggcggcggctggtgctgcagggtcggcagctcccgcggcagcggccggcgccccgggatctgggggcgcaccctcagggtcgcagggggtgctgatcggggacaggctgtactccggggtgctcatcaccttggagaactgcctcctgcctgacgacaagctccgtttcacgccgtccatgtcgagcggcctcgacaccgacacagagaccgacctccgcgtggtgggctgcgagctcatccaggcggccggtatcctgctccgcctgccgcaggtgagggcgcggccgcgagcctccggcccaggtaaccgctggggcggcagccgcctttgttggcggcgagtcgggcccgcaccgcccccgcctagaccccgaccccagcccctgccccgaccccagcctcggcgccattccctagccagcccatgcccctgacccggggcctccccgcccgccagtgcgctggatcccgagacggcgggacgcgaagagcctttgtggacgtgggaagcgtttcagtgtttggttctgcgtggggagtcccacgttactcgatgactttcggccgcgaaggctttgaatggtgcgtttgaaaatacggaaactttcttctactctaggtggccatggctaccgggcaggtgttgttccagcggttcttttataccaagtccttcgtgaagcactccatggaggtaaggcttcctcctgcacttcattcccagcgaagtatgttgagggtaaaacggtttgttactttgcccggttactaagggagtgagtacttgccccccagtctgagctctgtgccggagggttctgtttcttgactttttttttcccctgggtgcacctcccttttggtctgaatagccctcaagcctttggcggccgtcaggacgccgtggctggggacaaacatgggcgtgttgcaatgcttccgcttcagcatgtgtcaatggcctgtgtccacctggcttccaagatagaagaggccccaagacgcatacgggacgtcatcaatgtgtttcaccgccttcgacagctgagagacaaaaagtgagtcagtcagagctgtctagtctatcatagatgcctattttctttatttctgattaagttacagtaaggcttgtataacacaatacaggcctgaggctctaaacctgtgggatattcatgagcgcagtctcaagctccaccaacagagcctgctcagaggcatcagtagatgcggtttagtaagggcaggggctccagtgaggacagtgcgctgtggcgggtcgcgctggggctggcttcctgctttacccatgtcagtgcacggccctgctgctgcttctgtcccacaagtttctgagtgctctggagcagggaatcttaatctcagcactattgacattcaggctggataatcttttttttcctcctgagacaggtttcctgttgtccagggcagagtgcggtggtatgatcatggctcactacagcctcaacctcctaggctcaagagtttctcctgcctcagcctcctgagtagctgggactataggagcacgccaaccatgccagctaatttttattttttatttggtaaagatggggtcatgctgtgttgcccaggctggtctcaaattcctgggctccaaggatttgctggccttagcctcccaaagcactgggattacagatttcagccaccgcatctggctgggtaatctttagttgtaggggattctcctgtgtgctgcaggattcagca

SEQ ID NO: 1879575 - DNA, 4001 bp, Homo sapiens
tataagtcttatgtcacctatcagattgggagctccaggagggaggctagagaaaggagaaggaaaacaaatacctatttggtgccttctgtttgacagataccatgttatacactttccctgcagttacttcatttactcctttccacagccctgtggggagcatcccatgtctagtaagtggcctggtcatgactagagccctggtcttccaaagcctttacatttttcctctctgaattactggtgtttacaagatggctgttatgaagtagatccccaaaatttgtctatttaaggaattttgtaagtccctaatgctctgagggagtttgggtggtcaatcttgtgtccatggtctgggtccctcagctgttccttgacactgtcattaactttctcctcttcctttgtggtcaggttcactcaagatgatggcttttttcttgtagctgaaattgatggattaactgactcagttatcctggttgccttcctcgtacaagaggagggagaggtggagtgggatacagcatcttcaaagccagaataagctccagaattagagagcagggagcagagacactggacttgaacagacctaggttttcattgtgatccttcttcttagctgagtgactttagacaagtcatatgatttaagttttcagtgagatggagctactacaactgttatacagaaatgcctaatatattggcagcaaataggttcccatccctacccagtggtttatcagggacttaaaatgggagcatagcagggggctagagaagaaatgggggagacaggagctcctgtgccctaagtggtatcacagcaggggcgcagaggaggtaacctaggcgttacgcccttcaagcctgcaaggtgtactgtcccccacctgccataaatacccctttacttctgcatcaggaacatgccatggcatctgagtggtgggggctggtgacggcagagggagggtcagtgagctttcctgggagccttttgatgccaggttagtttcccttctttctgaatctcagcagtggctgcctgcttccctgacgctgctgagtcccacgggaggggagctgggcaccctgaagcccctcgttaccaattcgggggccgcggagcagagtgtgacgacagccagtgagtcgtcagtcgacggcaatggggaccctggtgacggctgctttgttgttttttttcctctttggaagatgactcagtgtatcgggagccgggagatggagctctcagcagagtggccaggatgttctgtcaacatgaaagctacaaaaacagctcggggctctgagctgatccttagcctggggtcattttcagggagggctggacagagaaggcggccaccgcccgggcatcaggatgggagcgacaccaggtaactcagcagggctctgggaacccttgcattttagagtctgaaaagaaaataacagctgtatgtgttattagatgagcttggcaaatagggtcactttttgagttcttcccactagtcccagatgacagacatcttcccagggcccagaaagccctttgggatttttcaccgtggttctctttgtgatagtcttgctggtcattgccttgaatgaagggcgattcgcttcttggggtaggggtgggccaggccgacctcagtgaatgcgggcgcacctgtaccttgggagaagtggccgtggtggggctgtggcgtcttgagagtcctctgccgggcggcgcttcaagatggcggatccgcatcaccgtcactaagctaaaggctggctcttgggcagcctgcgtcagcctcccctttccatattgacccaaatcagagcttctcttctccccttcatcttcttccttttcttcttaggtgaaacagtgggccttgagttcttgacccttttaattttgtttgcgtcatcatggcggctgtgggttctaggcttttctccataccgcagctttgcgctataggcgcgtgatccccccgccctgccccgccccgtcccgccccgtcccgtcccgtcccgccccgccccgccccgccccgccccgccccgccccgccccgccccgccccaccccaccccaccttcttgcgaccgagagagaagatgcacctccactgccactgaatgcggacaaaccgtcctcccctttctcttctctaccccctctgctggagcgtggggcagagggacaaacaattgcttatgaggatgagggacaacttggccgcagccccctccctcctttcactgggtactatttttcagtctcatgctttcccgcggatgatgctagcagtgacatttgtcactgagcacctcctcttctctccaaggacctcccagggtgactcatttgggatctctggtaggagtggctcctgggccttgggagccagagcagggcagggagatgtgaccgaggtcacatgagagagttaagcagggcagggggtgggagccagccatccccactcagagtgcaaaggcagacacagccgcttcatgtcatgttttgcacccgagtagagagcagcttgacctaaaaagattgtatgtatatggacgttggaacctttcgtgtctcattttctttgtcccaagctgtgtatatgataagagcctggatttcgggcttcaggcagctctgtggtctctcaggttcattttctgaaagaggtggtaaacagaccctccttcatcagaccctgcatcttctgttactggcctttctccaggacataggtcccatgtcattttgcccaacattgtcttgcgtctttcattggatggcgggcaacagctaagggtcatcatcccagagccacatactaacccagatgggcccctggttgggatctgctggattcattgcttggttggctctgtgagctgagcccacctatcttcctttctcttcttcctcatagaggactcaggagagtgcagcttgctctgtgagtgggtgacaacctcttggcgactcaggctcagctgaggatggtgccagtgtgccggagacagccgtcatactgccggatagagtggctcacttgcatgtatttggaacaaaaaaaggagatgcctggcagccccgctctctgcagtaagtattcatctgcattcttttacattcctttatttcttcgaacatcagaaatgggtagatgtttattgagcccagccacctgctatgccttctccattcttctcccacacaccccacccttagtcctccagaagagaggactagattgattttctcatgctactggatagctgcagagaagctagaatttgctgttcagcccccacacatccccctcacatttgggagaagttgattttccctaaaatggagccaacagcctgtgtccctcagtgtggagtgttaatgggctgcctggaaggaccctgtgtgccctcacggcccccagccgggaagtgaggctccccattggctggcagtgggaggatggtccttgccagcacctagcatggttctctgccaagttctagctccacatctccaggctggtaggaacctagactatatatagcattgtgctaagcaattcttatcagacgtgtctgccctcccctgtgggagtggagcacttctatcagagaaccagaacctagagagcatgagccatctccaagggccttttattctgggaaggggtgtgtgtgtgtgtgtgtgtgtgtgtgtgtgtgtgtgtgtgtgtgtctgtctgtctggttcagggctgcttactttcctcctgtattgcagatgctgatagattgaaaggtcgtgctagatgaaggtgctgatgtgggatgagggccaggaagggctaatagctctgcgatggatattgagcttagagggagagaagctaggggcatgtgacatggctgagggtacagttgagccctgcctccgctttctcttcctggtttcctgtttgccatgctttgcct

SEQ ID NO: 1879576 - DNA, 4001 bp, Homo sapiens
ctcctcttgctttctaaggacaccttactctgtaactgagtagctttcaataaactacctcttactgtgcactctgtgactcgccttgaattccttcctgcgtgagatccaagaaccctctcttggggtctggattggacccctttttccagcaacaatgagactctttgaattttggaatattttaaattcctgaagaggtatgtgaaaatggtgtgcctgtaatggcaaaggagttaagtagggtgatatagagtagaggaggaggaaaagttagaaataaaactctaagatagaaggcagtctggataatagaaataactccaaacagcttataagaggattagttttcatcagtttgatgtaaagaagtgcactgccaatggcggggatgggggattgtgcagcttccataaataacactgaatgtcactgtttcaaatgtatttataatccctgggttagagtcaactcaggaatggaaagacatttttaactggctgactctaccagcaggtggaatgagtgcttcatgaggtgaggcaagcaagagatgatagtgttgagtttatgatgttttgagtttattactaggtagctttattttaatcattgataggcctgccttcagtcgaaggcaacaactcaaatgcaacatttgagttgttttgctaggggtagtgacagccaatgaatagccgtgtcttaactctatatacatgaggtttcaaagcacttatttggatgtttgcccacattctctcaccttatcccctaaccagaggcgtctactttagagctggcagcctcatgaagcccattaacaaggattgagaccaaagaatactttacagactttgaagttaacctctgcactctggacttaaaccttcttgagtcacctgaccaagcatttcgtttcaaaacatttcaggaaagttttgaatgacatggctagagtcttgtgtaaaaatgggtgcaggcatccaggggacagctggtctgatgtcacaatggccagtgacagggtcttcctgagttctatcagcagaaagtcatatcagctgcagattttcctcaggtaattcaagtctccaagcctgattctatacaaactggatgcaatcacctgtccactgggaagtggggatgaagaggagatggcgatgctttgggttcctccggaatgtgcctcacaaatactaagggtaatcactgggcggggtggccaatcatttgataaaccaaacaccaattaaccctcccaaaaagaaaggagctaatttgttacacttagatatttcgaagtaaaacgtctcagctaaggaaaagtttggaaaaagggaaaagtatgtgaatgctctttagcatggaacaatatgaaaccaccactggaaaaaaataatgcacaagtaacatctaagtactgctcagaatgctgcagtgatcacatcactcctctgctcaaaacccctcgatggtttgaaattatatgccagggaaattatatgcaagctctccagcctagcattgaaggccccacgcctccttttcacctccaccctacaggccctcctcagtctgctttggccagcccggaccccttgctcttgcaggaacccgagtcacctgaacctgagcagttgctccggtcaaaagggaagtaaacgtcaactaccggcgcctgcaatgtcctttcccatgcctgtttgcctatcctacccaccccagccgcattttgtcccgctctggaaactcccagcagtcggttctcatcacagcatctttccttctgcagtggttgctgaacttaagtatgcacccttctccaaggccgacacacttttcgaatcaggtcagcggtgtcactggtgcaaagtcctaaaactaaaacagaatgagggtgtttcccccaaagattccacctcgtagacccagcactcaccccaatagagaagacggtcgagctggccgggaggacgcggacgcccgactctgcctccctttggctttaccaactgcccaatgaccgctgcggcggggctgtttcgtaagcggctggccaatagcggagagaggggcgggcctcggtgggggcctggcccagtgagagtcgcgcgggggacgatccgatctctgtccagctgcgacccaatgggagtccccgccaggagacacaaccggcggctctccggggatttataaggtcccgccagcaaccgcgcgttgggattcgtggtgttgctggagacccgtatggtgtctgcagtcagcgaccctccaacttcaactactggatcaaccatggtgaaggatgctgtgcgggggagggtgtcgcacgatggggaggatgccgggggcgcacggggggtcggtgggaagggcccgcagcgcaaaacggaagggcgccccggcagtccagggtgtggggtgggctgcgcggggatgccaggggtgtttgggcgttcagggcgaaggtgggctctgcagaaagcccggggacgcccgaggagtcccggcaccacttttctaccctgcttcccctacgggaggcggtgcgagctagaaacgttctgagcgccccagaagcgctgagggactagggaggctggcgagcggtaaagcgtgggcgagaacatggtggggtcgtttgtgcgctgcgctcaaggtcgggcagcggagtcggctctgcggcagagcgcgctctggagcctggaggggatctagggcccgccccgtatttctcccgctgcggtcctggacaaagaggtgcccgcttgtagctgcggtccccgcctccctctgagatcacattgccgcgcaggaggcaaggtccaggatgattgggaagctctaacaggtttctccagttcaaaacctgttcccctgaatgtctttgtcttgggcgcccgactctggccagaggtagaggtcctcgccctttggccccatacttgactagggattcctgtaagctcttggggccttgaaaagaatgttcttgactccacttttctcctgtttggtgcccaaggacttgaggtccctctgttaaaactgagaacttgactggccaggcgcggtggctcacgcctataatcccagcactttgggaggccgaagcgggcggaccacctgaggtcgggagttcgagaccagcctgaccaacatggagaaacccgtctctactaaaaatacaaaattggccagccgtggtggcgcatgcctgtagtcccagctactcgggaggctgaggcaggagaatcgcttgaacctgggaggctggggttgcgttgagcggaaatcccgccattgcactctagcctgggcaacaagagcgaaactcggtctcaaagaaatcaaagcaaaaaaaaaaaaaaaaaaaagcctgagaacttggggtgggtacacagaggtccctgtaccccccggaaacctcttgatccctgcctgtgctctgagcccccttaaaggctctgaggctgtcttagagggtagttcctaagactgttaaactgttgcctactgtcaccctagaagatcccttctacatctgggaggtgctcggcccttttaaattgaccccctagaccgtgggttgggtgaaggaccagaagaagggaggaagggtttatccatcataggagttacctgagtgaaaagagtcgaaaggtagggtgggtcttctggtctccgctgcgacgcttaatttaggagtactgacttggattagcttgcctgtactgcagttggcagggacaggtgtctagagtaggtgcctgtccccccaaaaggggagtttgtgggtgagctttcagaaggctagctctaactccaaggctgcttcctcagttgatccacaggtctgaacttagtcttctgcccttttgggatgtgggggagacagttgctgcccatgggagacctcctcttctaggccccagtgcttgaatctagaagctcttggtgggcctgtcttggaatacaggactctgagcttt

SEQ ID NO: 1879577 - DNA, 4001 bp, Homo sapiens
caaggcaatcagagatcttgtagatgttaacatgcccaggctatatgtccgctggcagcccagttccacatccctgaaacccagagggagccagggtgaggcatccaaggtaaaaggtgcaagggcctgggggtgttgtcaacttgtcaccacctgtgctcctggggagcccaggaccctttgagcagggcgcactgggagaggcctccgtccagggagcagactgactgtacctgctcatacttggtaatgatgtcccctcattcctgtgccagcagggtatccacattctctcccatgtccatcccatgagacaaatcgtccaaaggtgacactgtacccgagagcttcggagaacacctgagccactcctgccgggctcccagatgctggcggtgtgtgacccccattccatcaccacctccaggtgaaaaggggccagacacagtggcccacacctgcacgggtctctggagtctcaggccccaagcaggagtgcctccttcctaaggacttgagaatagtgggacctggacagagaatcccgttgtccccaaatgccatgaaatgggaacatatctatcccaacagaatgaaaggtgtccacctgccgggggtgaagagcctgtgattccagagatgaggaggcagactggggtcagggaccagaggtctctgtatgatcagcctcttgggatcgctcagaaaccacaaagttgcccagttttctatggacaacaagatatctcctgacttcccaattctactccactcatcacttgggctaccatggcccttcagtctgaccagtgaagccgctttaggaatcatgccagttgagcaggaaggtgtttgctttgggggaagaaaatgatctattgtctccaaagcagcctctgtgctggtggaaaccatgacgctgggggagggacggtggactccacaattctgagctatccatacagggtgtggggggcttcattttcccgggtcactgagaaagaacaggagaactctgggttcttggtcctggagaacaccgagatgaacgattcctcctgggaccactcggggcaaaagggaggcgaggcctctggaggaccaaactgagaaagaaatacttgaagagaatgccagtgcctgtacccctttgaacaggagggaagatagtctccatccaggcagccctccagggctccttcattttccacaactgcccaaaggcagaaggctccccatccactcccagacagggaactgtgtgtgtccagtgggtcccacagagaccatcaggacccagcttagggcacagaggtattctgaggcccctcccctccaccccacccacagtggatccatcccagcagctctgccagggccaagctctgccccattgggatctggaaccctggacacatttgggatttagggcagggaggtcacagggttcaggacttaagtccagcacggcacagggcaggggtgagagcacaacccagggtcacatctggattcttggggttacccagttaccgcctctctgaccccagatgtctcacctgtctaatgggcacatttgggagcagcacccaccctatggagccaccatgaggacgaaggaaacatatcattaaaagatcagaaatacaaaaagagataccattaagagttcctacagatactgaaacggtcattaggtaatagtattaacatttttattctgatattcaacagcagcagtcacttccctccacccatatgtgtatcgtctgcctgggcagcacagaacaggcacctggtgagtgcccagggatgaccctcctcggcagctgcccagaggccagcactacccaccccatagccactgtccccaagtcagcatgaagggaagggagaatgtcacactcacctgattctgatgaattggctgggctgagttatgcctctcatgtagcaaactctcatgaacacagaactgctcacagatagcactgtgcgtgtgcaactgctctggaacacagaggcaggctggagggcgagcgggtgctcagcaccagtgacattctgaggtcatggcacacatcacagtggggccttgcctgggtcatcagagcccagagtcagcgtcctccactgcctgaggcgtcaacatgcctgcatgcaatgtgtgcacttgtgtgcacatgtgtatgtgggtaaacacatctgtgcacctgtgtgttgcttctctggccaggcctggctgccccactcatgtctgcacccagttcctcatcactgttacccccgaggcccaggaccagcatcagagcatccatgggtgctccctaacttcagccctccccaaccagggtggtcctgggatacacataggggtggagggaagttactgttgctgttgaatatcagaataaaaatgttaatactattacctaataacctttcagtatctgtaggaactcttaatggtatccctttttgtatttctgatattttaatgatatgtttctctccatgacccttggttattctaggtagagggtcctgtggggaaagtgcctggcaccctgtaggggctcactcttctagaaatgtgatctgaaatctggctcacctgtccttccacccagggcctaggggatgccgagttccggagaccagaaagagcttgggataaaaagaaggtttaaggggaaggctttgacctgggctgggtttgcctgcgccatccaaacctgcaggctcgagtcctgagacacagggggtccagatgtcccaatgcagggccctcctcattaacacctgctcccctgtactcattagtaacctcacccatcctaccctcaaagcacagttggccctggtatccgtgggctctgcatgtgtggattcagccaacagtgggtggaaaatattcagaaaagggagtgtggatggctatgtctctgctgaacatgtacagacttttttcctgtcaccattccctaaacaatacagtataacaacccaatgacagccctagcaagtagagacaatgaaaaagaccggctcatgtctaaaacaccaaaagcaatggcaacaaaagccaaaattgacaaatgggatctaattaaactaaagagcttctgcacagcaaaagaaactaccatcagagtgaacaggcaacctacagaatgggagaaaatttttgcaacctactcatctgacaaagggctaatatccagaatctacaatgaactcaaacaaatttacaagaaaaaaacaaacaaccccatcaaaaagtgggcaaaggatatgaacagacacttctcaaaagaagacatttatgcagccaaaacacacatgagaaaatgctcacaatcactggccatcagagaaatgcaaatcaaaaccacaatgagataccatctcacaccagttagaatggcaatcattaaaaagtcaggaaacaacaggtgctggagaggatgtggagaaataggaacacttttacactgttggtgggactgtaaactagttcacccattgtggaagacagtttggccattcctcagggatctagaactagaaatatcatttgacccagccatcccattactgggtatatacccaaaggattataaatcgtgctgctataaagacacatgcacacgtatgtttattgtggcactattcacaatagcaaagacttggaaccaacccaaatgtccaacaatgatagactggattaagaaaatatggcacatatataccatggaatactatacagccataaaaatgatgagttcttgtcctttgtagggacatggatgaagctggaaaccatcattctcagcaaactatcacaaggacaaaaaccaaacaccgcatgttctcactcataggtgggaattgaacaatgagaacacttggacacaggaaggggaacatcacacaccggggactgtggtggggtggggggcggggggagggatagcattaggagatatacctaatgtaaa

SEQ ID NO: 1879578 - DNA, 4001 bp, Homo sapiens
taccatggatgaaccttgaaaacattatgctaagtacaggaaaccagacacagaaagccacatattgtatgattccatttatatgaaatatctagatatgaaatatctagaacaggcaaatccataaagacagaaagtaagtcgaggggaagagagagtgagaagtgactgctaatgggtgtggagtttatttttggggtgatggaaatggtctggaattagtagtgatggtcacacaatcttgtaaatacactaaaaaccactggattgtacactttaaaagggcgaatattatgatatgtgaattatctcaattaaaaagctttattatagaaaaagttaaggaaaggagggtgtattcatacattctcacactgatataaagacatacttgagactgggtaatttataaagaaaagaggtttaattgactcatagttctgtgggctatacaggcttctgcttctggagaggcctcagaaaacttacaatcatggcggaaggcgaaggggaagcaggcacatcttcacatggccagcaggaaaaagagagcaaaggaggaggtgctacacactttcaaacgaccagatctcataaaaactcattattgagagaacagcaagggggatgtctgcccccatgatccaatcacctcccaccaggcccctcctccaacattgagaattataatttgacatgagatttgggtagggacacagacctaaaccatatcagagggtgaagagaaaaagacaaaaaataatgcagaaccaagtcaatatgtaacacacacaccacaaaattctttgtaggtgataaagatgcaccatggctttgatcttgagctttgcagcagctactacaaacctggaaaatagtgttaattaaatgattcctggaatccgtaagacaaacatgaactggttgctcaggaggatcatggcctttttttggtgctgatgcccaataggcatctctctggtgtgtcttcataaagaggatccattgacaacaacatctccccatatctccggtgacaagagtcgcacagttatatcccaggttcagtcaaattggacacaaagcccaagtataattcaataaaggcactttagtgcagggcctaaatggtacaggatatgcaggcagttcttcagtggtaaaatgtggattttctggagcagtggtttccaaccctagctgcacattaggaagtcctgggaacttttgcaaaataccaacacaggactccaccaaccagagattctgattttttctatgtttccaggggattttaatatatagccaaatctgagaactgatgagatcgataaattgtacatttttcatgaaatcctctataaatactatttcttgcctcagagtttcatcaactcaaggttataatacttaaacacatttttgcgtagctaatattttctgaatgccagctatgtaccaggcaggtgctgtgctctaagatataaggataattgtgtgacccaatctctatcttcaaggagctgatccagtattgattcgggttacagacacctcagctgcttgtcacaaaggaaggtggtgaggggatgcagagaacacaaggcaggcactcggggcagctctgggtgggtggagcactcccagcagaatgaacaacttagctgagtcccaaaggaaagattaattaggaaaaagtggagtgggagagtggtacattgtggtcaatatttttctcaataacttggatgactattagtaaccattctatatgaatgtgaggtgccatgcttactcaagaacagctggaggaatagccccttgctacatgactgaatgggggaccaaagtgcactggtgggcaagaggaactcaaaccaagattaattgacactccagatcaggggaaggcaactaagaagcatgagcagtgctgccctgagtgttctaccagaggctttgcatgtgttatcatgtaatcctacatcgacattttacagttgaagaaaatcagccttataatgtcaaggtagccgccttgagttggcacagccaagtgtgtagccagaactcaagtctaagcctgtctcactccacggtccaggttctttctgttattccacatgtatcaagtcctgtatcaattctttagattcaaagaatcagctgctcatagacaagataggcaggcttggttcagctgcattttctgtgggggaaaatgttaacagctatcagcttatgcactagtcttagatgtgtgtattggagttgaatgtgagaggcagacattctcatgggaaggatccagactttggagtcaggcaacgcaggctcaaaactcagctttgctacttatgctgtgtgactttaggcaagttactctgccttcctgagcctcagttttcttatccataaaatagggataataatatctacctcacaggaccattgtgaagattaaagttaatgtatatgcatggaacattttccaagatagagcatatgttaggccacaaaataaatcccaacaaatattaaaaaatcaggctggctaggttgggcatggtggttcacacctgtaattccagcactttgggaggccaaggcatgtggatcacttgaggtctggagttcagaccagcctggccaacatggtgaaaccccatctgtactaaaaatacaaaaattagctggacgtgatggtgcacgtatgtaatcccagctattcaggaggctgaggcaggagaattgcttgaacccgggaggcagaggttgcagtgagccaagatcgttccactgcactctagcctgggcaacagagagagactccatctaaaaaaaaaaaaaaaaaaattaggtcggctatggtggctcatgtctgtaatctcaacacttcggggggcaggaggattgcctaagcccaggagctcgagaccagcctgggcaacacagagtgagaccccatctctatggaaaaaaaaaaaaaaaaaaaaatagaaaccttacctagtattttctcaaactacaatggagtaaaactagaaattaataacaaaaggacccctggaaactatacaaatacatggaaattaaataatacatacctgaacaaccactgggtcaatgaagaaattaaaaaggaaataaaaaaatgtcttgaaacatgaaaatggaaacacaacataccaatacccacaggatacagtaaaagcaatactaggagagatgtttatagcgataaatacttatatctaaaaagtagaaagatttcaaataaacaactccatgatgctcctcatggaaccagaaaagcaaaaacaaattgaacccaaaattagtagaagcaaagaaagaataaagatcagggcagaactaaacaaaatagagactaaaaatagtaccaaaagatgaaaaaaatgaaaacttgttttttctaaagataaacaaaattgacaaatcatcagctagactaagaaaaagagaacacccaaataaataaaatcagaagctaggcacggtggcacatacctagagttccagcaactttgtaggctgagacaggaaaatcgcttgaggccaggagttctaggctacagtgtatgatgattgtgcctgtgaatagccactgcactccagcctgggcaacaaaacgagcctccatctcttaaaaaaaaaaatcagaaatgaaaagggagacataattgacaccacagaaatataaagaatcattagaaactattatgaacatctatatgccaacaaattggaaaacctagaggaaatagataagttcctgaatatatataacttaccaagattgagccaaaaagaaaacctgaagagaccagtaacaggtaacaagattgcacccatcatgccactgcattcaagcctgggttacagagccagaccctgtcaaaagaggagaggagaggagaggagatgagagaggggaagaggggaggggagaggaggggaggggagtctaacaccaattc

SEQ ID NO: 1879579 - DNA, 4001 bp, Homo sapiens
cctccaagtgtcttgatccattttagcaggttaatagctgctaatccgtctgtagctccttcaagcacttcagttcctggcattagtgtcagatgtatctgagaggcttgaaatacttgttcctttagctttgcaatatccaaagataaatttctagtatgaccttttaaatatctcttaactttttcccactcatgctctgtttcattacacagatgaggagtaatgcaaaaatcagaggtatttcaatcacattgtaactgcattctatattctaaactaactatatgatctcctagccacattacagtttgttggagatcattaatttgatcagctagtttctggtctatattattttggtaattccacagcagagtagaatttttctaccaattatttacatagtctgctgtttgtactgtggaatgcaaagcaactccagctactgcagcagtagctgtgacagcaatcaatcccataataatgaaaattaaagtagcaatgaaatgccgtgagtgcctcaaaatcttttgaagaatttcagtaataatatgcacagaaggagaggcttcccagggatgggaaagcttctcaggtatccatactccttcttgggctcttaccattaaaatagaatgatcagtgttatataaggaagaattcacacaagaagacaatctacattattgacaagtcacatgatgattaaagagatcaagttttaaatcacccactacaaacaggaaaggtgatggacacaactctgtatccagactgaatcattgtgagccaattttaacatgtaattaggattatattgggttggcttagtatatttccctttccaaatctttatcattttttagtgctgttaatattttccataattccttatgttttgcccctacagcaggccatatcgtttggggctgaggtaccactataccaccacatgcccaaataataggatctcttgctgtacttcttatagtgtccaccatctgattattttgtttagatgcagggtgaccattacttacagattgagaggtgagcctcataaatgcccctttaggggaccaatcaataatgactccatatgaatcattatgcaacacctctgctttccatgtgacacaatcttcccaagcaaatgccttcattttttctgaccatgtctagtccactttacagataggtttctgagggtggtaaacttcagttacagaagcataatcatggtgataaatactaagaccagaaagcatatgtaattgtgctatggagatgttacgttcaggcactattgccagccaagattgatgactgggaggtgaacacccattagcttttcctaaccaaataggtaaatgcttaaatcccaatgagacgttcataattgttccttcctcttgggggtgagatgggcctctatcatcagtagaaccaggcatccaaaaactatcattagtgtatacctccattggtcttctcctttgtctctgagatgttcatttgtaccatcactcatatcaggagctctggctcttcccagagccctctcttcctggtgtggctcatgatagatctccagatgtttggtgggcacccacacaggtgcctgattgttacctggagagacacaagaaaatcctcttccccatataattatccgccctttgattaaatttagttaaagggccagggaagttagtatgtgctctcatatgagtgcatagaaaggggaatgcctttgttgtactgcttgctgtagagaatgaaataaaacattaagttggtctttagtcacattttgaattaaggcatgttcaatattttgtgtggcttgcactacataggctgaaccagaaacaatgtttactggctatttaaaagtttttaacactgttatcacagccataagttcagccctttgagcagaagcaaagtcagtttgaaaaacttgttgaggtcccacaaatgaggcctttccattactagatccatcagtaaaaacagtaatggccctttcaataggggttttttgagtaatggaaagcaatatccatgatgtcaatttaagaaattggaatattttggatttaggataatgattatcaagaacaccagtaaaacctgccatattaatttgccattcctgggaattaatataagcctgctgaatttgttgtttgtctaatggaactataattttatttggattatatcccattaactttgttgtgcgcagccttgcttgtcctactagtacagcaatttaagtacagagtgagcattttagttgtattgtgaggtagaaaaagccactcaaccaaagcatcctgttgaacaataacacctgttggtgaatgtttagtaggaaaaactaaaaactgtaatggctgcatagggttaattagagtcacttgtgcctattgaattttttcttcaattaattgaagttcttctaatgcctctttggacagggaccatttgcagttaagatcagaatcacctcgtaaggtagaaaagaggtgagacatagcataagtaggaatgcctaaagtaggatgaatccaattaatgtcttctaataatttttgaaaatcatttagagtttttaaattatcccttctaatttgaactttttgaggcttaatagtactttattctactttcattcctaaatattgaaagggagtagaagtttgaattttatcgggggctatgattaaccctgctgcagtcacagccttttctaactgtttgtaacatagcattaactcctctctagtttcagctgcacataaaatattatccatgtaatgtatgatataacatttttaaaattgttctctaactggcttaatagcttttccaacataagtttgacaaatagtcgggctatttaacatgccttgtggcagtactttccaatggtatctgtccactggttctttgttatttatagcaggaacagtaaaagcaaatttttcataatcttgggcaactaaaggaatggtaaagaagtgatcttttaaatctgtcactatgagaggccagtattttgggatcattgttggagaaggcagccctggttgcagtgcacccatgggttgaattacagcattgacagtcctcaaatctattaacattctccattcccctgattttttcttaataacaaacacaggagaattccaaggggagagagcaggctctatgtgtcccttttgcaattgttcttgtatcaattcttttaaagcctccagtttttcctgtttcagcggccattgctccacccaaaccagtttggcagttaaccaaacaagaggaatgggacccggaggctcagcaatggccacccctaaaaatgataccctaatccagttgtatctgtttgcccttttagttctaaaggttctgtttggccattttcattttttcccagtcccttccctgggagatatcccatttttctcatcatttgattactgttatcactatactgatccataggaatagatatttcagcaccccattgttgtaataagtttctaccccatagatttacaggaataggtgtaataataggttgaattgtcccttcttggccatctggcccctggcatggcaaaattaaagaactttgaaaaatttctgaggcagcccctactccaacaataccaatggatgccttttgttttggtcaatgttggggccattgatttaaaccaataatagaaacatcagctccagtatgtactagcccctcaaaatcttttccttgaatggttactgtacaaataggtcttttgtcagacacttgattaacccaatatatagcttttcctgctgggttagtactaccaaagcctcctgttccttttactgtagtacttcctagctttgtataaggtaacagtaacaactgagcaattctttcccctggggaagcagaccatggaattgaggaactaataactaactgaatctct

SEQ ID NO: 1879580 - DNA, 4001 bp, Homo sapiens
aaagttggtctgcagttatattaatttgaggttggtcctgcgtgttgtgagaagcctgaatggaagcttcatctgcccaccaagttttaaattgtaagaactaagcaggagttagacaagcttgagtaagagcgtcccagtcagtaggaatcatctgactggaaacagcaatgttctttaatagtcccattacaaaaggagaacctggtccatactgattaatagcttgtttaaattctttgagtaatttaaaacaaaaaggctcaaatgtagctacaatatttccctgttggtctgggcagtgtagtctaacagggaactgccaagcctcttaatcaccttctcatctagcttgctgaattcctgactgaatagaactaagagcagtcgctcgaggtgctgcttgaacagtcactggggcaactaatttttgcccactgtcctctggaaaagaaagatctggagggtcaggccactctttttcttcaaaataataatgagggggtgcagaagggtagggatgaacctctccctcctttgccactttagctttagctggcaaataaacctgctctataacctcttctgttacttcattatactctccttcttcctcatcatcagtgtgaaaaagttccaagatggaacgaaccagaccccacacttgtcccattgttaccctgatgcttctgagctccccttcttactcaccacggggtttgctttaagagtactcaggtgtcctccagctagttccatgttctccaaccatcactctggtgacccttcaacctggattcgagcccccatgatggagaccacttgctgagaccagcttggtcggggagactctaacccagtggcactagaggaattaaagacacagaaatatagaggagtgaagtaggaaatcaagggtctcacagccttcagagctgagagcctccaacagaggtttacccatgtatttattaacagcaagctagtcattagcattctttctatagatattagattaactaaaattattccttatgggaaatgaagagatgggctgaaataaagggatgggttggactagctatctgcagcaggagcatggccttaaggcacagatcactcatgctattgtttgtggtttaagaatgcctttaagcggttttccaccctgggtgggccaggtgttccttgccctcattctggtaaacccacaaccttccagcgtgggcgttaagaccatcatgtacatgtcacagtgctgcagagattttgtttatggccagttttggggccagtttatggccaggttttggggggcctgttccccacagagaagatgataaccagcatcataaaaatatgtgaaactataaaaactcactggtaaagctaacacatagggagaaagagataagactcaaatcttatccctacagaaaactgcccaaccacaaaagtaaacagtaagagaggaaggaacaaaggatatacaaaacaagcagaaaataatagaatgctagatgtaagtactcacctatcaagaataacgttgcatgtaaatagattgaattttcccatttaaaagatatagactgggctgactctctttttggactcaactcgtctgcacccaggtgaaataaacagccttgttgctcacacaaagcttgtttggtggtctcttcacatggatgcatgacacatttggtgccaaagacccaggtcagcaggactccttcaggagactgtcccctgtcctcaccctcactccatgaagagatccacctacgacctttggtcctcagaccaaccagcccaaggaacatctcacaaattttaaatcgggtaagtggcctctttttactctcttctccaacctttctcactatccctcaacctctttctcctttcattcttggtgccacccttcactccctctcttctcttaatttcaattcctttcattttctagtagagacaaaggagacacattttatccatggacccaaaactctggtgctggtcatgtactcaggaaggcagccttcccttagtgtttaatcattccggggatgcctgcctgattattcacccacattccattggcgtctgatatcttcagggatgcctgccttggtcattcaaccacattcccttggtggcaagtcaattgcggggatgcctgctttggctgctcacccacattgcagcccagggctgctccccaaccctttctccatgtctctacctttctctttaaacttgcctccttcactatgggcaaacttccaccctccattcctccttcttctcccttagcctgtgttctcaagaacttaaaatttcttcaactatcacctgaactaaaatctaaatgtcttattttcttctgcaacactgcttggccccaatacaaactcgacaatggttctaaatggccagaaaatggcacttttgatttctccatcctccgagacctagataatttttgttgaaaaatgggcaaatggtctgaggtgcctgacatccaggccttctaatacacattggtccctccctagtctctgtgcccaatgcaactcatcccaaatctttcttctttagctcctgtctgttccttcagtctccaccccaaactctgagtcctttgaatccttcttttctacagactgatctgacctctccccttctccccaggctgctcctcgccaggccaagctaggacccaattcttcctcagcctctgctcccccaccctataatctttctatcacttcccctcctcacacccaatctggcttacagtttcgttctgcaactagccctcccccacctgcccaacaatttcctgttaaagaggtggctggagctaaaggcatagtcaaggttaatgctcctttttttctttatccgacctctcccaaatcagtttttaacatcaaatataaaaactcagcccagttcatggcccatttggcaacaacccttagacgctttactgccctagacccagaggggccagaaggctatcttattctctatgcattttattacccaatctgctgctgacattagaaaaagctccaaaaattagattctggccctcaaaccccacaacaggacttaattaactgcaccttcaaggtgtatgataatagagaagagttgcaattacttgcctctgctgtgagagaaaccccagccatatctccagcacacaaaaacttcaaaatgcctaagccacagcagccaggcatcccttcaggacttcctcccccaggatcttgctttaagtgctggaagtctggccactgggccaaggaatgcctgcagcctgggattcctcctaagctgtgtcccatctgtgcgggaccccactggaaattggactgtccaactggcccaaggctctgactgtctccttcccaggtcttcttggcttagtggctgaacactgacactgccaatcacctcagaagccccctgaactgtcacggatgccgagttttgggtaacttacagtggagggtaagtctgtccccttcttaatcaatacagaggctaccaactccacactaccttcttttcaagggcctgttcccttgcctccataactgttgtgcgtattgatggccaggcttctaaacatcttaaaactccccaactctggtgccaacttggacaatattctttaatgtactcctttttagttatccccacctgcccagctcccttattaggtcaagacattttaactaaattgtctgcttccctgactattcctaggctacagccacacctcattgctgcccttttccccagttcaaaacctccttcacatcctcccttgttatctccccaccttaatccacaagtgtgggatacctctactccctcactggcaactgatcacacacccattactatcccattaaacataatcacccttatcatgccaatatcccatcccacagcacacttaaaggattaaagcctgttat

SEQ ID NO: 1879581 - DNA, 4001 bp, Homo sapiens
atctgagaagagaggaccagtcccaggaagaaagctgagacactgctgtctgggaggagccaagagcttggtttattgtaccaggaagaaaagtctaggcctctgccagggcaatcatcagagaacactgctccagggaaaactgcctcccacttcctggacctctgtgggcaatagagaagtacatgtcagcagtgcctcctgctggacagccccaacattacactatttgtccaatgtcagaaacagaatgtaagacggatgtatctggaatgttcaagctggagtaacaccatccaacaactattactgctgctgctgccacttttattgatggttgactgtgtcccaggcactgtgctaaataattttattggatgatctcaatgttcacaacagccctatgaaataggaactattactaatccaatttttcagatgaagaaactgagaaacagtttttttctgaggtttcaagttagctggtagcaagattagctgtgcagcccaggcctctctagcccaaaagcccatggttttttgttgttgttgttgttttttgagacggagtctcactctgtcgcccaggctggagtgcagtggcgcgatctcggctcactgcaagctccacctccagggttcacgccattctcctgcctcagcctcccaagtagctgggactacaggcacccgccaccacgcccggctaattttttgtatttttagtagagacagggtttcaccatgttagccaggatggtcttaatcttctgaccttgtgatctgcctgcctcagcctcccaaaatgctgggattacaggcgtgagccacggcgcccggcccaagcccatggttttaaccgcattcttgggtatctcaaccagttcaggatgatggagagttttcgtttttgtatcatctccacttggttggtagaggctgcctagagctctgggttgagaggattcctgagtgctgtgatgaatttgtgatatctgccagcggcactggaagggatgtggccgcatgcgtgtgagttatgttttcatctctgatctagtccaatctattgtatactgtgatccttataggaccctgagaaaaggaatcaaggctaaatcttttttttgagactgggtcttgccctgttgcccagggtggactgcagtagtgtgatcacagctcactgcagcctcaacctcccaggcacaagtgatcctcctacctcaacctcccaagtagctgggaccacagatgtgtgcctccacacctcactaacttgttttgttttttgtagagatggggtctccctatgttgcccaggctggtctcaaactcctgggtgatcctcccacctcagtctcctaaagtgttaggattacaggcgtgagccaccgagcccagcctaaggctcagttttctgacctctgtctttactcaatcactcggtgacctaaaaggcatctcaaatgtagcatgtctaaatatggaactcttgatttgcacctccaaaccatccctccaccatcttccccactaagtaaaaggcaccgctagtctttgttggctcaagacaaaaagccttagtatcacccttgacctcctttttctctcacccctgacatcaaatctttcaatacatctcactggttctccccttgaaatatatccagaatccagccacgtctcaccaccttcacagctgccaccaccattgtcttccctggactaatgtagtaaccaatcttgctccacgtgtccttaccccctgtattagtctgttttcatgctgctaataaagaccagagactgggtaatttacaaagaaaaagaggtttagtagactcacagttccaagtggctggggaggcctcacaatcatggcagaaggcaaaaggcacgtcttacgtagcagcagacaagagggaatgaatgagagctaagcaaaaggggaaaccccttataaaatcatcagatcttataagacttattcactaccatgggaaccgtatgggggaaactgctcccatgattcaactgtctcccaccaggtccctcccacaacacgtgggaattatgggagctacaattcaagatgagatttgggtggcgacacagccaaacatatcacccactacaccttagtctcaactcagcagacatccttaggccttctcggtttttctttctttttttttttttaattatacttcaagttttagggtacatgtgcacaacgtgcaggttagttacatatgtatacatgtgccatgttggtgtgctgcacccattaactcgtcatttaacattaggtatatctcctaatgctatccctcccccctcccacttctcggtttttcaaagcactttggcataagttacacacacacacacgcgcgcacacacacacacacacacacagagtaaagcgaggcaggaaattgtcactcccatttgacacatgagaaaaactgaggcttggaaaggtgatgcaaagacatcaaagacacagcgggggagttgccccagctcttactgtgacgccatacactgccatttcccttctggacatgaccctctgtctcccacagcctcctatgggtacatccgagagtctcccaagaggctgcagaacgtcaggtaaggagaatgtcaaggaagccaggagagttggtcttctctctgccttggagggccccagtctaagaaaaaaaaaacgttatctctttggtctaatccgcggtctcgcagtctggaccactttcctttggtatgtggtgccccctggtgctcactcttaggaaatgcagctggttatctaagctttaggggagaggggtgagctttcatggtggaggtgatgcctgggggctcttctgaccaccctctcagaggagctccctcccagcacaactgttccatgccttagagaccagcgtgtgcgtccaggttgatgagggccacactgctcctttaaaaattcaccaatccacgacttctagtgggaacccaaattggtacagcctttttgaaaagtcatttaaaataataataataaaataaaatagctggacatggtggctcatgccgcaatcccagcattttggaatgctgaggtggatggatcgcttgagctcaggagtttgagaccagcctgggaaacatggtgaaaccctatctctacaaaaaatacaaaaaattggccagtcgtggtacacgcctgtggtcccagctactcaggaggctgaggggggagggtttcttgagcctcggaggtcaagactgcggtaagccaagattgtgtcactgcactgcagcccagatgacagagtgagatcacgtctaaaaaaaaaaaaaaattaacttgggaggccaaggtgagaggatcacttgacacctggagtttgagactagtctggacaacatcacaagactccatctcttaaaaaattaaaatacttagccgggtgtgaaggtgcatgcctgcagtcccagctacttgggtggctgaggctggaggatcgcctgagcccagttcaaggcttcaggcagccatgattgttctgctgcactccagcctgggtgacagagcgagaacccatctctaaaacaaattttcttagttaaaactttaaaaaatattttaaatgacatactcatgatataatgtgagctactaaacatatatataaaatactgtatatgtactaaactcacaaatggtagcaatgagtctctctgcagagtgagattatattttatttttattctttataattttctatactttcccaattttcggcattcagcatgtttcacttttctaaagtatagttttgtgaaggaaaaattataataaatccctttccatctggtttcctgtccctgtcatctgctgtatgctggtcagaacatctctggagcactattcagtgagcaacaggagagttaaagatttgtccaccagtgagaacacgtgtgcattacagtggaggagcttc

SEQ ID NO: 1879582 - DNA, 4001 bp, Homo sapiens
agaacctcagaggacctttatggaagctatgagggataaaggtcagcggggtggaggagtctgccttgacacgggaggaaccaagtggcctcacagagctcatctacctgggaggttgggacggctgcagtggtcagggtatcaggaggggtctgtaggtggtgggcagggtcaggggctgtagagaccgtggtcataaattcagatggagtgtcccctctccccacatgtcatggctgggattttggagcagggatcacttctgtgctgataactttttgcctttccccttaggaggcagtgtgtgctccccagagcattacaaacctgagttcaaatttgggctccaccccttcttacaccggagaacctggacaagattcctaacctctctaagcctttagattatgcatttgaaaatggggagagtaattaactaccttgcaagggctagcctcagaaatgaaggcttatttctgtggtagatttgcatataaacaggcactcaaaattagtagctactattttttattggaagagaggctgaaatgctatcaggaggggagagaaaaggctgcaccagccaaactgggtcgtgtgtgtttgatgggatttcaacagcgtggatgaattgtaagtccccctccccaccaagccctccccctccgctgtgctcaggtctgtatgctcagcagcactgggaatggtgccagaggctgcgcgtttgcccagtacagcttggagttttgcatcagaagcagcggggtgccaattaggcacactctggaggtggtgatgcaatgcaaagaaatggggtggtggagaatccgctgtggggtccgcggtggctgccgcatccggtttaggggcggcagagccagcggggtgtctggggagttccagcgttggttgtggagtaggatgtggtgtctagctttcagcagtagcacctgtttggtcctcatcaaagtggtttagaggagggacttttggctgcggagcctccctttgttcttgtctgtattctgagacatcctgataattctgtgggttaccccaaactcttaacaaagttttttctctttaagtcagagagagtccatttctgcccttatgaacagaaactccaacccaaaccatcttactgaaagtagttcttccttttactcaattcctttatgggatgaatctccactgacaattattttaccaatttgaaacttgttcatgatctttcttcgcttccagaatgcaagctacttgagggacctcgtctgctgtcgtcaccatgcctttccctgccaggctcctaggagctgcttggcggcgggtagtggttaagcccacagaggctggggccagactgcctggctttgaatggtggctctacaattgtgagattaacagcccctacttaaggttgtgggaattaaaccagttaatacacgtaaagagcgccaggcacgtactgtttatgaatggatgcacttagcagaaattcagttgagaataacggttgtttttcaggattttaagatctttgtcccatcacctccacccccacactctgggagcgatcctttcccaagggtcaggctgaaagtttgccagattggaatttcgggtctgctgggtcacagagccaagggcccagtcttcaaggtgatctccacttcggagcactttatgccgcccacgttttgttctataacaatcccaaactggccctccgagcctgggaagtcgagtttctccgaaaccactgagtcctggagagccccgcggcctcccgccctttctccgcagcctgagagggccagtggggccgccgctgcttcctggaagagcttcgccttccggagccgcaggccgcggagctcacaagagcttcggagcagggcatctcgcgcggacagggctggcgatgggcagccgaccaaaacgccgcgttcctggtgactgcttttccctggcaggcacgcgttcgctgctccgcggccgcggctcttccggggccgagggctgcggcgcgtgagccgacgtctgtgtcctgcgcaagctgctgatggtgccacagagcccggggcggcgagccgcggatatttgctgctctattttaagattctctgtcctgtctgtttccgagcagttgtcacttggtcagaggaaagggaaagcgggggtggagacagtgaggcccgagcctcgggcgcttattacttccagctgggtggaaattcccatccctcggagaagacaagcgtggcccctctcctcccgctcctcccactcctccgccccctcccccaaaactgagtgagtcaattcgtcgctggtcagggcaagtctcgctcattttaataacaaaaataaggataatgccgcactatttgcacagcatctcagacttttcagagcacttaagcacttttcaaacactttccttttattttattttattttttttttggagacggagcctccgctctgtcgcccaggctggagtgcggtggcgcgatctcggctcactgcaatctccgcctcccgggttcaagcgattctcctgcctcagcctcccgagtagctgggattacaggcgcacgacaccacgcccggccattttttttttttttgtattttagtagagagcgggtttcaccgtgttgcccaggctggtgttgaactctggagctcaggcggtccgctcgcctcggcctcccaaagtgctaaggttacaggcttgagccaccgcgcccggcctcaaaacacttttctccacttattggccaagacacattattactccctgtttgcaagtgagaaaacagaggcacagagaggttagtgtttggacatggtcacacagccagttaatcatatgaccacagaggctggatctcctgagttttaaactgagctgtcattcagtccatagccatttattgtctttcctcccaggcacggcgcctttcctgtgctcgctcatgagcttctgtgttatgaagaatgaagcatcaaagggtagtgtatggttaactctggcgtcttcccactccggtggcttattaattctcaaggacagcctcataggagaggatattcaggcatgcaagcagttattgagtgcctactgtgtgcagctactgtacttttacacagcctatgggagaaagtttcttagcacataattacaatgaaatgtgattaagttgttgataatgcacaatattagggaaatagagaaagaggtaatccatgttgtcacggggcagcctttaaagcgtttcccccaactttttattatacagattttcaggcatgcagaatagttgaaagattgttataatgactaccacttcaattcaaccagtatagatatgtagatggatagagagatagatatagatactgccccagaagcaaaagtttttctctgatcttctcttgccctcctgtctcagtctcattgtcccacaaggcaagccataggaactaggaactagaattccccttctccaaggcagccgtataaaccagaacccccttttcccaaagtcagccatgaaacctaaaatcattactctaattttctcttcatctttctgtgtaaaaactgaccataaagaaatgatctgttctacgttgttccagagagggtcctgccccacatccagaaggaaggtgtgaaaagaaaatatcttgggccccttcaagctgggaaccgctcagggcctcccattctattcagagtcatccctctgctcacagagataacaaagatagatgcatattctgattgtctcctttggaaagacttatcagaaactcaaaagaatgcagccatctgtctgtcagctacctgtgacctggaaggtagggggcttggtttgagttgtctccatctttctggatagagctaatgtacttcttacatatattgattggtgtctcatgtctccctaaaatgtataaaaccaagctgtgccccggccaccttgggc

SEQ ID NO: 1879583 - DNA, 4001 bp, Homo sapiens
aaactaactgcaaatgccatatttgatgcaccctgtgaaaccattgttcaagagtgagggcaaaagaggccaagatatttttaaaatatggactagaagaaaacatgatttaccaccctcagatggttgcagagaaagctactgagggatatattccaacaagaagaaaagtgaaccaaaggggaaggagtggtctgctaaagataatactgagcaaaaaaataataataaaagtattttgctgaatgcgtttaaccactaattggaaatttgtatttaagagtattgaattaaaatgtaaaacaagaatgtacggtggggaaaactggaaaaggagggaaacgtcaaataactttagactttgttagaaaaatagacagttattatgttaacaacttaagtttaccagctaaaatatgtggagagatatactataataacttccaaattggtgggaaaaaagatataagaaaagctgtatcaaaaacaacaagtcaagacatagagaaaatagaagctagtatctataaaaaacaaaaatagacagaaataaatataccaatacttacaataaatgtgacaatattacctatcacggacagagactaattagataacttaaaaatccttctatatgccatttaaaagagtaatgctaaaagcagacaaacacttattacaaatatgtatagaaagatgtactaaaactacatataacataattcacagattaaagaaaaatcatagtaacaataacaaaatatttagaattgattgaaagaaatcccactttatgtcagaactcataagacatagctaaagcaattctttaagtaaatttatagcttttaatgcatttaaaaatgttataaaataaatgagctaatcattcaattcgagaacctactaaaataagagagagtaagcctataagaaggagaagaaaatcaacagtagataagagcagaaattaagaaaacagaaaaggcaaacaaaatatggctgattgataaaaccaaagatatttctttggaaactaatgaaagaaaaatagtcaactgagtggacagatcatggtgaaaaaagcaggcacaaggcatcactaggagcataaaaagagatgcaaaaggaaggttaaaaatcataggactatcatgaacaactttttgacaataaatttgaacacctagaagaaatggtttttagataaaatttataaaaattattcagacactagattatggtgatttttcaaggagagtttcacaacagcctcaagaaacagaaaattgtcttcttatacaaattgttccagaatagatgaagcaaataaaatacctgactcattttctgatgccagtataatttgatatcagaactgagcaaggacatgatgagaaatgaaaattataggcctacctcccaaagaatatagacgcagaaattctaaataaaatatccgaaagtccaatctcacaatgtattcacaaaaagcacatcaaggtcaagtgggtttatttgtcttgggaagtgagaggcagttgaggtattgcctcggactgtcactcaaatggatctgccttcacatggagacaggtggccagggtcagaaggagtttcccacttccactctgcagaatccaactagtcagacatgagcagcgtaggagagagctcccctcgtaccccacaccacacacaccaggaatgtcaggccacattcctgatattcatcaggtgatggtcaggccgttaacagtctctctaaaataataattggtcactgccagtgccagaggaaggcagtctcccaataaacagaaacacttgaaactggtgatcagcagcttccgaatgggatctcaggagttgggcccgtgggctcaagcatgcccagtaagaggcataatggcagagtttaaccggcgcatgacctcctaagtacattgcgctggttaagagaaaaatgcctcaagcaagcatgcgcacaactccagtaaacacactgcgcatgctcctctcccgagcgctggcagagcactgcgcatgtgcacagcccactccaagggaagagtcagggaagaaaggacgcaagaccctggacacatgctgacgtacaaaaccccaagtcaaaacgtcagaccacgcacttgatctttcaagtcacccgcttggccttcttccaagtgtacgttccttcctttcattcctgctctaaagcttttgaataaactttcactcctgctctaaaacttgcctcagtttctccctctgccttatgcccctcagtcgaattctttcttctgaggaggcaagaattgaggttgctgcagaactgtacagatttgcggccggtaagagaagcaaacaaaacagaatgctgacaaaccagaaacctcctaggaaatccgaaacgagagagaaaagacaaagacatcctttatttgataaagagtaacacaaaaggaagaggaggaggaaggggaggggaaaaggtgctgaggagaaggagaaaaagcaaacactgagtttcatgacgaaactttagagtcacgaaacgataaggacatcaggaactttctagaatactgctatcatagtgccttcctgatacttttctgcgggtgctggccaattcaatgtaaggaacagaactgacagaatgtggattgggataaaaaggcaaaatgacgtggtttgcagatgaatagactgtcaacagagaaattccaaagacattctactacctattaaaactagtaagtgaatctagattcaaaatcaatatacaaaaatcagaagtcgttctgtatgttaagaaaagcccgtccaaaagtgtaatagaaaaaaaaaaaaagatttacccaaaccacaaaaactgtaagttacccaggaataaatctaaggaaagatgagctagaaaagagagttataaaatattattgaaggacataaaagaagactgaataaatggagtgatttactgtcttcataggtagaaggggtaataccataaataagtcaatacttccccaaatgtatctataatttcaatgaaattcaataaaattcacaatcaaaagtgctgtcgtacttgatacaccaattctcactaaaattcatatggaagaggaaaagaagaaccaggaagatgcgggggggaagacagaaagtggtagatgctcatctccaccattctatctatgttaggtcattcttgctctgctataaagaaatacttgaggctgggtaatttataaagaaaagaagtttaattggctcatggttctgcaggctttacaggaagcatggtgctggcatctgctcggcttctgcggaggcctcaagaagctttcatcatggcagaaggcgaagggaagcaggcgtctcacgtggcaagggagagagcaagagagtgaggtagggggaggtaccacatacttttaaataaccagatctcaaagaactcatcaagccataagggatccgcccccgtgacccaaacacctcccaccaggccccatctccaacattgggggttacatttcaacataagatttgggtgggacaaatatccaagacacatcactgtctatagatagattgctctatctgtcaagatgtatccatggtaattaagggctatcgtatttgaataggcaactagatatgcagaacagaattaaaaatccagaaatatatatttgcatatatataactttggcataagatacggaagatgtggtagagactgctggatgtccactctaagtctgagaatgggctacttagaatttccaaatcctttgcaaaaaaaaaaagtctggctaaaagaagaagtagaaatgctggacggtggcttagaatacatacagctgatacctgtccttgaccctccttccctctttctctccatgatgctacctggaaactcaggggttggtgagaacttcatcttggaccatgaaggttccagtcatgccctaggaattaaggagctt

SEQ ID NO: 1879584 - DNA, 4001 bp, Homo sapiens
gcaatgggatggcatcccatccagggtccagggagggttcccagctgctgccctgaacaaccaagagggactctggccaccctcaatcctgaactggaataatcaggtaaataattcttacttgtttttattaatctttcttaagtgtgtctatagctcacatttatttcaatatttaatattagaagggcgttgagtctttatttagaattttggtaatgtttttgtgaccacaaatatgccataagaacttgcttgtttatatcatttagcctatggtaaatatttttgttatacttcgtttcacttaaagttgcagtttccaagagctatcgaccacgttcagacttaactgtactgtaacgtgtgttttttctccattgattcctactagggtaataaaattgtcaacctaagggaacaaataaattctagaagtaaaggctttctacacagttgttgcaggaataccaaccataggctctggagacgaatggtttaacaactcaccattggccaaataaggtctcacccctgctgtatttgcacatgctgttccattagccctaaaccattcctctcacaccactgtcgctcatgctttcaatgggaccaaaggctcagctgaccaccatagagtcagcgaagtcgcttgttaaatacaggttccctgccctaccttcgaagattctattataactcggtagaggaggggggggggggcagagaatatgaatttttgtcccctccctaagttccttccaaagcaccagcaaactgagaaccagcgctaacaccctctccaaataccactttctctggaaaactcacccaatcctctcagcctcctctctgttctcctaaacatcatatacttgtaacctgactttggcactcagcacacccaaccatgtacttccctgcctttcctcatcctctccctcatgaacccctcaaaagcagatccatccgcttcctcttccaattccaagcacaaggctcagaatctttgaacccttcacacatggttgtggactgaatcagtaaataaacaacttaggaaaaacacgttcactatttcttgaagataaacaggtttagttgggggctggtcctttggaactcaggtgtgtctgttggaaccctctaatgttgctcctttcgggtgggctctgtctccaggagcagatcacctccctgcggccccacggggatagcccttcttctgtgagctctgacttcaggctccactccaggatgctttcgctttcctttgactaggagtggagttaaaacagtattaaactttaacaacagacgtttaattgcacaaattgcagccttgagagtccaggttctgaaaagcatcgaatttgaatgaaagagaaacatgtgtgatttgggggagaattctgagtacattttaatagggttctaccaattaatttatctcctggcttccacaaacaccataataaacttgtcattttctgagaattaactcttcgattagacgtgtctggacaattgcatattaacaatcttctgaactcgtcgccataatgggaggacaaagtggatgaatgcagaaagaagaaacaaaacaggggccggcagcgttggggcgctcttctgcggcgcgctacagccgcgctgctgtgaggggactgaataaatgggaggcaacgctgcctcttccaaaaaaccgagaaagcaaccggaggacgtagccgctcaggaatgcctgcgtcgtgatgcttattgaccgacgcagagcttaagtctcgctgcctacgcgttcacaatataaacaggaaggattagggtgaccccacgtccccaaagactgaagcagtccgaggaaagctctggttaccttgcatcctgagcagcctgccccttgatgacagatgtcccagattcgggcattcttttgtggctcatgggaaagcacggctaatccgtgcgagcccgcgcgctcgcccctcggctgcattcagctcgctcgcacaatgcgctggcggagctccccggcctcgggggcccgcgggacgccggctccccccacccccagccccgacctcgccgctgggcttggcgtcacctccacgtgcgtgcgcgcctcgaggttctcggtgcagaagcgggtgggcgtgggcgtgcggggagagtgagaaggaaaagtgctggctgcatggagaaaagggaaaagcaagacggatcaggctgctgtttttcttcccacctgttcttgctcgcttctctgttctacccaggctctcccccactttttaagccctcccttccccgcccttctctccttttccattctcttcgcacttttcaatgcaccaggctataacagccttgcagggagtggctgaattgtaaagactctgtgaagtaggtacattttgcagatgaggaaactgaggcacacacgagcccagggggcactggatgtggaaccaggcctccagagcgcgctttctccaccactaagctgcaagttgctgatgtccctagcaaggacttccctgttacctgcactgccaccctgccgtaaacacatctatgtttccatctcagcggcctcatttagcgagagcaacgagttcacacgccagtcaaatggagaagacgtggaagagacggtttcgtttatcagagcattttccaccagcaaacctggcccgggtggaagttctcttgcttcagtaaggatgcaggttcaatgagcgctctcacctccaccagctccactttcccctcaaggaactgaggaagaatccctacctctgagaagggggtttaaaagccaaggtgtgaaaaacagggatgaaagagggggttattaacagatgacaaatgatctccttggtattctggaaaataccggaagtaatatgctgcatacctgggaataacgtaataattctgaaaacaacaaggcaggaaacaaaatccggaaagttcagggagatttgtaaagattttagagcatgagtcagaaaactgtgttgaatatgttggagcagggagagggggacgtttcaatttcattacagattaaagaaatgaaacagcacagagatatcagatttcacctatgaaacagggagtggaggtaagatctaatgatgtagaatgtgccatgtcatatattgctggtgggagtgcacttaagagatgatttggaaatacttatcaaatgcctcaaaatatgtgtatttttgacccaatagttctatttatggagttttatcctaagatcataatttacaatatgccagataacttggatagaagaagggtcaatgtgctgttcttaatacctaaagaatggaaacagatccacatgcccatcaatagggaactgtttagaaatgttacagtaatccacacaaacgaaaactgttggcgacatattggtaacagaaagaaagcaaatttgcatatcacagtaccttttttgaaaaaaaaagtataaggaaatatgtctggaagagcgtgtaaaatgttagctgtgcttaaaggctgtgaatgagttttatgttgtcctgtgtttccatattttccaatgtatcaccaatgaatacctattatatgagtaataaagaaaattgaaatattgatttttgaggaaaaaacaaatttctctttctccttaataattgatgagagcagcttctgactcaaaggcaggacaagtcctccaaggaggcgagaatactcatcctgctatgtgactttcatcatggaatgagaatcttgccacatgggtgtcaggtacccatgcataagcatgtccttcagtcaacaacagagagtccacgggtcttaggttcacactggggaatttaactgaaaagtgctgttatcccatgcttggccaatgcctatccaagagaagtgatattcacagaggacagtccaggcggtttgctgaccacttgatcctgcaggtgtgcttagcacgtctttactgcacagtggtaaga

SEQ ID NO: 1879585 - DNA, 4001 bp, Homo sapiens
tgattcattagttagggtggggcaggaacaaatcacaatagtggaatgttatcagttaaggcaggaactggttgtttcacttcttttgtgatttttcagttgctccaggccatctggatgtatacgtgcaggtcacaggggttatgatggcttagcttgggctcagaggcctgacattcctgtcttcctccactgtttaagagttacccaaagcttggtgtccgtgatggtccaaggggcttccgagatgatcaggcagtgtcagtcttcagctgttaagcccaggagatctgagaaggagtcagccagagagccctgggtttttgctccagcaggtctaggagcagctttaatctgagttggacagtcagacttccagtggggtcctgcacaaacaggacaagccttaggaggaatcctgggctgcaggccttccgaggcccagtggccgggcttttggcgtttgaagcaaggtccataaggaggttttgaaggagtgcctggaggctgcagttttgttgttttgaggtttttgtgtgctgtaggcatggctggggtttgtcttacagcaaaggcaagcagttgcagctctgaaatacgttgtcacttggctgtctcttctctattgttaaacaccttgaaggcgaggttaattaagtcttgttgtggggtttgagggctggaatctagtttttggaattttttcctaatgtcgggagcagactggataataaaatgcatattaagaataagacagccttctggcccttctgggtccagggctgtaaagcgtctgagggtagccaccaagcgggccatgaactgagctgggttttcgtccttaccttgggtggcttctttaggtttgtcataattaacaactttgtatgctgcctttttaagcccctcaactaggcaagagaccatgtaatcttgcctagctgtatcttgggagcctgtttggtatccccattggggatcctcctggggaactgccctggtgtcttcttggaggcctggctcaggacgctggcagtcatcagcatgagattgggctagggtataaactctcgctcatctggggagagggtagaagtcaggatgacatttaagtcactccaggttaaattgtaggactgagttaaatattggaattcctgtatatatttagtggggtctgatgagaaagagcctaaatgctgactgatctgggagaggtccaatagggaaaaaagcacatgtaccctgactatgccttcagctccagccacctctctaagaggaaattgttgggcaggtggaggagagctagtcacggaacgaaactgtaagccagaccaggtgtgaggaggggtgtaatagaagggttatagggttggggagcagagactgcggaaaaattgggacccaattcagcctggcaaggagcagccaggggaagaggagagaggtcagaggggtcagtggaaaaggaggatttggaggactctgaacttgggatggagactgaaggagcaaacgggagagaaagaaggaaaatctgggacaagctgcattgggagcagagactagggagagagcgaagtgtaaaaaaggcctggacgtaaggcacctcagaccatttgcccaatttttgacaaaaattatctaggtcttgtaggatagacaaatcaaaagtgccattctctggccacttggaactattgtcaagtttgtactggggtcaagcagtattacagaagaaaataagatgtttaggttttagatcaggtgttagttgaaggggttttaggtttttaggaacacaggctaagggggaagagggaggaatggatggtggaaagttgcccataatggagaaggtaagtttaaagaggaaggtagagacatggagaaatggaggtgggcacctaccaggcttccagtaggcatccttgactgagtcctgggctgtaatgtgagtgaacaggcaaagcaggcatccctgcaattgacctgccaccaagggagtgtgggtgaatgatcaaggcaggcatccccgtggagatcagacaccagtggaatgtgggtgaatgatcaaggcaggcgtccccatggagatcagacaccaatggaatgtgggtgaatgatcaaggcaggcgtccctgctatgatcagacaccaagggaagactgtcttcccaaatccatgaccgatgtcagagtttttgagttcacggataaaatgtgttcctttgtctctactagaaaggaaagagaactgaaattggaaagatagggagattgaagggtagcaagagaggctggagaagagagcaaagagaccgcttacctgagttgaaattggtgagatgttccttgggctggtctgaggacccgaggtcataggtggatctcttcatgaagtgagggtgaggacagggggccaatctctcaaaggagtccccctgtcccgggttctttggcatcaaacgttacgcacatccatgtgaagagaccacctaaccaggctttgtgtgagcaacaaggctgtttattttcacttgggtgcaagtgggctgagtccaaaaacagagtcagcaaagggagataggggtggggcagttttataggatttgggtaggtagtggaaaattagttaaaggtggttatctcttgcgggcaggggtgggggtcacatggtgctcggtggggagctcctgagactctttgtccaggggaggactgtcacaaggttgattcattagttagggtggggcaggaacaaatcacaatggtggaatgtcatcagttaaggcaggaactggctgtttcacttcttttgtggttcttcagttgctccaggccatctggatgtatacgtgcaggtcacaggggttatgatggcttagcctgggctcagaggcctgacagtgagaccatctctaacaaaaataaataattagccaggtgcggtggcacacatctgtggtcccagctactggggtggctgaggtaggaggattgcttgagctcaggaggtggaggctgcagtgagctgtgatcacactactgcactccagcctgggcaagagggagaccttatctcagaaaaacaaacaaaaaacaatgatgcaccctagtcttattgtggcaatccagagagagggtggggaggcaagcagagatgacagaattggaagctactcacatgccttaatgtaactcctcactaagattctcaatctctaggaaggattctaaacttatcaaaagagctgagttctgtgacaggactaatggggacaaaatagaaaaggtttgtacagatcacaggaatctcaggcaagagattatgaggtcataaacccaaggaatctgcagaaattgtgtggaaagtttgaactttcccatcttgtggaattggcaatgctctgaggcaatcatacagaactctctgtggatcaggagggtcctaattggcacctggtttacacagacagcatgtttccaaatcactcatccccctttagttcatcctccacactagcccaagtgcttttcctaaataaagagtgaatattatcatgtcattccccagctttaaaattccttattgtccacaatccaaaatttcttaccctggcatccaacacaagggcttcctctcctcctcacacagggcacactatcaaacatttcattatttcctaaaacactaagccttcccttctgtctgaaataaactttccctttcctctcttttctctgctataaacacctattcattcagaccaaattcaatcatcctttcagattcccctctcctgtgaagttaaccattcccacctgtgttcccccagcaccttgttcagagtactttcacttcctctgcgttccttgcaggaaggactatgtctttttttttttttttttttttttgtgatggagtcttgctctgtcgcccaggctggagtgcagtggcgcgatctcggctcactgcaagctctgcctcctgggttc

SEQ ID NO: 1879586 - DNA, 4001 bp, Homo sapiens
atatttattattgtattcatttttttcttctggttttgaagaagttaaaacatttttgtgggcccctaaaagaatcagaggctctaccagtgtgtacactgtgtctaatggctgggctggccctgctcaggcccactctcagcgagtctgggccccatgggtgccttctgtgggtgccccaccaactctcatcccccaatcccaggagcagccctgtcacttacttgccagctgtacccgggcctgtcggctcaccagccgcccgtagcggttctgggccacgcagtggtactcgtgggcacgggaagggaggctccggcgggaaggcagggcggccaggtgcagggagccatctggcatcagggtgacaccactctcattggctaaggccagcctatcccgctgccaggaaatggacacaggcggctcaccctccacctggcagggcagcaccagtgggtgctcccacacagccactgtgtcccccagctcctgcacgaaggccagctcggagcctgcagcacagcctgtagggacagccagcacagcctgaacacggcggccccctgaggcccaccctttgtccaccacctcccccatggctttgattccctcccagccttggcgaggggcaagggacaggacttgactttagggagactttgggtcagcaaaggaggaacagggaagagagggcagggcctggccatctgaggagcagggcgggccactgtccggctggcgggtgcggtgtgggcctggcgggccggctgtgattgatggcctctttcagctgggccctggcaacggggagggggcggggtgggcacaatggtgaggtcaggggctgaggcgtgagcattgtgctccccaggggacaatgggatcgccccctccctcccccaccggcccatctgcctgtctgcctgcagggtcagcttcccaggactcctggctctcccccttccccctcccgccaccaggaccctggcctctgaatagggaaggaacacacttacactcacacacactcattcacggacacacacacacttggattaaaaatcacaacctcactggccaccaggtcttctagacacagacagattccatcccagatgcacactcaaggaggccccaaacacaggtcacacatagatgtccctacagactcaaagtcacaaatacataagcacagggccacagacactaacagcacaggcccagaaatgcatgagcagagctgtgaacccacagcctcccttcccacacacccccataaatacaataactcagcctgtaaggctgagccaggacccccagcagatggggtggataggcgggcagacagagcctccgaggggcacatgggcagggggctcagccagccttggttggctcagggacatctgtgggtaagcctctggggccctgcctctgcatgccccgcagtctgctcagccacttgcctcacgtggcccccaggtccccttctagccactgtgccccaaagcctgggctcctagagcaccccccacagctctcccgcagccctgcctgcccctcctgctcacccctctcctctgctgtcctcagggtttctccatctccactccggccacctccatccctctgcttccccaaccttgccccgcaactctcccacccctatgcctgcctctttttcttccccgtccctctgccctggctttccctatggcccccatggctcagcctcttaccccagcctgggagcagcagcagcagcagccccatgtccctgccaggcacggcccctcagcctgggcaacttctccagcagccccagtctcctgccttcagcctgggggcccttgggctgtgggcattctccaccccgcactttggcgcacaatgtgggggccctggtcttgctttggggagcccaggttctggggtgccaagctctggggtcgagactgaaggctactgtccttgccttcgtgttcctggagctgggtctctctctgctttcagcctgagccccctccccactcctatccccactgtcccctcctcccagggccaggacccagacaccgagacaattggggcggggaaagggggcgagggccaatgagagcggggcaaagttggggggtcagacccgcccctttctcagcttccagaaatctctcccagcccattacccaccccttactccctctcaaactttgactgaatgagagtgaagttctaggaggagttggggcatctggtcccccaagcccatccctggggatccatgtcctggacaggggtggcttgaagtctaatttgggggtcctggggaggggtgcagagcccccactctcctagtagagtcaccgtcccaggtgctgagcctgggcctgaagtgggggacctcatcccattagttcagtcccagcccagcagccccagcaccattcatagtgtcaatttccaaagctgttttctctattcttattgggacaatggattggggccaccaggggccgggaggctgccagccagtgggaggtggaggaccagccccatcctaaagagaagaaagaaacccaggcctcccgccccttgccaggctgaccacttaaaacatgcaaaaagagggactacccttccaccaaaggagactgggactcaggcaagagctgactttgagacttgctatttctggaggataccctcccctaaacgccaccctcctgaaaaagagcatagcttaggaaagatgacaggggtaccagggatgtatgggagtatctgtgagagacaataagggggaaggctgggctgggggagtctcgtgtggcagagaatgaggccccatcacccagcttccaaccctaggagctccagcctgtctggcccctgactcagtctccccctgaatcccggtccccttgcccactcctgtcagcctctgcatctggccttgccctgcccacttgaggctgccccttgcctcttcagcacaaactctcaccctcagtcttcgcccccgcttgctcagctgcctctccggcttgtcccaccttgctcacaggcttcagaatcaactcaggccattgtccctcccaactcagcctcctcctctcagacagcagtccttggtgtctgtgtcccaggacggggctacccctagcagagacctccatgggacaggagagcgagcagcctcccctcggggcctcctcgtcccagccctgcatctctctgtcccggagcctcctatgagggttcccgctgcttccccagaggggcctcctgagtcatggcggtggcctgggtagggaaaggcgcataggccctggggtcagatgtggaacaaatcactagctgcgtgtccttgcataggcaaatttacctttctttttttctttttcttttcttttttttttttttttttgagacagagtctcacactgttgcccgggatggagtgcagtggcgtgatctcagctcactgcaacctccgcctctgggtgcaagtgattctcctgtctcagtcccccgagtagctgggattacaggtgcccgccaccatgcccggctaatgttttgtatttttattagaggcgggatttctccatgttggccaggctgttcttaaactcctgacttcaggtgatccgcccaccttggcctcccaaagtgctgggattacaggcatgagccaccacgcccggctggattagtgaccttataagagaaggagagatctctccacgtgcacataccaaggaaaggcgcgtggtgactccacgggaactcaggcctctgcaagccagggaggggcccaatcgccgggaacgggattggccagcaccttcaagcttggactttccagcctccagtactgtgagaaataaagtcctgttgtttaagccatgtagtgtctggtgttgtggcagcccgagctgactcagacgccccatctcccggccagcttcccctgctgctgtcagaactgcccactc

SEQ ID NO: 1879587 - DNA, 4001 bp, Homo sapiens
acattttgtgcatatgaaagaagatagtggacaggcccattgtcgtcggctttgtccgccttggcgaactggagacggaagctagattcaccttcgacagccacgggaggaccgggaggacctccagaggaggttaggtcgacctcatggtaactttagatcctgaaaactcacaggatttttcttgtcttccctttgatctctcttccgcctactcaacaggacaggactcaccgcctttctttcccgtcagaaagggatcccttccggacaggacagaagtgagcagatggtttcccctacgtgtctttccgggcctgggcgtctcaggagctcaggctgacctgagacctaactcctggcaagtgggaccagcaggagcctggaagagcgcgcgcaccggggtggaggttgggcgccgggggtggagaaccgcagtcaaatcctcttcttccccgcgcaccgcgcacctgcccccggggatgccgaacgaattggcccataaagcttctctgcaacggaaagaagcctgaagctccaggaggtgcgagaggagcctcgttgagcgagcccagccctctgcccggctggccctggtcaacaggctcggaagaggccgatttggaggacagaacggaagacaagacctaaaggtttcgaatctcatgatgtggagatgttaaagcctaaatcctaaggtccgactgtgagggggagcgagggtgtctcgagctggatccacccttgagccttcacctggagagtcctctgcacaagttcagagagaaggactacgcgcagcaatggttctcaacagggggcaacttggccctcacatgcctctcccaaccccgctgggacactaggccgcggctgggggaagcgggagggagaatgttatccccctggcatgtgtctagtcagcggaggagacagatgctgctaaacaccttgcaatccacggcgggagggcccctcccccaccccgaagtagccattcggcagaggtggagaaactcgcgtgtagatcaatgcccacgcacttggccgacggaaatcacgaattggtgaccaattggatcttggatctgaggaaaaagctccagcttcagagggaactctcgaagttttgcccagagcaaacggaggggttgcgttgccatcgcctaaaatgggaaaatggcaggcgtcacaggttgcaggggaaggttggagaccagttgagtgccccggagccttcctggaaagagtttcctatccagcccgtctcggtttccgcatccgtctgattccttatgatgttgagggtgccggggtctgggtcctttatgatgcagagggtgcccctgtctcacctcgggcgcctccccgctcccgcctcctcctggcaacctggtgggcggctccggacccggcgacccgcgaccatcttgtcagttgctgccgcctcgcaaagggcatctctaggccagtggtgagctgcggccgcgtggccgcaactcgctccagtactcaggactccctcgtggagtccttggtgtgtcgcctgcaggttctttttttgaagaaagcagggagtgaacggccttgtgagacgactccaggagcaaagggcgactctcacaagacccaagtcctcctagagcacaggaaagtgtcgcttcaggtcgaagaagggagagaaagcagctttccgcatctgcatggttgtctagtggctaggattcggtgctgaaagcgccacggcccgggttcgattcccggtcagggaattgttttgcactggccgccctcccgcagaaatcttcctttaccacgctgtcagccggcctgctccaagggccagatgtagaacagcctccgcagcgaggggcaaacccgggcaaaggagggcaagtcgtggtgggccacctctcacgtttatctccgtgtctgtcatccgcagaagcggctttagagagcgactgagcgtctcgctcaggtgtacacagccgtgcagagaggccagtccccgtggagctgcacttaataagcgcaccctctttgccgtcgccgccccagaggtgcctatcgggctgagctgtgaataactaagagagaggccaagccaagtcatggcgtttgtgcgtgccctggacgtgggcaccggtcagtcagcggagcctcctcacctccgttcgcagctaacatgctcgttaggccttcggaagaggcgaccggaggcgatgcccgcgaagttgggaggggagtgagcggcgggtgaggtcctcaagggcggtcccttttgctgattgagcggtagagggaggcgatgttcgctgacccaacaaagacagcaggtggagtaggcacaaacggaaaactgttgccagtgccctaagcagaatgcaggtgtaaaaatcagcactaggacgtcaaagcgatggtaccacagtcaaatcccacaatgtctacactctaccaagcacttgcgcacgctcccccttttccattcagtattcccaagaggggtttggaagaaccccgcgtccactgtaagctcaggggagagcgggagccagggaggtgaagtgcacagactggacagaggcggcgggcagaaccgcgggggtgagagggcgcgtggttgcggggcgggagccactgctgaaaggcggcctgggttgtcgtgtggggtgactgtcggtggaatctttggcagagagtggtttggaagaatggcgaagggggcagtgggtagggtggtgaacctgagcgtccgaccagggcgaggacgctgtgctgtccctgcagggcatgcgctcattcccacttacctggcaggaaagagaccgtggtcacgaagggggttctcccagagtgaagcttcttcatcgcactctagagttgctgatctctgtgatttcttcaatgtgggaaacggtgtttgtgctagaagagggctgcgctctctacctaacataaacggggttcaaaactgacatcgcctcacgcctacccgaaaacgtttacgtggcttccttgtctctttgttttttctgtcctaaagtcgccttatcctcacaccccctcatgtttttcttccacactcgagagtgtctctccgtctcattaaaagccccaccaaatatttgaaatatctcaaccagaaaggctgcaatgaatacagtatttcatttgtggaagctacagaccagctaggttgagagttgcttgatattttctgctaaaccgtgaggcatagagcacttggaaggtttctctttgggcctttgtttgtgtactattgggtttccttcttttccccagaccgtatggcgctgtggggccagcggtaaaccctgctttctggctgcagataaaggccgcagctggtgcaggaattaaaagcaaaccaaaagactcgtgggttcgccccagtgggtccaagatagagtctgactgtaccaggattcagattagaacagaggttgctgcaggcacaaggcagggtactaaccactatagaatcccaatgcgccccacacctactgcccgtcgttttgcttccccacccctcttttatttatttatgcattttttttgagagacagaatttcgctttgtcgcccaggctggagggcagtggcgcgatctcggctcactgccacctctgcctctcaggttcaagcgattctcctgcctcagcctcctgagtagctgggactacaagcgtcgccaccacacccagctaatttttgtatttttagtagagacgggctttcaccatgttggcccggctggtctcgaactcctgacttcaagtgagtgatccacccacctcggcctcccaaagtgctgggattacaggcgtgagccactgcgcccggtcccccgattttttttttaatgtaaaaacatttatgcgatttttacgtgtttattcttgggcagctacaggttcttgtgattttccctcacgtcttctccagtccattctgatacgtgtcccatcttctctg

SEQ ID NO: 1879588 - DNA, 4001 bp, Homo sapiens
acattttgtgcatatgaaagaagatagtggacaggcccattgtcgtcggctttgtccgccttggcgaactggagacggaagctagattcaccttcgacagccacgggaggaccgggaggacctccagaggaggttaggtcgacctcatggtaactttagatcctgaaaactcacaggatttttcttgtcttccctttgatctctcttccgcctactcaacaggacaggactcaccgcctttctttcccgtcagaaagggatcccttccggacaggacagaagtgagcagatggtttcccctacgtgtctttccgggcctgggcgtctcaggagctcaggctgacctgagacctaactcctggcaagtgggaccagcaggagcctggaagagcgcgcgcaccggggtggaggttgggcgccgggggtggagaaccgcagtcaaatcctcttcttccccgcgcaccgcgcacctgcccccggggatgccgaacgaattggcccataaagcttctctgcaacggaaagaagcctgaagctccaggaggtgcgagaggagcctcgttgagcgagcccagccctctgcccggctggccctggtcaacaggctcggaagaggccgatttggaggacagaacggaagacaagacctaaaggtttcgaatctcatgatgtggagatgttaaagcctaaatcctaaggtccgactgtgagggggagcgagggtgtctcgagctggatccacccttgagccttcacctggagagtcctctgcacaagttcagagagaaggactacgcgcagcaatggttctcaacagggggcaacttcgccctcacatgcctctcccaaccccgctgggacactaggccgcggctgggggaagcgggagggagaatgttatccccctggcatgtgtctagtcagcggaggagacagatgctgctaaacaccttgcaatccacggcgggagggcccctcccccaccccgaagtagccattcggcagaggtggagaaactcgcgtgtagatcaatgcccacgcacttggccgacggaaatcacgaattggtgaccaattggatcttggatctgaggaaaaagctccagcttcagagggaactctcgaagttttgcccagagcaaacggaggggttgcgttgccatcgcctaaaatgggaaaatggcaggcgtcacaggttgcaggggaaggttggagaccagttgagtgccccggagccttcctggaaagagtttcctatccagcccgtctcggtttccgcatccgtctgattccttatgatgttgagggtgccggggtctgggtcctttatgatgcagagggtgcccctgtctcacctcgggcgcctccccgctcccgcctcctcctggcaacctggtgggcggctccggacccggcgacccgcgaccatcttgtcagttgctgccgcctcgcaaagggcatctctaggccagtggtgagctgcggccgcgtggccgcaactcgctccagtactcaggactccctcgtggagtccttggtgtgtcgcctgcaggttctttttttgaagaaagcagggagtgaacggccttgtgagacgactccaggagcaaagggcgactctcacaagacccaagtcctcctagagcacaggaaagtgtcgcttcaggtcgaagaagggagagaaagcagctttccgcatctgcatggttgtctagtggctaggattcggtgctgaaagcgccacggcccgggttcgattcccggtcagggaattgttttgcactggccgccctcccgcagaaatcttcctttaccacgctgtcagccggcctgctccaagggccagatgtagaacagcctccgcagcgaggggcaaacccgggcaaaggagggcaagtcgtggtgggccacctctcacgtttatctccgtgtctgtcatccgcagaagcggctttagagagcgactgagcgtctcgctcaggtgtacacagccgtgcagagaggccagtccccgtggagctgcacttaataagcgcaccctctttgccgtcgccgccccagaggtgcctatcgggctgagctgtgaataactaagagagaggccaagccaagtcatggcgtttgtgcgtgccctggacgtgggcaccggtcagtcagcggagcctcctcacctccgttcgcagctaacatgctcgttaggccttcggaagaggcgaccggaggcgatgcccgcgaagttgggaggggagtgagcggcgggtgaggtcctcaagggcggtcccttttgctgattgagcggtagagggaggcgatgttcgctgacccaacaaagacagcaggtggagtaggcacaaacggaaaactgttgccagtgccctaagcagaatgcaggtgtaaaaatcagcactaggacgtcaaagcgatggtaccacagtcaaatcccacaatgtctacactctaccaagcacttgcgcacgctcccccttttccattcagtattcccaagaggggtttggaagaaccccgcgtccactgtaagctcaggggagagcgggagccagggaggtgaagtgcacagactggacagaggcggcgggcagaaccgcgggggtgagagggcgcgtggttgcggggcgggagccactgctgaaaggcggcctgcgttgtcgtgtggggtgactgtcggtggaatctttggcagagagtggtttggaagaatggcgaagggggcagtgggtagggtggtgaccctgagcgtccgaccagggcgaggacgctgtgctgtccctgcagggcatgcgctcattcccacttacctggcaggaaagagaccgtggtcacgaagggggttctcccagagtgaagcttcttcatcgcactctagagttgctgatctctgtgatttcttcaatgtgggaaacggtgtttgtgctagaagagggctgcgctctctacctaacataaacggggttcaaaactgacatcgcctcacgcctacccgaaaacgtttacgtggcttccttgtctctttgttttttctgtcctaaagtcgccttatcctcacaccccctcatgtttttctttcacactcgagagtgtctctccgtctcattaaaagctccaccaaatatttgaaatatctcaaccagaaaggctgcaatgaatacagtatttcatttgtggaagctacagaccagctaggttgagagttgcttgatattttctgctaaaccgtgaggcatagagcacttggaaggtttctctttgggcctttgtttgtgtactattgggtttccttcttttccccagaccgtatggcgctgtggggccagcggtaaaccctgctttctggctgcagataaaggccgcagctggtgcaggaattaaaagcaaaccaaaagactcgtgggttcgccccagtgggtccaagatagagtctgactgtaccaggattcagattagaacagaggttgctgcaggcacaaggcagggtactaaccactatagaatcccaatgcgccccacacctactgcccgtcgttttgcttccccacccctcttttatttatttatgcattttttttgagagacagaatttcgctttgtcgcccaggctggagggcagtggcgcgatctcggctcactgccacctctgcctctcaggttcaagcgattctcctgcctcagcctcctgagtagctgggactacaagcgtcgccaccacacccagctaatttttgtatttttagtagagacgggctttcaccatgttggcccggctggtctcgaactcctgacttcaagtgagtgatccacccacctcggcctcccaaagtgctgggattacaggcgtgagccactgcgcccggtcccccgatttttttttaatgtaaaaacatttatgcgatttttacgtgtttattcttgggcagctacaggttcttgtgattttccctcacgtcttctccagtccattctgatacgtgtcccatcttctctgc

SEQ ID NO: 1879589 - DNA, 4001 bp, Homo sapiens
tgatttcctcaagtcattggaaccaactgacagaagccttgattattttggcttttcccaatcctgcaatctgagaataagcaaaacaccaagaaagaaataaaggcaaaaagaaggaagggagaaagagaggaaaggaggaagggaaggagggagagaatggaaggcaggagagaagaaagggagggagggagggagagacaaccaaattcatataagaaattcattaagagcgatgttaagtgtgaaccatgtaccatctgcatcagagtcaccctaggtgcgtcataacaagacagaccctctgaagcagggtttgggaatctgaactgtgagcagtccctcagaggatgcttaggcactctgaagtcagaggcccactagtctggacactgcctaaggccagtccatgtgctcagacctctgcatctgctgctacatctccagctaccaaactacctaataatctcacatacagaagactggtcctaaggtgagacaaagtcccaagtcatcagataaagaggaacttatgttcacaatttgtcgtgggctttggagtgaggcagactccaatggaaagcccagttctccttcttcctagcagagactttagggaaattacttaaacccactgaacgtcagggtcctcatctgtaaaatcctcataggatggttgggagggtgatcaggtaggaaccatggctttctctaagctgccttttatttgctgacttttgagaggggacgtcttactcaggcacagtcacatgtgcctgtagccctagctactttggaggccaaggcaggaggatagtttgagtccaggagttcaagactgcagtgtgctgtaactgtgcctatgaatagccactgcttaggcaacacagtgaaaccccatctctaaaagaaaaaaaaaaaaagaccagacatcttagaaagattcttcaaatcctaaccctagttagacattagacattgaatgcctctcctagacttgactaatggagaaaaaatgcctttaagtgtttcatctgtttcatcttactcattcctcagaacattctgctgacatcaacagcctccaggcctttgcacatgcatgtctttctttatgaaatacacacacacatgcacacatgtctctacaccctgcttattctataaatccatattcatccttcaacttcttgctcaagtatcacttctattttaaaatttcccagacaccacagcctgccccaactcacccattctcactgcagtgacggctcccagaacctgaacaaaccacaagtctgatcttgccgcactgtgatgactgatcttctggtttctccccaacaaccatgggttccccaaaaagcaatactttgtaaccctagcacttgctatcatgcctaatgtctagcaagtacgcacaatttgttgcgttaatatattccacatgtagcttcttctccgagaaaacaccaaatggcggatgacgccggcgcagccggcattgggttgcggggggagtcccggaggccccggggccctgggatggggaaccatggtggcttccgtggaggtttcggcagtggcatccgaggccggggtcactgccgtggaccaggctggggccgaagccacggagctcgcggaggcaaggccaaggataaggagtggatgcccgtcagcaagctgggctgcctggtcaagcacatgaagatcacttccctggaggagatctgtctcttctccctgcccatcacggaatctgagatcattgattttttcctggggggcctctctcgaggcctaggttttgaagattatgccggtgcagaagcagaccggagccggccagcgaaccaggttcaaggcgtttgtggccattgcgggctacaacggtcacgtcggtctgggtgttaagtgctccaaggaggtggccactgccatccacagggccatcatcctggcctagctctccattgtccccatgcgcagaggttactaggggaacaagatcggcaagccctacaccatccgttgcaaggtgacgggctgctgcggctccgtgctcgtgcgcctcatccgcgtgcccagaggcaccggtatcgtctcggcgcctgtgcccaagaagttgctcatgatggctggtatcgatgactgctacacctcagccaggggctgcactgccactctgagcaacttcgccaaggccacctttgatgccatctctaagacctacagctacctgacccctgacctctggaggacggctgtattcaccaagtgtccctatcaagaattcactgaccacctcgccaagacccacaccagagtctccgtgcagaggacccaggctccagctgtagctacaacatagggtttttatacaagaaaaagaaagttaattaagcctgtaaaatatacatacatatatgtgtgtgtatatatacatattatatatgtatatatgtgtgtgtatatacattatatatatgtatatatgtgtgtatatatacatatatacgtatatatgtgtgtatatatacatatatacgtatatatgtgtgtatatatacatatatacgtatatgtgtctatatacatatatacgtatatgtgtgtgtatacatatatacgtatgtatgtgtgtatacatatatacgtatgtgtgtgtatacatatatacgtatgtatgtgtgtatacatctatacgtatgtatgtgtgtgtatacatctatacgtatgtatgtgtgtatacatatatacgtgtatacgtatacacatatgtatatgtgtatacatatacacatatatgtgtatgtatgtgtatacatatacacatatatgtgtatgtatgtgtatacatatacacatatatgtgtatgtatgtgtatacatatacacatatatgtgtatgtatgtgtatacatatacacatatatgtgtatgtatgtgtatacatatacacatatatgtgtatgtatgtgtatacatatacacatatatgtgtatgtatgtgtatacatatacacatatatgtgtatgtatgtgtatatgtatgtatatatacacatatacatacatgcatgtatatatgtatgtatatgtatacatatatacatacattgtatatacgtatacatatacacacatatatgtatatacgtatacatatacacacatatatgtatatacgtatacatatacacacatacatacatatatacacatacatacatatatacacatacatacatacatatatgtatatgtgtatatatacatatatgtgtatatattccaactgtaaaatatacatatatgtgtgtatatatatattccacctgtaatatatatatacattccacctgtaaaatataaaattatgacactgatttttaaagtgttatataacttactcatactgttgttttcaaaagccagcttaagccagagggggaaaaaaaataatcacactagtttggtcttctcttttaatctgaatcagaattacttggctttatcccctacctaattcattagatgtggctctgaattgtagaatccacctcataagcggaagatttgccgccatgaagaatattaagaagactccctctgacttcagaggcaattcaagtcagtgcaatgaacactaagctaagtactgaaattctacaaaaaggatccttccaaaaacacagcctctctgatggaaccagagctctcctccaaaggtgctaacttcttgttaggctggcaggctcttccccagaccgtctcttggtgtgtgtgtttttaccataattctaacacaaagagtaagagtcccatttctacccgtgggtgctacccaagcttacctcgctgccccaagcccaaagtgtctcctttatggatcactgcccatgcccttccccgtgcctgagtttagctttacattcaagccattgatggtaatttctcaaaattctactcaattaatagctaccatttactgagtg

SEQ ID NO: 1879590 - DNA, 4001 bp, Homo sapiens
tttaaactgaaggagtaatagcgccctttgtagaaacaaaagatttctacaaagaaaagtaaagtctccctcctactccagaccctcgcacacctcttcagggcaatcctagtaacaatttcccgtgtatttgtcaagaaagtttccatgaaaatatattttttaaatgtacatactcataaatacaaacatttttaaaaccacaaatggtagcgtattatacacattattttatgccttatgaagttttatttcccattttaatacaatgaagatgtctacacattacaatattgtggatttttatgctttacaattgagcttcttccttcgagtttctttgatctaatcaagagatagaaggcctccagcttcacattcctcacgattatttacaaaaagaaggatggctcagccaaggctaaatttaggttacagtccctaatcttaacacagtttttaagtttaggtttcagcttttgggatattattgttaccttgaaaaatgtcacgtttaaaaacacctcacaccctctactatagattggatcttgggaaatagggttgaggaccggatcaatacaagaatcctcataacctccgccccggcgcgaacctgggagggctgcagacagtctaaaggctgtggtgacctcagcgctgcgtccctccagcaaccggcgagtgctggggcacaggccatacccccctaagctcggcatcgcctgcacctctcacaggtgctctgtccgccacagtaacgcactatggaaaggaaagttgtacggcgaacgactgaaggagccaaacgaggtggatctggagcggccgcaaggtgcctgtgctgctggcttttaacacacaataagagtgccaagggatacaagaagccacagggggaaaaacaagtgacatatctgcatggagcctaaatttcgcttggtgattttcagggtagaagcattacatattaaaaacactgctattttaggggaatacagaatttaaaaatccacacagattcgcaacataaaacatgccgcccaaagacacgtccgcggtgtcccgacagttccggctccgcccgcgggccacgaggcggggagcgacggtcactcccctcggttacccggagtacttgggcgggaacgggtagctcgcgggagagacgggctcctgggcgagggctgcgtcttagtcgccctgcttcttagctctcgaggtcccgcgtgttacgtgttagcaccgcccgggggcgtcagcatgacccgaggctgcaggaaccgtgaactctctgccccgcgggcccaggtgaccgcgggcggcgctctcccgcgcgcggggggcggggctccccccggctgttcactcagctaccacagcgacgtaaaatggtgtccgctaggcgtcccaggacggcttcctgagggactggagggccccgacagccggaaagcctgccccgccccttggccggcacaggtacgacggcggggagctcagaagtttcgaactccaagggccgaagcacagccaaacaccccacggaacttaacaaatgtttgtggggagaacgccgaaaacgcggggaggcggggctggcgcacagtcaccctctcgcgacatctaagtgacgtcgcacagcaagcacgtgttctagtctttcaccttcagtcagcctcctccgttatacaggcctacccctttaagcgagtgatggacagttatttcagcctatcaacttccttgccgacatccaatcagatttaaacttcttttagccgccggaggagttggaaaaagggggtcgaaagagggagcttaccgtctctcgcgatatcgctgtgagcctgcctctctggaaaaaacgccgaaactgatggcccgacctcccaaatagtggtttaaaggacgggtttataagccaatgaaagggataaggaggtgggttgctgctgtcactgagcaagaagtaccgttacagggcagactttttgtccaatcaacacctcaacactttgggtcacgtgaccgcagagtgcgaggggcggagctacagtctggcgcgaggaaccgttaagatagacaacaaatgtaaccaatgaggtactccgactagggggttgggaacccaataacagtggttgggcgggcgccttcctggagcgcggggagatgtaaagatagacaaataattttcccaatgagactgtagaagagagagcaattggccaatgaggactgcggggcgggaccctgtgccgcggcggagtccaagatggcggcgtgcggttccgctgtgtgaaacgagcgcggggcggcgggttactcagctccgcggagacgacctccgacgacccgcaacaatgaagggaaaagagcgctcgccagtgaaggccaaacgctcccgtggtggtgaggactcgacttcccgcggtgagcggagcaagaagttagggggctctggtggcagcaatgggagcagcagcggaaagaccgatagcggcggtgggtcgcggcggagtctccacctggacaagtccagcagtcgaggtggcagccgcgagtatgataccggtgggggcagctccagtagccgcttgcatagttatagctccccgagcaccaaaaattcttcgggcgggggcgaatcgcgcagcagctcccggggtggaggcggggagtcacgttcctctggggccgcctcctcagctcccggcggcggggacggcgcggaatacaagactctgaagataagcgagttggggtcccagcttagtgacgaagcggtggaggacggcctgtttcatgagttcaaacgcttcggtgatgtaagtgtgaaaatcagtcatctgtcgggttctggcagcggggatgagcgggtagcctttgtgaacttccggcggccagaggacgcgcgggcggccaagcatgccagaggccgcctggtgctctatgaccggcctctgaagatagaagctgtgtatgtgagccggcgccgcagccgctcccctttagacaaagatacttatcctccatcagccagtgtggtcggggcctctgtaggtggtcaccggcacccccctggaggtggtggaggccagagatcactttcccctggtggcgctgctttgggatacagagactaccggctgcagcagttggctcttggccgcctgccccctccacctccgccaccattgcctcgagacctggagagagaaagagactacccgttctatgagagagtgcgccctgcatacagtcttgagccaagggtgggagctggagcaggtgctgctcctttcagagaagtggatgagatttcacccgaggatgatcagcgagctaaccggacgctcttcttgggcaacctagacatcactgtaacggagagtgatttaagaagggcgtttgatcgctttggagtcatcacagaagtagatatcaagaggccttctcgcggccagactagtacttacggctttctcaaatttgagaacttagatatgtctcaccgggccaaattagcaatgtctggcaaaattataattcggaatcctatcaaaattggttatggtaaagctacacccaccacccgcctctgggtgggaggcctgggaccttgggttcctcttgctgccctggcacgagaatttgatcgatttggcaccatacgcaccatagactaccgaaaaggtgatagttgggcatatatccagtatgaaagcctggatgcagcgcatgctgcctggacccatatgcggggcttcccacttggtggcccagatcgacgccttagagtagactttgccgacaccgaacatcgttaccagcagcagtatctgcagcctctgcccttgactcattatgagctggtgacagatgcttttggacatcgggcaccagaccctttgaggggtgctcgggataggacaccacccttactatacagagatcgtgatagggacctttatcctgactctgattgggtgccaccc

SEQ ID NO: 1879591 - DNA, 4001 bp, Homo sapiens
ggcagtcccaggacctgtggggtgggttacttcctctggggttggggtgggggctgcagcgctcaggagaaaggatgctgccgctgacttcagagaaagcccagcggaggaggagccagagggggctggagacctcatctgaagcgtggggtaggggtggggcggaggagggtgggctggatctcagtggtgtctgccccagggtggggctgggcaccgcttttctgagcctcgctgaaacagcgcgctgcgccttggtttcaggaatgaccaggggagcatgctcacgctgagggccattgatctgtcgtactacacaggctccctgcactggatacccatgactgcaagaatactggcagttcactgtggacaggtgggtgagcggccacactgtgtgggcctcagccagaggctgatccagctgtggggatgtgagggcccgggcgtcagcccaccacactctgaggactgcagcacagtagctggtaagaccacccatgagaagctgaactagacacttccaaggttggtgacctttgtcggtgctagtgccacatattctacctgtgctttatgaacaagaccagctgcctttctggggcatctactgcctgctaggcgctgtgctgaacgattatatgactgtctcatttattcctcactgagacaccatgaggtgggtgctactattaccccactttataatggactaacattgagtttgaacctcaggaccacctcttgaggaagtcaaagaaggggttattaatgtacccattttgtagaagggaagcctgagtacacaaaggttgggtaacttgctggagacacacagcaagtaaatggcagagcaaaaacttgaaaccagatctcaggcaaccagtatgctactcgctctactccttaatgtgggtgaatttgttgttttattgaagtttctgtcccatggaaagtgggatgtcctcaatttagccactgaattggaagaaaatggttttaggttttttctctgggctcagaaagtactggggcctccaggaaggggccccagggaaggggctgagggctgggggccttccctccctactgcagatcctggcaggggagggtaggaaggacctggggagggagggctggatgaggccatcttgcatacctttggaagtgtcatcattgacggcgtggtggtggcctgtgacggtggctgtcaggccatcctggacaccggcacctccctgctggtggggcctggcggcaacatcctcaacatccagcaggccattggagccactgcgggccagtacaatgaggtgaggtcaggccccaccgccccacaaggttgccttgaagtgggggccccttcacacaaacgagatgatgcaggggtggttagggagcccgtttcccagccgaggttggggtttctccggaggcctctgctggggcctttggctttggcttcattgccgtgggagcctccatgcctcaggtagcggctgccgtctgacctcctgttcctctgggagtggtgccctccctgacgcgctggactgtgctgtgccccttcttcctcctccacccccgagtctgttcttctccccttgacagccaaatgctcccagcatccctgtgagctctggctgggcctagatggggagacacagaggcaacccccttgggtcccaagcttgggtctgtccctgggttgatgacagctatgactcttttgagaaccatgtctcaggaccaggcctcaccctgagagcctccctgtggtcctaggtgtaggcagggccctctccccaccccatggctcatggggtggcaggaggggttctgggcccttccggaaccccttcagtcagcttacttactcgccgcttctaagagggcctcccttggttctttagtttgacatcgactgcgggcgcctgagcagcattcccacggctgtcttcgagatccacggcaagaagtaccccctgccaccctccgcctataccagccaggtatgagtctcagaggggaagcccgggctcctcctcctccttcttcttcaccagcttcctcccccaccccccagttgggcccctggtgaggcagtgatggtggtgataagaagtggtatggactccacagagaatggaggggcatgcgtttggaccaaccggcctttctgagtgggccatgttgtcctggggcctcatttgtggccacttcagcctcatcctgggaaaaatggggaacaggaggggcggtgtgccaaggtgtcagggagggtggggtaggcaggtccacatctccctatgggaacctccctccgctgctcaagcttctaagtcccggggcctagagctctgtgcagggtttgcttagctagcctgggctttgtggggctcagcccttggccccactgaccactgacctccaccccccaggcctgctctggctggtcatcagggcagtaggtgctgagagcaggaggcaggggctggggaggacgagagatggggagtggagtccagtgcagaggacaggactcaggatgccagaaccccacccggtgatcctagattatgtcattttattttttgaatctgaatttcttcatctgttgagagatgaatccaatacttgtttatctgggaaggtcatttcaaggataaaatgacgtcacagaagaggaggagttgtgggtgaggtataaacgcctatctttaggcacagcaaatgggattgggaccagcgtcatctctgccttgccttccccaggaccagggcttctgcaccagtggtttccagggtgactatagttcccagcagtggatcctggggaatgtcttcatctgggagtattacagtgtctttgacaggaccaataaccgtgtggggctggcgaaggctgtctgattgcatcactggccatggacctcaatgtgaccaaacacacacacgcacatagatgagatgtgcaggcagatggttcccaataaacaccgcatttctgcaaagcctgacttcccttgttgtcactggggctgaagctctgcgccgttgtgggggtggatgtgactgccaggtggtgtgtgggcacagcaggaactacatggtgggaagggttggtgggtggaggctacctggagggcaatgactatttcaagctcaggtcagggaagaccaaggcgtgccttacctacctgtccttcactctagagctttctgggcaaagggcacaagaggggagaccctcgcacgataagacccatttgttcctggggaatgagaggtaagggcatggtggtgtggggatgtaaagggaacacttggcccctggagaggaaggttctgctgtattaagagaggggcctcagtgctgttggaagaagccagatgaaagagtgagcagggagcatggggaaagatctgagtcctaggctgccatccaccctgggggagagccacagtccagactcccatcctcaggctcaggggctcaggccctggcagtggtcagagcggtgccattgccgatggcaggttcgtgttaacctggctttcagaggctgatgtgtcaaagccagatgccagtgttcagagttcctgtgagtgcccaggctcacagagccctgcacattctcctgggagagagccacgcaggaaatccaaatattaccgggtcacacaaggggattcaggtggctttaggaagtttttctcagtgatgctactctaaggcccctcagctaccttgggagggaggtggacagctcttggggagatcacagtgcttggagtcctcttggcagactccttggacagtgctctgctgggagctgcatgcgtctgctctccagccctcctccctttttctttgcaccccctgccttagatagtctttttcccatcgggggaagacaattgaccaggcctttgttttctatgtcatagctagccttgtcccctctgcttcacccaccccaaatatagtgatcggactt

SEQ ID NO: 1879592 - DNA, 4001 bp, Homo sapiens
cacagataggtaagaggaacagctagatatttaaaaggtagatattttggaggagatctgttttctttggggaagggtcttactctgttgcccaggctggagcagtggtgccatgatcgctcactccagtcttgaactcctggcctcaagcaatcctccacctcagtctcttgagtagtcaggactacacgcttgtgccaccatgctcggctaatttttaaaaatattttgtagagacagagtctcactatgttgcccaggctggtcttgaactcctggcctcaagcgatcctcctgccacggtctcccaaagtgttgagattacaggtgtgagtcctgtgcctggccagaggtttgtcagtcttatcatctatgaattaattcaatagacatcacgaccacatttccaaaacaaacatcaggaattatgatgtgacaagtcaaaatgcattggttggggacagaatcttttaaatagaaattgtcccataaaatttgagacgtatagtttctgtacctaaatgaccattcagtgatcttggaaatctatagtgctgctcgtcaccaactcctgatatgtttcaattctgtttgcaatggacaataataaaataatatgtgagtgtggcctcaggtattctgagtttgggcactgctgtttccatctgaggaccaagacctacacatctcagtagcactgaaaaagtgaacaaactggtatagagtgccagaaaacttgatcagaatacattatatatactctaaacctgaaaaccacactccctaatattgcgctggtgagctggcaggtaaaggaaaaaacattgagaaagacagcagcccccagaagagaaacaatcctaaaagaaatgtccaaattgccaattactttctgtttgtcaaagtctctactggaggtgcatggaagtttggtgagaagaatgaacctttgtgcaagatccctcagctgacagacctgtgagtgcctctgggtggctgctttgtcttacagaaggcattttgtttcctgacactttttcctgtggcctttgctcttcgtattctgtatgttaggcttctgtttctatcaatatttgtcattaatagcatttacattgctccttcagaatttatttattttgagacagggtctcgctctgttgcccaggcctgagtgcagtggcacgattatagctcactgcaagcttggacccccggggctcaggggatcctcccaccttagccgcccaagtacctggggccacaggcgtgtgccaccacacctggataattttttttttttctgagtttcactcttgtcacccagactggagtgcaatggcatagtctcggctcactgcaacccgtctcccgggttcaagcgattttcccacctcagcctcccaagtagctgggattacaggcgcccgccaccacacccagctaatttttgtatttttagtagagacggggttttaccattttggtcaggctggtctcgaactcctgacctcaggtgatctgcccgccttggcctcccaaagtgctaggattacaggcgtgagccaccgcgcccggcccaatttttattatttttattttatttttttatagacacgggatctctctctgttgcccgcaaactcctgggctcaagcgatcctccagccttggtgagagccacagcgcccagtctctctttaagaatttaaaaagcagtttcagatcacaatatcatctatctcgttcacagtccccttgctttttactgtcaccctttaaaaagcattatacaattacagaaacggtggtttagcagtgaagtaaccaccaaagactcttggcactccaatcctctgccttcttcaggcgataggattaagaatgggatcctaggatgcttacatgcaatgatgaacccgaaaacacttgcaaagtgctacgcaaatattgatcacgaagaaggaagtcctcttcccgcctggagactgtgtggggtatggcggggtggtggggagaatgtggtgtcttgctccaccctcctggcgaggggagggcctggcctggaccgcagaggaatcgagtgactgcccctaaaatctcctagaaccgatcccgcggccccgcccctcccgcggccccgcccctcccgcggcccgtcagcctctgccgcggagctgcgtccgccactcatgtttctccgagcaggcctggccgcgctctccccgcttcttcgcagtcttcggccctctcctgtcgccgccatgagcactggcaccttcgtcgtgtcgcagccgctcaattaccgcggcggggcccgcgtggagccggcggacgcctccggtaccgagaaagctttcgagccagcaaccggtaactgcaacgagccggggaggctggggcgccctggggccggatgcgcggatttcccggccagcccccgtttcctgtgttctgcagcgttgacttgagcacaagacagtgacagtggagagtctaaggttgtgtgtgtaggcaactagcgattctggggcaacgcgagtgcctccgggcagggatgggtagggaggaaaagcaaagctgatgagttgcgtggtaggatcgtgagttgttttacccgggccagaacagagttcgcaaagtactggtgggggaagtcgtgcctctgttaacttccttttttgtttgttttgtttgtttgtttgttttttgtttgttttgagacagggtctcactctgtcgcccaggctggagtgcaggggcaccatctcagagctcactgcgccctctaccttacgggctcaagtgcttctcccgcctcagcctccctggtagctgggattacaggctcccaccaccatgtccggctaatttttgtatttttagtagagacgggttttcagcatgttactcaggctggtctcgaactcctgagcttaggtgatcctcccgcctcagcctcccaaagtgctgggattacagccgtgagccaccaagcccagccaactgttcccccttttaaaaccaggactgatgtattattgtcttcaaatgtgtgcataggagaggaattctaaaagaacggggcggggttgtggggaagataatcatttgtgctgggaatgaaggaacgctcacagatagtttctaatgactacgaatgaggactttgtctccacattctaatattaaaatatttctgcacattaatcagaattgggaaaggaaaaaaccccacctttattcagtactttcttccccagctttattgaagtataattaacaaataaaaattgtatatacttaaggtgtaaaacgtgttgtaatgtatgtataccttgcaaaatggttaccacggtcaatctaattatccattgcttctgcatagttaatggctttttttggatagtgaaatatttaagatctattcttttagcaaatttcaagtatatgatgcagtattggtaaccatagtcaccatggtctacgtgagctctccacaatttattcatcttgctgaaataaaactttttaatccagtgcttaatgtgtgctaagcactgtgctaggcactggatttactctgggaactctgaaggtcacagagataaggaagaaggggctttttgttttggttttgtgttgtgtttattttgctgggttttatggaatatatgtggggagaaaaatgtaaatattttgtgtaaaatgtagccagagcaataaaactgatttgcaggggactggagaatttagtatttgaccatccacactaaaccacagagcagtgacttggcagagccagaaggcattatcacatctcttctttatataggaggaaacagcttctctaccccgacttaatcctgatacaaaagaaagaaaaattgctctttgctttaattgcctacagtgtgtgtgatcctcagccaccgcctttaccagctggctattcaagtttgtaacagaaattgcagatttgtgaaatctccctggaaaga

SEQ ID NO: 1879593 - DNA, 4001 bp, Homo sapiens
tagcccataagaggtagacagctacttttcatcccaactatgccacttccaataatttaccctgaaaaacatctttaataatgaaaattagatatggacaagatagtcactgaagcatcatttacaagtaatcacaaaatatgtgaaactatctaaatgtccaggtatagaagatcactagaatctattgtagtgtattaagtgtggagttcagcctggctatgaaaaagaagaaagaagatctccgtgaatgatttggagtgagttttaggagatattgttaagtccaaaacgcaaaggacatgcacagtgtactaaatattatgtcagaaaatgggggaaatatacagttatgtatgaagataaacatccacacatatacacacacacttacataaatatacacacacgtgcatacacccatccatacatacctttatgaccattacaaaaggaaacagaggaaggaaaaaccagaaaacaatgaagtcgaatacctacaaaggttgaaaataagggtgaacgatatatgagaaagagtaacaattttttggggttaaacttttccagtgttttgacttttaaattatgtcatatgtatttttaaaggaaaattaaatcaactagaatgagaagggaaaaaataagctggaacaaagcactgtaattatatttcaaaaaaatagctacattgaaaaaagtaagagacagaacgaaaaaaaagaaaaaggaaagaagaaaaagtactttatgaataaaatatttaactatatgccttcagtcttaggtaatcaggagatgacaaatctctaatttgtgtgtgtgtgtgtgtgtgtgtgtgtgtgtgtgtgtgtgtgtgtgtatatatttgtattcatatgaatgaaacagctctgaaaacatttcagatgtcttatcaaattgatctaacaagtaaatgtgttgattttgtctaaagttgggttttcactgagaaagaagagatatatacacatgaaatagagaaaggcaacaagaactccatggggatagactgaaattggtgggataggcgtgaactcatgattctaaaatattcatatatatgtgtacatgcatttatagttatttatgagtctctatgcacatatgtatgtatgtttatgtacatatatataaaagtatatgcacacattttcttccactatctggtaaaaagcctagatgctaagacactccagtaacaatgggaacatatgctcaggtcttattttctaatctctttttattttttctttttttgagaggaagtcttactcttgttacccagactagtgtgcaatggtgcaatctcggctcactgaaacctctgctcccgtgttcaagcaattctcctgcttaagcgtcttgagtggctgggactacaggcatgtggcaccacaccagcctaatttctatatttttagtagcgacggggtttcaccatgttggccaggatggccttgaagtcctgacctcaggcgatcgcccgcctcggcctcccaaagtgctgggattacaggtatgagccactgtgcccagccttagtatcattttttaaaaagaaaccagggctccacaaagaatggtagattccagtcagagtagagtagagacaaaataaacttgaaatatgtccaaaagtaagaaaatactaaaagaaatgatattacctgtcataaggataatagctagtcctaaagtacagatatgggacaatttgagcatgaaaataaagacagcaatcaattgtaaacatttgagtaaaaaagaattcttaaatcttcagcaatcctaaatacatacatgcataaatgagacaggaatactatttcttaccttgaaatgctgagtacttcttgataaatgcagattaagtgatgtcgtttaaatattaggttggtacaaacgtaattgcaggttttgatattaataatcctttttgcaaattaaagactggtgaaagagagaagtatagtcaccaacggttgaaaacttgaggagggaagttctgagcaaaaaaaaaaagagagagagggagatatttgcatgaacttaaagtgtgtttccacagactacaaggaaaagaacagtaactacaaaagaaaaacaagcaactgaaattaatatcactgatgagcaacagacagacatcacatgcctcatgaagtgatgttctgaaaatcacacaacatatcttttatagtattctggctgaaaatatataaacttgtttaaatcatgagattgtatcaaacaaaatcaaattgaagatttgtttttattattaaataaggggggggtggattgggagaactataattgaaaatgtcattgtcgataaaatggccttggaaatacttcaggttaaaatacactagagatacatgacaacttaatgtcatatgtaatctagactggacattgcactggaggagagaaaaagctattaatggacaagctaacaaaattagaatgtaatggcagattacagtactatactgagagtaaacatactgaagttgataactattctgtaattatgcagctgaatgtgtttattcttaggaaatacatatgaaaatatttagagaaacatgttacctgtgactcattctcaaaggttcattttggataaagagaaataagagacacatactaggatagaaaagaagagtgagagagcataaatgttaacttagcaactggtccaaatgttaacattgggtaaatctgagttaagaggacacaggggctctttgcattatttatttttgctatttttttgtatattaaacattattttcaaataaccttttaaaatatgctttaggtcaggcgtggtggctcacgtctgtaatcccggcactttgggaggccgaggcaggcggatcacttgaggccagaagtttgagaccagcctggccaacatggtgaaaacccatctctactaaaagtacaaaattaaccaagcatggtggcaggtgcctgaaatcccagctattaaggaggctgaggcaagagaatcacttgcacctgggaggcagaggttgcagtgagctgagattgcaccgttgaacttcagcctgggagacagagtgagattcggtctaaaaaaaaaaataaaaaaaaaaagagcaaaaaagctttcttagacacataggattatgaggaaatacgctcttctctgtgatcctaaaagagaaaatagatccagagccacattttaattcatttatactattcaagaattttaaaaataaggattttggatccctcctgaccttatattcaatcaatttcctacttgattctctatgttgttaattaattcagataccttatctgaattttgctgtgttttaattacacctcaagtctttctaagagaaaataaaaccaggattctctttttctctcattcattcaataattctgtatatgtgacgattgtgtgcctctaatgatgttatattaagaatttactttctgttcaattatatctttaaaaagctgaaattccttttttagattttttacaaatggtaaaggatgtcacttgtctaacataggatgtgtcatagactctattattttattttattttattttattttgagacagagttttttttttattttttattatgccttaagttttagggtacatgtgcacaacgtgcaggttagttacatatgtatacatgtgccatgttggtgggctgcacccagcaacttgtcatttaacattaggtatatctccaaatgctatccctcccacctccctcaccccccacaacaaggagaacacatggacacaggaaggggaacatcacacactggggcctgttgagacagagtttcactcttgtaacccaggctggagtgcagtggcacgatctcagctcactgacacctccgcctaatgggctcaagtgattctcctgcctcagcctcccaagtagctgggattacaggcgcctg

SEQ ID NO: 1879594 - DNA, 4001 bp, Homo sapiens
gcaccttttcatatacctgtttgccatttgtatgtcttcttttgagaaatgtctattgagatcttttgctcattttttattggattattaaattttttttcccctatagagttgtttgagctccttatgtattctggttattaatcccttgtgggatgggtagtttgcaaatattttctcccattctgtgggttgtctcttcactttgctgactgtattttctctgcagaagctttttaacttgatgtggtcctatttgtccatttttgctttggttgcctgtgtttgtgggatattgctcaaggaatttttccgcagaccaataccctggagattttccccaatgttttcctatagtagtttcatagtttgaggtcttaaatttaaatctttaatccattttgatttgatttgtggatatggtgagagataggggtctagtttcattcctctgcatatggatatctagttttcgcagtatcatttatggaaaagcctgtcttttccccagtatatgttcttggcatcttgtcaaaaatgagttcactgtaggtgtgtggatttgtttctgggttctctattctgttccattggtctatgtgtctgtttttatgccagtaccttgctgttttggttactatagctctgtagtataatttgaagtcaggtaatgtgattccttcagttttattctttttgcttaggatagctttggctattctgggtattttgtggttcaatatatttaggattgtttcttctatttctgtaaagaatgccattggtatttttgtaggaattgcattgaatctgtagattttttggggtagtatggacattttaacaagatttagtcttccaatccatgaacgtggaatatttttccattttttggtgtcttcttcaatttctttcaattgagaccaattttgaaagacattctggttaaaatggtatcaaagctgggcatggtggctcatgcctgtaatccaagcactttgggaggccgagctgggcagatcacaaggtcaggagatcaagaccagcctggtcaacacagcaaaaccctgtctctactaaaaatacaaaaactagctgggtgtgctggcatgtgcctgtagtcccagctactccggaggctgaggaaggagaatcacttgaacctgggaagtggaggttgcagtgagctgagattgtgccattgcactccaacctgggtgacagagtgagactccatctccaaaaaataaaataaaataaaataaaataaaataaaatggtatcaaacagtatctcatgctacagagaaaactttcgtgaaaggaagagtcaatcaatgagacaaacttcatgtcttattttaagaaattgctacagccaccccagctttcagcaactacgactgtgatcagtcagcagtcatcaatattatggcaagatcctccacaagcaaaaaaattacaactccctgacagctcagatgatcattagcactttttagtaataaagcatcttttaattaaggtatgctcatttttttctagacataatgctgttgcacacatagtaaactacagcatagtataaacataacctttatatgcactgcaaaaccaaaaaaaaaatgtgtgtgactggctttattgtgatatttgttttatttcagtggctgaaactcaaccaacaatattcccaaggtatgcctgttcagtcacattctgaggtactggggtttaggacttcaatatatgaatttggagacacaattcagccataacaacacaatataaatatttttctggacttacctgggacttcccatgatgggcatttagcacacagtaggaaatagctttgttgaccatttttccactacatcatcatggcgagaggcagcaggagagacctgacagcactctgagcttgctctctgctgctgtggggccaggatcttctgcggctatgggcctccagtcccactcagcaaataaatgagccatattccctttgggtttgaaatgcttttttgtaggaaaggaataatcaaatacttaacagctactaactgttaagtattaacagggagaaacaggtgtgcatgggctgtgggcatttgtctctgtttacatttgtaagtgtcttctggaacagcccatccaggccctttaaggagctttcaccagctaaaggaaaaactaccaacagggaggccaggtcacttttcttccaaattcttcccaaagtatttactttcatctgctgggaaaagacctcaacaaacatttatcaaggacctcttttgtgcctgaggctgtgctgggtctggaaggaatgtactgcttcactgggcctgtttagtaaatacagacattgctcaaccaacaaggaggagagagagtccgtgggttcaggagctgggaattcacttgtgccagcagaatgtaggagggccctggtcaggaagataggttatttggtgctgctatgttattttttattttgcctctttacggatgtaaggaagagacatgcccacgttacctgcgagccatctctcagtggcacagaatcccatcctctcaacattgctgcgtcccagtgcttccaaggtggtgggggtgaggagagggttcagtgcttttcatggaatctggatttcaacttaaggccaatagatttaccctctttctgaatgtctagaatttatcctagcagaggatctagctgtgtcaatttacccttctccaaaacggagctctgctatctgccagaagcaaaggacatttgtcgtttttgcctgcccagcttacctcccacttctcttggaaataaaaccacactttccttcctggaacccattctatgtggttcaggtggggctgacctcacctcccccaatgcagggaaggtgccctgtccttagtctagccaataggagtagctctctagcccttgtcacagtgattggcacagagctgggcatatgactcaagcacagccaaacagagtctgcttcaggcattgatgtggcagccacaggagagcagttccgccctcctcttggataacatgctctaaggatggcttggaactgcttgcagccatcttctccagtggtacaggggcacagaggacactttcatcatctggagaaaatgaagccaatgtacaaagagaaatcgcagagagatggaaagctaaaggcaaccttaaagacaatctttgagcctctggatccatctcttctcaggagctaatacatttcctatgttgcttatactcctttgagctgggtttctgtcactgggattggaaaactgactgttgcagcaacagggttttgtactgagcctcctcagagacagtcagcatttctcatgcttggcccatggtgtttacccttggctggagccctgattctcattaaactaattacgggcagagtatgaggactacattcactcagagatcagggcacaaagcattgcaattttatgcagagattactgctgaggaccactccccttggaagtaagctgtggactagagagtcatttcacacttaaacccttccctctatgtctttggcctttaaactctggtttctattctttactttctgagtgtgtattttcaaatcaccccttggggaggggtctcaggaacatcccaggctccatatcaaatgcaggaaggtatttaccatgcatgacaggtttcctatagttctttggactgcagaggagtactgcgctgcacgcatgagcatgggtggtggggtcagatggaatgaagatctttggctttgaggcagtgtaacctgtctgccttcctctgtcattgtgagttcctcaattcacgttactgtcaacctctccccatgtctccaaattaccctgtggcccactggccattttatatgcacgtcattctagcctcagaacatgccatttcccttccgctaatgtcttattgcctgtatgaatctaaacttgagggag

SEQ ID NO: 1879595 - DNA, 4001 bp, Homo sapiens
tatatgcatttgccagggccaatttatacttctgaattaacccatgcagcaaatgctacgcatcggctcgcagtccatttagaagcatttgcggtggacgatacaggggcctgactcgtcatactcctgcttgctaatccacatctgctggaaggtggacagtgaggccaggatggagccgctgatccacacagagtacttgcactctgggggcacaatgagcttgatcttcatggtgctggatgccagggcgttaatctccttctgcatcctgtcggtgatgcccgggtacatggtggtgcctctggatagccctatgttggtgtacaggtctttgcggatgtctacgtcacacttcatgatggagttgaacgtggtctcgtggatgccgcaagattccatacccaggaaggaaggctggaacagcgcctccggacactggaaccgcttgttgctgatggtgatgacctggccatccggcagcttgtagctcttctccagggaggaggatgtggtagtggccatctcctgctcgaagtccagggagacaaaaatatggaacgcttcacgaatctgcatgtcatccttgcgcaggggccatgctaatcttctctgtatcgttccaattttagtatatgtgctgctgaggcgagcactaaactggtttttcatgcagaattaccaacatctctgagggggtagacagatctttgggttccatttcctcctctgatctctcctccaaagacaggtgacagttacttgcgccacatctatgcctagctctgcaatcatcactatacagtaatactacgatggctaattgacctttctctccctcctgctggaggtgagtcctttgaaggtgacatggtttggatctgtccccgccaaatctcctgtcaaactgtagtccccatattggaggtgggggctggtggtgggatcatgaggctggttttctcataaatggttcagcaccatccctttggtgctgttctcgtgatagtgagttttcccaagatctggttgtttaaaagtgtgtagcatctcccccctcactccctcttgctcctaatcccgccatgtgagatgcctccctccccctttgccttacaccataactggaagcttcctgaggtctccccagaagcagaagccactatgcttcctgtatagcctgcagaagcatgggtcaattaaacctcttttctttagaaattatccagtctcaagtattagtgcaagaatggactaacacagaagggaacatgaaccctttgacaggaacacagtgtcttattcatcttggtcttatgaacacctgtacacagatctgaatagaaatgggctatgagctgcttttggcccaggtgacaagggattgtggtgcctccacctcacgctgctaccattctccgcagaggaccacgccacagatggtgtttttgagaataagaaaggctaaagagagtttaggatcacaagacaggttttaagaaaaccaatacatttcctgagtatccctcccagttattttctttttttttgaaacggagttttgctcttgttgtccaggctggagtgcaaaagcacgatcttggctcaccgcaacctccacctcccgggttcaagtgattctcctgcctcggcctcctgagtagctgggattacaggcatgtgccaccaccccggctaattttgtatttttagtagagatggggtttctccatgttggtcaggcttgtcttgaactcctgacctcaggtgattcgcccgcctgggcctcccaaagtgctgggattacaggcctgagccaccacgcccggcccctgttattttcacactaatattttattttcttcacagcactcatcactatcaggtgctcttttattagcttacttgtttactgtctatctccttccactatgacttaaactctcaaaagtctaaagaccatatctcctttattcatcactgtatattcgcatcacctagaactatctgggaacacaggggtcacttagcacatgtgttagaagaacactgaatgaattaatgtgcacattttcctaagattttatttcactatttattttgagacggagtttcactgtgttgcccatgctgaagtgcagtggtgcaatctcggctcactgcaaactccacttcccgggttgaggcgattctcctgcctcagcttccagagtagctgggattacaggcacgtgccactatgcccagctaatttttgtatttttagtagagacgggtttcgccacgatggccaggttggtctcgaactacctaccgatccaccctccactgcctcccagagtgctgggattacaggcatgagccaccgcgcctgtcccaatattttatttttaaagaacagatttggatgctcttatatgcataagtacttgaaaacacaaaataattcaagtattttaacataattcaaaaactacgatctttttagaatcagcaacacctaaggccccaaatgatcccttctccacatcaccactggctgttattgatagcggaacaagctatcccatcaggtgagagtggataagatgtagtgcaaagagcaagttagatcagaagactgagctcttcatgcctttgcttattggggtgcgaacctgatcaagacacttaatgctacaagcagctcagcttcaccatctgagaagataacctaccttagaaaatggatgtttaattctgataaaatgggtgtttaagagcttggcaaactatccagcacggtgaggaggggttacgtttatcagctgtcaaggttgaagcaggagggcaaaccacctctccccatatgagagctcctcccaaaaggcgccaagtagtaccagagcacctgcttctcccctgacaaaggctgatgttacagaaagaactttggtctgggaggcagacaacctgggatctaaacccagtttgcaactgagatggcacgtgagacaaagggttggactctcagatctctgggggcccttccaatgttgacatcccaggatctcgtgtggtcccaaccaaactcccactcttgctcccagacccagcagtatgtctggaatatggtaagcgaccagtaagcatttgctcaatgagagaataaaccagtgaattaataaaaatgtctcctcagatccgataaggggctccctcttctacacactcacagctcgagtctcccagccacttgccctttcctgctggcctacaactctctccctggctacaccaggtgtattgagagcagggagcgtgtcccagccgtgtgcacaaactggcactacatggatggcggggttctggtgactgggcgaggcgtgcgggccagacccgaggaaaaggcttgctgcgcgttggggccggaggctagcccggcccgactccggctctccctgggccctcctcgtccccaggcggatgccggaagagactcacgtgagcaccgggatgggcgtccacaccacgcagtaggggaagcgactccgttccacatccatggcgacgccgccggagccttgatattgcttcatgtccgtctcggccgccgtcggcgcctccacttccgccatcctgggcgggggtggcggcggcggcaacaagagcagagaactcccttccgcttccgccatgcggcgcgcgccccgctccgactggccccggctctggtgccgctcgtccccatggcgtcacttcccggagatggggtccgccccgcttggccttcccccgggaatccgagccgcgttcctctgggcccggccagccccgccccactccctatgcgcctgccagccccgagtctttgccgcttatgccccgcggctgcagaagggatgctctcaggcagttcgcagtctagcgccggagacttatagagaactctaattcagtacgctgagggctcctaggaggtgtggtacagtcgctatttattgagcacttcttaggtgcca

SEQ ID NO: 1879596 - DNA, 4001 bp, Homo sapiens
gaaaggtgttgatgaaggaatattgattggatggaggagtactgattatatgagggagtatttgttagatggaggggcactgattgaatgcagtagtagccacctggctgggggctgctgggcctcgttccacgtggggaggcagagcctggggtgcaggggccctcatgctcactcacgcccccactcacgacccagcccctccaaatggagggcggcgcagagctggggcagagtattgaggaggtggagggtttccatggaggagaagcctggccatgttgctccccatgttcccatgtcccagcccctccatgtgagcaaggtctcagctggggtgtgtgtccttgggcctggggcatgagatggagcccaagctcctccttggacctgggcttccaatgggtccagggccctcactccagctccacagaccccctccaccaagccataggggaggcgtggcttggaagcacacattggcacagagaccccagaagcccgtgtgcacacgtttccttaggtccacccctaagggcaacgagtccgggccccaacagccccataaaggccctcactctgctcacagctcatgcccaacacatggagtgcggccgggcgcgggactccctaggcctggggcacatgcaggtgcacacccaactcacacacattctccacgagcccacgctccggccacacaggcacacatgcccgcaccccatgcacatacaaatatgcacgtgctcacacacgggaacccttgacatccacgtgcatgtgcagacaagcttgggaacaaggggaccacgtccccctccagggatcccttcagggtgctgcagcctcactttagtgaggcaaacattgactgtttgccttgccatagccctgacaatggcggtgccggccctggcacgaggcccaggtgtgtactctgggaacatcatccatgcagagctgggcccctggaggatcactctgactgagctctccctggctaggggcctgggggacagagtggggatgcagagtaagcatctcctggtgtctcccctaaaacccagtgctggggagaagccccgccagcccctggcctctgacccagcagagctgaggacgtggaggcctctgggccccttctccgtctcctccctttcccctaccccaggatatgagtcatgcgggccccctccccatgacctcaccgcatcactattccacagccgggctccgttctgggaactgaaaggggggcagctctcctggggtggggtgggggcctctggcctgggaaaggcgcccctcggtcagcggcccaggccccttggcatacaccacggagctgtcaggactctgggatggccgaccccgcccgtggccctggctcagccccgtgcagctgcgagggatttggtgttcctgcgcaaatgcagttaggccatttcctatgtctgttccggctccgaagtccaaggttcagcccaagcggccaggcggtggggggggggctccatccacctcccaccccagcacacccccaccaccctcacagtcccaggctccacttcggggcccggcccccagccagggacaccagtatgcacagaaccctgaaggatgcctcgttctgagtggagctccccaagctcaggtctgttcctgtcggcctcgtccactgccaaccacccccaactcgggacactggcccttcttctccttcctccacagacctccccacctctacctcccagtccccactgagggcctgacaatgcccatcttcggcccagcactcccagctacccactgccgtccttcccctgcctggaagtgcagacacttccagaatgggtgtccggctcggtccccgtcctgactctgctccctacaggcagctcctgtggctgccccgcccagctgtcctgagcccagaggtcggctggagagggtcagtcctctctggggtcctggggagtcaggaggctctggtgaagagcaagggctgcagggaggatgtcgaggggaggaggagcttctcctccaggcctgaccacaggtctcctggacaccacagggagctggcgggaggactggggagttgggctgggccttccaccagggtggttcaggactccctgcacagcactgaggtctctggtcccctcattagcccagcctcccgtgggatcatagacttgacccctcaagtcactgcagagcccaagagtggagaaacacagcaccgtgtgccgggaaaaggtgcccacaggggcccttcatggctgaggcttccagagggtagtgggacggcaaccccgctccccaccagccgcccaccacagcgttcatgatacagcttcggagtgtgggtcggggtctatctgggaaaccagggcaaaggcggtggcagctggcagcacccacacccacagctggggcactgctcacatgagcccccatcagcaggccccttggttgtgccacaggcaggggtcctgccccagggagggggtagtccgggggagctcgagggtgtggcacaggccagctgtcactcctccctggagaggcagctggggacgcagctgggaggggagccaggagcagagacagcccggggccagcaggtgggtgacaggtggggcagcgggaggggcatgcgctgtccgcctggggctggggtgtagagacgggaacctgccccccaatgcctggtgctggcccagcctccccccggggtctctagcaccttcccagttgtgtctgcaccctcctgggcatggcgggggagggtgggggtcaacccctttccttgtagtcccgtgccagtgggcaagggagacgccccagtgagcaggagcctagcctctctgcctggggaggccaggtgatgagccacccggagtgggagggggccttgaacttgggtctgaaagatgagcaggggtttgctgggccgggtacaggcaagagctaatgcaggaaggcagagagcaggagcgcttagagggagtggctctgtgcagccggagtcagatgggtgaccctcactcaggaggaagcactgggaccctctctcctcacgctgggtcccccgcctccctctaggatccccacacccaggtccttctgggcctctgccacacagatcaggtctggaaggctccctggaggaggcggtgcctagacttggacataggcctgcagagctggtttccctcacaaccctgggaagacagaactcctcagcgggttgatgtggaggagggcggagcctccctccaaggcaccagtccagtgctgggggcgacacagagagccagaagctggcgggggcgggaggctctgccccccaagggctttacatgccgaagccccatggccgagctgggacccagggtcagcccaggcaggccgcgagaaaggagactgtggaccccaccccatcacacagggaggaggtgctgtgcccgctgggggggcagctgcccctctctgggccctttgggtgggaagaggcttggtgaggtagaaagcccagccccagccagcagcgttgccttctcacagtggcagccctttgtaaccccggggggtccctgcagggcctctccctgttttctcaccatggggcagcatttgggggtctcttgagggaccccctagatgcttctgctcagagcccccaaagccaaggagcctccactcctccgtctgcagcctcccctgccggttcttgctacccagggttcagtggcctgggggctgacggagggggtcgcctctgccaaggcccctcccggcgcctccctggctcatccagcccaccttcctcccacgctggctcacgcaaagtgttctggtcaccaggagcccttcctgaccagccccggccccttcttggccttcgccccacctggcctcccctggatccctgacctgggtgccgggcctgctgggtccagagcccaccccgccctgaacaaccccgagcctca

SEQ ID NO: 1879597 - DNA, 4001 bp, Homo sapiens
actggggagttgggctgggccttccaccagggtggttcaggactccctgcacagcactgaggtctctggtcccctcattagcccagcctcccgtgggatcatagacttgacccctcaagtcactgcagagcccaagagtggagaaacacagcaccgtgtgccgggaaaaggtgcccacaggggcccttcatggctgaggcttccagagggtagtgggacggcaaccccgctccccaccagccgcccaccacagcgttcatgatacagcttcggagtgtgggtcggggtctatctgggaaaccagggcaaaggcggtggcagctggcagcacccacacccacagctggggcactgctcacatgagcccccatcagcaggccccttggttgtgccacaggcaggggtcctgccccagggagggggtagtccgggggagctcgagggtgtggcacaggccagctgtcactcctccctggagaggcagctggggacgcagctgggaggggagccaggagcagagacagcccggggccagcaggtgggtgacaggtggggcagcgggaggggcatgcgctgtccgcctggggctggggtgtagagacgggaacctgccccccaatgcctggtgctggcccagcctccccccggggtctctagcaccttcccagttgtgtctgcaccctcctgggcatggcgggggagggtgggggtcaacccctttccttgtagtcccgtgccagtgggcaagggagacgccccagtgagcaggagcctagcctctctgcctggggaggccaggtgatgagccacccggagtgggagggggccttgaacttgggtctgaaagatgagcaggggtttgctgggccgggtacaggcaagagctaatgcaggaaggcagagagcaggagcgcttagagggagtggctctgtgcagccggagtcagatgggtgaccctcactcaggaggaagcactgggaccctctctcctcacgctgggtcccccgcctccctctaggatccccacacccaggtccttctgggcctctgccacacagatcaggtctggaaggctccctggaggaggcggtgcctagacttggacataggcctgcagagctggtttccctcacaaccctgggaagacagaactcctcagcgggttgatgtggaggagggcggagcctccctccaaggcaccagtccagtgctgggggcgacacagagagccagaagctggcgggggcgggaggctctgccccccaagggctttacatgccgaagccccatggccgagctgggacccagggtcagcccaggcaggccgcgagaaaggagactgtggaccccaccccatcacacagggaggaggtgctgtgcccgctgggggggcagctgcccctctctgggccctttgggtgggaagaggcttggtgaggtagaaagcccagccccagccagcagcgttgccttctcacagtggcagccctttgtaaccccggggggtccctgcagggcctctccctgttttctcaccatggggcagcatttgggggtctcttgagggaccccctagatgcttctgctcagagcccccaaagccaaggagcctccactcctccgtctgcagcctcccctgccggttcttgctacccagggttcagtggcctgggggctgacggagggggtcgcctctgccaaggcccctcccggcgcctccctggctcatccagcccaccttcctcccacgctggctcacgcaaagtgttctggtcaccaggagcccttcctgaccagccccggccccttcttggccttcgccccacctggcctcccctggatccctgacctgggtgccgggcctgctgggtccagagcccaccccgccctgaacaaccccgagcctcagccaccctcaattcttaccctttcacagctggggagtggagtctgggcctgaggtctcctgtgcgcctctgggcgcctgcgcccgcgctgtgcctttgcgagggcggagctgcgttgtgctcagcacagactcggagagcatcgcgagggcggagctgagttctcctgtgcacagacttcggagatacagcgaaggcggagcagtgttctccttggcacagacccgggcgggccgggggcaccgcgagggcggagctgcattctgctcagcacagacccgggggacaccgcgaaggcagagcagcgttctcctcagcacggaccttgggggcactgcctcgctttgggacaactcggggccgcatcgacggtgaataaaatccttcctgtttgcagccctgaataatcagggtcagaaaccagatagaagggttcagtgtggaaaacgggaaaccaaaagcccctctgaatcctgcccaccgaggttctccccagccaaggtgaggcggccgcagtgcgagatccacaccgcagcctcggaagacaaatgcagcattcctaatgcagacatggcactcaaaatatgacaccccccttgctcatgtaacaagcacctgtagtgctaatgcactgcctcgacacaaaaacattaatataagatccacaatcccctcgctgccgtgcagtcctaagacagcgatcataataatcaacattgacatagtcaatacaaacgtagtaacgaacctaggcttaaggttggtgttaggggttaagtttagggttaggggttggagataggggttggggtcagagttaggggttaggagtcaacatttagagttaggggttaagagaggttgggggttagggattaggggttagggttgggttagggggagggggagagttgtggttaggggttagggttagggattagggttaaggttaggggtcagggtcaggggtcccactctgttggctgtctatttactctactgactgttccctttgccatgcaaaagctatttagtttaattaagtcccagctatttatctttgtttttattgcatttgcatttgggttcttggtcatgaaatccttgcctatgccaatgtctagaagggtttatccagtgttatcttctagaatttttatagttcaggaattaggtttaagtttttaatccatcttgagtagatttttgtataaggtgagagatgagaatccagttttattcccctacatatggctcgccaattatcccaacatcatatgttgaaaagggtgtcctttccccactttattttttgcttactttgtcgaagatcagtcggctgtaagtatttgggttaatttatgggttctctcttctgttacattagtctatgtgcgtatttttaaaccagtaccatgctgttttggtagctatggccttattgtacagtttgaaatcaagtactgtgatgcctccaggtttgttctttttgcttagccttggttgggctacatggctctcttttggttccatattaattttagaattgtttttgtaattctgtgaagaatgatggtggtattcagatggggattgcattgaatttgtagattgcctttaacagaatggtaattttcacaatattggttctacccatccacgagcatggggatgcgtttccatctgtttgtgtcatctatgatttcttttctttctttcttttttttttttttcttcagagggagttttgctcttgtcgctgaggtgggagtgcaatggtgtgatctcggctcactacaacttctgcctcccaggttcaagcgattctcctgcctcagcttcccgagtagctgggattatacgcatgtgccaacatgcttggctccaactatgatttctttcagcagtgttttgtaattttcatcgtagaggtcttttgattcctttgctaggtatattcctaagttttttgtttgtttgtttgtttgtttgtttttgcagctattgtaaaaggggttgagttcttgatgtgattctctgcttggtagctgttgatgtatagaagagctactgatttgtgtacattaatcttg

SEQ ID NO: 1879598 - DNA, 4001 bp, Homo sapiens
gaaaggtgttgatgaaggaatattgattggatggaggagtactgattatatgagggagtatttgttagatggaggggcactgattgaatgcagtagtagccacctggctgggggctgctgggcctcgttccacgtggggaggcagagcctggggtgcaggggccctcatgctcactcacgcccccactcacgacccagcccctccaaatggagggcggcgcagagctggggcagagtattgaggaggtggagggtttccatggaggagaagcctggccatgttgctccccatgttcccatgtcccagcccctccatgtgagcaaggtctcagctggggtgtgtgtccttgggcctggggcatgagatggagcccaagctcctccttggacctgggcttccaatgggtccagggccctcactccagctccacagaccccctccaccaagccataggggaggcgtggcttggaagcacacattggcacagagaccccagaagcccgtgtgcacacgtttccttaggtccacccctaagggcaacgagtccgggccccaacagccccataaaggccctcactctgctcacagctcatgcccaacacatggagtgcggccgggcgcgggactccctaggcctggggcacatgcaggtgcacacccaactcacacacattctccacgagcccacgctccggccacacaggcacacatgcccgcaccccatgcacatacaaatatgcacgtgctcacacacgggaacccttgacatccacgtgcatgtgcagacaagcttgggaacaaggggaccacgtccccctccagggatcccttcagggtgctgcagcctcactttagtgaggcaaacattgactgtttgccttgccatagccctgacaacggcggtgccggccctggcacgaggcccaggtgtgtactctgggaacatcatccatgcagagctgggcccctggaggatcactctgactgagctctccctggctaggggcctgggggacagagtggggatgcagagtaagcatctcctggtgtctcccctaaaacccagtgctggggagaagccccgccagcccctggcctctgacccagcagagctgaggacgtggaggcctctgggccccttctccgtctcctccctttcccctaccccaggatatgagtcatgcgggccccctccccatgacctcaccgcatcactattccacagccgggctccgttctgggaactgaaaggggggcagctctcctggggtggggtgggggcctctggcctgggaaaggcgcccctcggtcagcggcccaggccccttggcatacaccacggagctgtcaggactctgggatggccgaccccgcccgtggccctggctcagccccgtgcagctgcgagggatttggtgttcctgcgcaaatgcagttaggccatttcctatgtctgttccggctccgaagtccaaggttcagcccaagcggccaggcggtggggggggggctccatccacctcccaccccagcacaccccccccaccctcacagtcccaggctccacttcggggcccggcccccagccagggacaccagtatgcacagaaccctgaaggatgcctcgttctgagtggagctccccaagctcaggtctgttcctgtcggcctcgtccactgccaaccacccccaactcgggacactggcccttcttctccttcctccacagacctccccacctctacctcccagtccccactgagggcctgacaatgcccatcttcggcccagcactcccagctacccactgccgtccttcccctgcctggaagtgcagacacttccagaatgggtgtccggctcggtccccgtcctgactctgctccctacaggcagctcctgtggctgccccgcccagctgtcctgagcccagaggtcggctggagagggtcagtcctctctggggtcctggggagtcaggaggctctggtgaagagcaagggctgcagggaggatgtcgaggggaggaggagcttctcctccaggcctgaccacaggtctcctggacaccacagggagctggcgggaggactggggagttgggctgggccttccaccagggtggttcaggactccctgcacagcactgaggtctctggtcccctcattagcccagcctcccgtgggatcatagacttgacccctcaagtcactgcagagcccaagagtggagaaacacagcaccgtgtgccgggaaaaggtgcccacaggggcccttcatggctgaggcttccagagggtagtgggacggcaaccccgctccccaccagccgcccaccacagcgttcatgatacagcttcggagtgtgggtcggggtctatctgggaaaccagggcaaaggcggtggcagctggcagcacccacacccacagctggggcactgctcacatgagcccccatcagcaggccccttggttgtgccacaggcaggggtcctgccccagggagggggtagtccgggggggctcgagggtgtggcacaggccagctgtcactcctccctggagaggcagctggggacgcagctgggaggggagccaggagcagagacagcccggggccagcaggtgggtgacaggtggggcagcgggaggggcacgcgctgtccgcctggggctggggtgtagagacgggaacctgccccccaatgcctggtgctggcccagcctccccccggggtctctagcaccttcccagttgtgtctgcaccctcctgggcatggcgggggagggtgggggtcaacccctttccttgtagtcccgtgccagtgggcaagggagacgccccagtgagcaggagcctagcctctctgcctggggaggccaggtgatgagccacccggagtgggagggggccttgaacttgggtctgaaagatgagcaggggtttgctgggccgggtacaggcaagagctaatgcaggaaggcagagagcaggagcgcttagagggagtggctctgtgcagccggagtcagatgggtgaccctcactcaggaggaagcactgggaccctctctcctcacgctgggtcccccgcctccctctaggatccccacacccaggtccttctgggcctctgccacacagatcaggtctggaaggctccctggaggaggcggtgcctagacttggacataggcctgcagagctggtttccctcacaaccctgggaagacagaactcctcagcgggttgatgtggaggagggcggagcctccctccaaggcaccagtccagtgctgggggcgacacagagagccagaagctggcgggggcgggaggctctgccccccaagggctttacatgccgaagccccatggccgagctgggacccagggtcagcccaggcaggccgcgagaaaggagactgtgggccccaccccatcacacagggaggaggtgctgtgcccgctgggggggcagctgcccctctctgggccctttgggtgggaagaggcttggtgaggtagaaagcccagccccagccagcagcgttgccttctcacagtggcagccctttgtaaccccggggggtccctgcagggcctctccctgttttctcaccatggggcagcatttgggggtctcttgagggaccccctagatgcttctgctcagagcccccaaagccaaggagcctccactcctccgtctgcagcctcccctgccggttcttgctacccagggttcagtggcctgggggctgacggagggggtcgcctctgccaaggcccctcccggcgcctccctggctcatccagcccaccttcctcccacgctggctcacgcaaagtgttctggtcaccaggagcccttcctgaccagccccggccccttcttggccttcgccccacctggcctcccctggatccctgacctgggtgccgggcctgctgggtccagagcccaccccgccctgaacaaccccgagcctca

SEQ ID NO: 1879599 - DNA, 4001 bp, Homo sapiens
actggggagttgggctgggccttccaccagggtggttcaggactccctgcacagcactgaggtctctggtcccctcattagcccagcctcccgtgggatcatagacttgacccctcaagtcactgcagagcccaagagtggagaaacacagcaccgtgtgccgggaaaaggtgcccacaggggcccttcatggctgaggcttccagagggtagtgggacggcaaccccgctccccaccagccgcccaccacagcgttcatgatacagcttcggagtgtgggtcggggtctatctgggaaaccagggcaaaggcggtggcagctggcagcacccacacccacagctggggcactgctcacatgagcccccatcagcaggccccttggttgtgccacaggcaggggtcctgccccagggagggggtagtccgggggggctcgagggtgtggcacaggccagctgtcactcctccctggagaggcagctggggacgcagctgggaggggagccaggagcagagacagcccggggccagcaggtgggtgacaggtggggcagcgggaggggcacgcgctgtccgcctggggctggggtgtagagacgggaacctgccccccaatgcctggtgctggcccagcctccccccggggtctctagcaccttcccagttgtgtctgcaccctcctgggcatggcgggggagggtgggggtcaacccctttccttgtagtcccgtgccagtgggcaagggagacgccccagtgagcaggagcctagcctctctgcctggggaggccaggtgatgagccacccggagtgggagggggccttgaacttgggtctgaaagatgagcaggggtttgctgggccgggtacaggcaagagctaatgcaggaaggcagagagcaggagcgcttagagggagtggctctgtgcagccggagtcagatgggtgaccctcactcaggaggaagcactgggaccctctctcctcacgctgggtcccccgcctccctctaggatccccacacccaggtccttctgggcctctgccacacagatcaggtctggaaggctccctggaggaggcggtgcctagacttggacataggcctgcagagctggtttccctcacaaccctgggaagacagaactcctcagcgggttgatgtggaggagggcggagcctccctccaaggcaccagtccagtgctgggggcgacacagagagccagaagctggcgggggcgggaggctctgccccccaagggctttacatgccgaagccccatggccgagctgggacccagggtcagcccaggcaggccgcgagaaaggagactgtgggccccaccccatcacacagggaggaggtgctgtgcccgctgggggggcagctgcccctctctgggccctttgggtgggaagaggcttggtgaggtagaaagcccagccccagccagcagcgttgccttctcacagtggcagccctttgtaaccccggggggtccctgcagggcctctccctgttttctcaccatggggcagcatttgggggtctcttgagggaccccctagatgcttctgctcagagcccccaaagccaaggagcctccactcctccgtctgcagcctcccctgccggttcttgctacccagggttcagtggcctgggggctgacggagggggtcgcctctgccaaggcccctcccggcgcctccctggctcatccagcccaccttcctcccacgctggctcacgcaaagtgttctggtcaccaggagcccttcctgaccagccccggccccttcttggccttcgccccacctggcctcccctggatccctgacctgggtgccgggcctgctgggtccagagcccaccccgccctgaacaaccccgagcctcagccaccctcaattcttaccctttcacagctggggagtggagtctgggcctgaggtctcctgtgcgcctctgggcgcctgcgcccgcgctgtgcctttgcgagggcggagctgcgttgtgctcagcacagactcggagagcatcgcgagggcggagctgagttctcctgtgcacagacttcggagatacagcgaaggcggagcagtgttctccttggcacagacccgggcgggccgggggcaccgggagggcggagctgcgttctgctcagcacagacccgggggacaccgcgaaggcagagcagcgttctcctcagcacggaccttgggggcactgcctcgctttgggacaactcggggccgcatcgacggtgaataaaatccttcctgtttgcagccctgaataatcagggtcagaaaccagatagaagggttcagtgtggaaaacgggaaaccaaaagcccctctgaatcctgcccaccgaggttctccccagccaaggtgaggcggccgcagtgcgagatccacaccgcagcctcggaagacaaatgcagcattcctaatgcagacatggcactcaaaagatgacaccccccttgctcatgtaacaagcacctgtagtgctaatgcactgcctcgacacaaaaacattaatataagatccacaatcccctcgctgccgtgcagtcctaagacagcgatcataataatcaacattgacatagtcaatacaaacgtagtaacgaacctaggcttaaggttggtgttaggggttaagtttagggttaggggttggagataggggttggggtcagagttaggggttaggagtcaacatttagagttaggggttaagagaggttgggggttagggattaggggttagggttgggttagggggagggggagagttgtggttaggggttagggttagggattagggttaaggttaggggtcagggtcaggggtcccactctgttggctgtctatttactctactgactgttccctttgccatgcaaaagctatttagtttaattaagtcccagctatttatctttgtttttattgcatttgcatttgggttcttggtcatgaaatccttgcctatgccaatgtctagaagggtttatccagtgttatcttctagaatttttatagttcaggaattaggtttaagtttttaatccatcttgagtagatttttgtataaggtgagagatgagaatccagttttattcccctacatatggctcgccaattatcccaacatcatatgttgaaaagggtgtcctttccccactttattttttgcttactttgtcgaagatcagtcggctgtaagtatttgggttaatttatgggttctctcttctgttacattagtctatgtgcgtatttttaaaccagtaccatgctgttttggtagctatggccttattgtacagtttgaaatcaagtactgtgatgcctccaggtttgttctttttgcttagccttggttgggctacatggctctcttttggttccatattaattttagaattgtttttgtaattctgtgaagaatgatggtggtattcagatggggattgcattgaatttgtagattgcctttaacagaatggtaattttcacaatattggttctacccatccacgagcatggggatgcgtttccatctgtttgtgtcatctatgatttcttttctttctttctttttttttttttttcttcagagggagttttgctcttgtcgctgaggtgggagtgcaatggtgtgatctcggctcactacaacttctgcctcccaggttcaagcgattctcctgcctcagcttcccgagtagctgggattatacgcatgtgccaacatgcttggctccaactatgatttctttcagcagtgttttgtaattttcatcgtagaggtcttttgattcctttgctaggtatattcctaagttttttgtttgtttgtttgtttgtttgtttttgcagctattgtaaaaggggttgagttcttgatgtgattctctgcttggtagctgttgatgtatagaagagctactgatttgtgtacattaatctt

SEQ ID NO: 1879600 - DNA, 4001 bp, Homo sapiens
gactggggagttgggctgggccttccaccagggtggttcaggactccctgcacagcactgaggtctctggtcccctcattagcccagcctcccgtgggatcatagacttgacccctcaagtcactgcagagcccaagagtggagaaacacagcaccgtgtgccgggaaaaggtgcccacaggggcccttcatggctgaggcttccagagggtagtgggacggcaaccccgctccccaccagccgcccaccacagcgttcatgatacagcttcggagtgtgggtcggggtctatctgggaaaccagggcaaaggcggtggcagctggcagcacccacacccacagctggggcactgctcacatgagcccccatcagcaggccccttggttgtgccacaggcaggggtcctgccccagggagggggtagtccgggggggctcgagggtgtggcacaggccagctgtcactcctccctggagaggcagctggggacgcagctgggaggggagccaggagcagagacagcccggggccagcaggtgggtgacaggtggggcagcgggaggggcacgcgctgtccgcctggggctggggtgtagagacgggaacctgccccccaatgcctggtgctggcccagcctccccccggggtctctagcaccttcccagttgtgtctgcaccctcctgggcatggcgggggagggtgggggtcaacccctttccttgtagtcccgtgccagtgggcaagggagacgccccagtgagcaggagcctagcctctctgcctggggaggccaggtgatgagccacccggagtgggagggggccttgaacttgggtctgaaagatgagcaggggtttgctgggccgggtacaggcaagagctaatgcaggaaggcagagagcaggagcgcttagagggagtggctctgtgcagccggagtcagatgggtgaccctcactcaggaggaagcactgggaccctctctcctcacgctgggtcccccgcctccctctaggatccccacacccaggtccttctgggcctctgccacacagatcaggtctggaaggctccctggaggaggcggtgcctagacttggacataggcctgcagagctggtttccctcacaaccctgggaagacagaactcctcagcgggttgatgtggaggagggcggagcctccctccaaggcaccagtccagtgctgggggcgacacagagagccagaagctggcgggggcgggaggctctgccccccaagggctttacatgccgaagccccatggccgagctgggacccagggtcagcccaggcaggccgcgagaaaggagactgtgggccccaccccatcacacagggaggaggtgctgtgcccgctgggggggcagctgcccctctctgggccctttgggtgggaagaggcttggtgaggtagaaagcccagccccagccagcagcgttgccttctcacagtggcagccctttgtaaccccggggggtccctgcagggcctctccctgttttctcaccatggggcagcatttgggggtctcttgagggaccccctagatgcttctgctcagagcccccaaagccaaggagcctccactcctccgtctgcagcctcccctgccggttcttgctacccagggttcagtggcctgggggctgacggagggggtcgcctctgccaaggcccctcccggcgcctccctggctcatccagcccaccttcctcccacgctggctcacgcaaagtgttctggtcaccaggagcccttcctgaccagccccggccccttcttggccttcgccccacctggcctcccctggatccctgacctgggtgccgggcctgctgggtccagagcccaccccgccctgaacaaccccgagcctcagccaccctcaattcttaccctttcacagctggggagtggagtctgggcctgaggtctcctgtgcgcctctgggcgcctgcgcccgcgctgtgcctttgcgagggcggagctgcgttgtgctcagcacagactcggagagcatcgcgagggcggagctgagttctcctgtgcacagacttcggagatacagcgaaggcggagcagtgttctccttggcacagacccgggcgggccgggggcaccgggagggcggagctgcgttctgctcagcacagacccgggggacaccgcgaaggcagagcagcgttctcctcagcacggaccttgggggcactgcctcgctttgggacaactcggggccgcatcgacggtgaataaaatccttcctgtttgcagccctgaataatcagggtcagaaaccagatagaagggttcagtgtggaaaacgggaaaccaaaagcccctctgaatcctgcccaccgaggttctccccagccaaggtgaggcggccgcagtgcgagatccacaccgcagcctcggaagacaaatgcagcattcctaatgcagacatggcactcaaaagatgacaccccccttgctcatgtaacaagcacctgtagtgctaatgcactgcctcgacacaaaaacattaatataagatccacaatcccctcgctgccgtgcagtcctaagacagcgatcataataatcaacattgacatagtcaatacaaacgtagtaacgaacctaggcttaaggttggtgttaggggttaagtttagggttaggggttggagataggggttggggtcagagttaggggttaggagtcaacatttagagttaggggttaagagaggttgggggttagggattaggggttagggttgggttagggggagggggagagttgtggttaggggttagggttagggattagggttaaggttaggggtcagggtcaggggtcccactctgttggctgtctatttactctactgactgttccctttgccatgcaaaagctatttagtttaattaagtcccagctatttatctttgtttttattgcatttgcatttgggttcttggtcatgaaatccttgcctatgccaatgtctagaagggtttatccagtgttatcttctagaatttttatagttcaggaattaggtttaagtttttaatccatcttgagtagatttttgtataaggtgagagatgagaatccagttttattcccctacatatggctcgccaattatcccaacatcatatgttgaaaagggtgtcctttccccactttattttttgcttactttgtcgaagatcagtcggctgtaagtatttgggttaatttatgggttctctcttctgttacattagtctatgtgcgtatttttaaaccagtaccatgctgttttggtagctatggccttattgtacagtttgaaatcaagtactgtgatgcctccaggtttgttctttttgcttagccttggttgggctacatggctctcttttggttccatattaattttagaattgtttttgtaattctgtgaagaatgatggtggtattcagatggggattgcattgaatttgtagattgcctttaacagaatggtaattttcacaatattggttctacccatccacgagcatggggatgcgtttccatctgtttgtgtcatctatgatttcttttctttctttctttttttttttttttcttcagagggagttttgctcttgtcgctgaggtgggagtgcaatggtgtgatctcggctcactacaacttctgcctcccaggttcaagcgattctcctgcctcagcttcccgagtagctgggattatacgcatgtgccaacatgcttggctccaactatgatttctttcagcagtgttttgtaattttcatcgtagaggtcttttgattcctttgctaggtatattcctaagttttttgtttgtttgtttgtttgtttgtttttgcagctattgtaaaaggggttgagttcttgatgtgattctctgcttggtagctgttgatgtatagaagagctactgatttgtgtacattaatct

SEQ ID NO: 1879601 - DNA, 4001 bp, Homo sapiens
agaaaggtgttgatgaaggaatattgattggatggaggagtactgattatatgagggagtatttgttagatggaggggcactgattgaatgcagtagtagccacctggctgggggctgctgggcctcgttccacgtggggaggcagagcctggggtgcaggggccctcatgctcactcacgcccccactcacgacccagcccctccaaatggagggcggcgcagagctggggcagagtattgaggaggtggagggtttccatggaggagaagcctggccatgttgctccccatgttcccatgtcccagcccctccatgtgagcaaggtctcagctggggtgtgtgtccttgggcctggggcatgagatggagcccaagctcctccttggacctgggcttccaatgggtccagggccctcactccagctccacagaccccctccaccaagccataggggaggcgtggcttggaagcacacattggcacagagaccccagaagcccgtgtgcacacgtttccttaggtccacccctaagggcaacgagtccgggccccaacagccccataaaggccctcactctgctcacagctcatgcccaacacatggagtgcggccgggcgcgggactccctaggcctggggcacatgcaggtgcacacccaactcacacacattctccacgagcccacgctccggccacacaggcacacatgcccgcaccccatgcacatacaaatatgcacgtgctcacacacgggaacccttgacatccacgtgcatgtgcagacaagcttgggaacaaggggaccacgtccccctccagggatcccttcagggtgctgcagcctcactttagtgaggcaaacattgactgtttgccttgccatagccctgacaacggcggtgccggccctggcacgaggcccaggtgtgtactctgggaacatcatccatgcagagctgggcccctggaggatcactctgactgagctctccctggctaggggcctgggggacagagtggggatgcagagtaagcatctcctggtgtctcccctaaaacccagtgctggggagaagccccgccagcccctggcctctgacccagcagagctgaggacgtggaggcctctgggccccttctccgtctcctccctttcccctaccccaggatatgagtcatgcgggccccctccccatgacctcaccgcatcactattccacagccgggctccgttctgggaactgaaaggggggcagctctcctggggtggggtgggggcctctggcctgggaaaggcgcccctcggtcagcggcccaggccccttggcatacaccacggagctgtcaggactctgggatggccgaccccgcccgtggccctggctcagccccgtgcagctgcgagggatttggtgttcctgcgcaaatgcagttaggccatttcctatgtctgttccggctccgaagtccaaggttcagcccaagcggccaggcggtggagggggggctccatccacctcccaccccagcacaccccccccaccctcacagtcccaggctccacttcggggcccggcccccagccagggacaccagtatgcacagaaccctgaaggatgcctcgttctgagtggagctccccaagctcaggtctgttcctgtcggcctcgtccactgccaaccacccccaactcgggacactggcccttcttctccttcctccacagacctccccacctctacctcccagtccccactgagggcctgacaatgcccatcttcggcccagcactcccagctacccactgccgtccttcccctgcctggaagtgcagacacttccagaatgggtgtccggctcggtccccgtcctgactctgctccctacaggcagctcctgtggctgccccgcccagctgtcctgagcccagaggtcggctggagagggtcagtcctctctggggtcctggggagtcaggaggctctggtgaagagcaagggctgcagggaggatgtcgaggggaggaggagcttctcctccaggcctgaccacaggtctcctggacaccacagggagctggcgggaggactggggagttgggctgggccttccaccagggtggttcaggactccctgcacagcactgaggtctctggtcccctcattagcccagcctcccgtgggatcatagacttgacccctcaagtcactgcagagcccaagagtggagaaacacagcaccgtgtgccgggaaaaggtgcccacaggggcccttcatggctgaggcttccagagggtagtgggacggcaaccccgctccccaccagccgcccaccacagcgttcatgatacagcttcggagtgtgggtcggggtctatctgggaaaccagggcaaaggcggtggcagctggcagcacccacacccacagctggggcactgctcacatgagcccccatcagcaggccccttggttgtgccacaggcaggggtcctgccccagggagggggtagtccgggggggctcgagggtgtggcacaggccagctgtcactcctccctggagaggcagctggggacgcagctgggaggggagccaggagcagagacagcccggggccagcaggtgggtgacaggtggggcagcgggaggggcacgcgctgtccgcctggggctggggtgtagagacgggaacctgccccccaatgcctggtgctggcccagcctccccccggggtctctagcaccttcccagttgtgtctgcaccctcctgggcatggcgggggagggtgggggtcaacccctttccttgtagtcccgtgccagtgggcaagggagacgccccagtgagcaggagcctagcctctctgcctggggaggccaggtgatgagccacccggagtgggagggggccttgaacttgggtctgaaagatgagcaggggtttgctgggccgggtacaggcaagagctaatgcaggaaggcagagagcaggagcgcttagagggagtggctctgtgcagccggagtcagatgggtgaccctcactcaggaggaagcactgggaccctctctcctcacgctgggtcccccgcctccctctaggatccccacacccaggtccttctgggcctctgccacacagatcaggtctggaaggctccctggaggaggcggtgcctagacttggacataggcctgcagagctggtttccctcacaaccctgggaagacagaactcctcagcgggttgatgtggaggagggcggagcctccctccaaggcaccagtccagtgctgggggcgacacagagagccagaagctggcgggggcgggaggctctgccccccaagggctttacatgccgaagccccatggccgagctgggacccagggtcagcccaggcaggccgcgagaaaggagactgtgggccccaccccatcacacagggaggaggtgctgtgcccgctgggggggcagctgcccctctctgggccctttgggtgggaagaggcttggtgaggtagaaagcccagccccagccagcagcgttgccttctcacagtggcagccctttgtaaccccggggggtccctgcagggcctctccctgttttctcaccatggggcagcatttgggggtctcttgagggaccccctagatgcttctgctcagagcccccaaagccaaggagcctccactcctccgtctgcagcctcccctgccggttcttgctacccagggttcagtggcctgggggctgacggagggggtcgcctctgccaaggcccctcccggcgcctccctggctcatccagcccaccttcctcccacgctggctcacgcaaagtgttctggtcaccaggagcccttcctgaccagccccggccccttcttggccttcgccccacctggcctcccctggatccctgacctgggtgccgggcctgctgggtccagagcccaccccgccctgaacaaccccgagcctc

SEQ ID NO: 1879602 - DNA, 4001 bp, Homo sapiens
agcccttccagcaatgcttttaaggtctccagatgaagcgtcttcatcagcgatcccagagggaggcgggtgaagggccaggcctgcaccatcactgtcagagtctggaagtgtctcctgctgaaggcctccaggaagagtgggaggtagagctccctgggcagctcctccagggcagagatggccaagggcttgtctctcagcagactctgccccgccagctccaggagtctgggtggggcctggatgctcatcctgatgaatctgtaaggaaaaactctagaagacaaatccagagaaaaggcatcactttcaggccaaacacaatcacctcatcttctcctaaggccagtagcattgctctggtagaggtagaaaaattaccactttaccccaattccactctgcacttggtggccacaaatctatatttctgcttctgctggtaccaggaagaatgtcttccaaacaccaaggagggaggggtcaaagagaccactggcccattaattttcatccatggctccactgaatcccagtaccactggaaagtgtcactgaggatcctgaaagccaagctctacctctttgaggaaaattttcttgtcacttaccgccctaaagcaatgagaatgagagtgtcctgtggccccagacagcctccattctcagttttcaccatgaacatgctgggggaacactaaagggactccctaaagtcaatgccattattttttattttgaaaaatttcaaccagaaactgaccgggtgctgtggctcatgtctgtaatcccagcactgtgggaggccaaaacaggcagatcacttgaggttaggagttcgagaacagcctggcttacgtaatgaactctgtctctactaaatataaaaaaattaaaaatcatttgactccaaaaggcagaggttgcagtgagccgagatcccaccactgcactccagtctggacaaaagagttagactctgtctcaaataataataataataataataataataataattaattaattaaaatgttagccaggtgtggtggtgcagtcctataatcctagctactctggaggcagaggaagaagaatcacttgaatcccggaggcagtgttttcagtgagctgaactcaacaccctgcccttcagcctgggtgacagagtgagactccatctcagaacaagagaaaagaattaaccagaaactaaaagcgacgtgatggtattctagagcatttggaaggtagggatagaaatactaactctagatgaggcacagtggctcactcctgtaatcccagcactttgggagtccaaggtgtgtgtttttattttgaaaaactgtaagagaaattataaaagcagtgttgcagtagtctagagcacttggaaggtagaaatggaaacactaagtctgaggagaaggatccaatacacatcccttccacatactcacaatcacacacttagggacagagtctaagggaagagataaatcccaggttcggaacaagtctcttgagaatggtgtacgggagatctaagatttctgtaaaatgaaagcctgactaataaaatcacaataccgctaagtgtgtgaactatagctgacaggcacagaaaccaacaacttcacatgtcaagacataaacatccatccaactgtaaatttttaatattttttttttaaaaactgcttcaataagaattttgaaatgaggaaaatgaagcacaaatcaaaatttgagggatgaagtcaaaactatatttggaggaaaaatcaaaacctacatctgtttaatctgaaaaaacagacaggaaattctctgtgccattttgggctgtgtgtcaccatccctgactggctggctgcagattagacgggcatgttcctaagaaggtggtgacttaccagatctggactcagtttgcagggtgctgggacctctcagagaaccaagcagtagctccaggcaccagggctttgggtctgtcctgtgcaaactcaggagcttttgttgatgtttctaaccacaccctccccttctcaatcaccagcttccaatcagaaagtgatacctgattagatcctgaagttccacccagttaatcctgattgagtttcacactttcttctgattcattgattaaattagatgtgcatttatgaaagtgaaagaataaataacagggtgaaagtccaaaagtcattaattcatttattccccaaacactgatgaagtttgactaacatgtgaccttcatagtgacatggaaggtttaatctgttcctggcattagaaagaaaaaacaaaacctgatgatatctttatgggagaatatttggccacattgaaattatccaaacgtttcagagctaagacagctttaaaaagacggtgatgtcaaccctaagaaaacagaatacaaagctctgttatccaacagttacctgggttttatgcttcctaacggggcaggtcatatgtgggttcaggttgaagaggggaaccactgagggtgttattgatcacaagactaaggtcaaggcttcactgcaggaaatcaggacagaatgacaaagtgaggtgggggctgggcaggatgggaccgggtgttctagtagaaccctgggaaggaaccaagacagcataaaacatggtgggtattttgtgggcatctccacagaaggattgaaagactctgtctggattgagtttaaaaattaaaaagggaatagttacagaagagacagtgcagactcttcaaacacaacattgtctttgagggcagagaaggcagaaacagtcttggcccctactagaagggaaagcgtgtttactcccaaaaatgatgggctcgcctcagaaaatcagcctgggaagatggaatctgagaatctgagctggggcagatgccagagagaagcagtgtggccagacctgggaagggagactttcccaacctggaagccatcgaaggtgggagctgtgggttttgcaggatgtgggagaaagtgaacaagggtccaagtctctgtcatggtgctatggtctggaaacctttcttttagactcagggatcttcccacagtgggacatttcccagcaaccctcacccacaggtgtttcccagggcccctcatcctcatcaataccctcgtgccattccccagcatattttgataattaatgttctgccatccttaaagtcctcccttgtccctgatattgaacagagagattctgattaaagtgataccattaggtatacaaagaaaactcaggccatgtgtggtggctcatatctctaatttcagcactttgggaggccaaggcagatagattacttgagcgcaggagtttgagacctgcctgggcaacatggaaaattctgtctataaaaactatatacgaaaaattagccaggcatggtggtgtgcacctgtagtcccagctgcccaagaagtttagatgcgaggatcacctgagcccaggaggttgagactgcagtgagccatcattgtgccactgcactccagcctgctcaacagaatgaaaccttgcctcaaaaaaaaggaaggaaagaaggaaggaagggagggagggagggagggaggggagagaaaaagacagaaggaaacagaaagaaaggtggaaagaaagaaaaagaaagaagaaagaaagtaagaaaaagaaagaaagaaagaaaaagaaggaaagaaggaaggaaagaaaaagaaagaagaaagaaagaaagaaagaaagaaagaaagaaagaaagaaagaaagaaagaaagaaagaaagaaaaagagcgagccttcttgtctttaagagcagcgcatatatactgttatattgggtgcacacctaaaatacatttcccccacaaaacctggaagctctatttcatgttgaaatatctgctaagttcacggatggctcccatcctaagagggatcacacagtgattcttccgatgttttagggc

SEQ ID NO: 1879603 - DNA, 4001 bp, Homo sapiens
cccttccagcaatgcttttaaggtctccagatgaagcgtcttcatcagcgatcccagagggaggcgggtgaagggccaggcctgcaccatcactgtcagagtctggaagtgtctcctgctgaaggcctccaggaagagtgggaggtagagctccctgggcagctcctccagggcagagatggccaagggcttgtctctcagcagactctgccccgccagctccaggagtctgggtggggcctggatgctcatcctgatgaatctgtaaggaaaaactctagaagacaaatccagagaaaaggcatcactttcaggccaaacacaatcacctcatcttctcctaaggccagtagcattgctctggtagaggtagaaaaattaccactttaccccaattccactctgcacttggtggccacaaatctatatttctgcttctgctggtaccaggaagaatgtcttccaaacaccaaggagggaggggtcaaagagaccactggcccattaattttcatccatggctccactgaatcccagtaccactggaaagtgtcactgaggatcctgaaagccaagctctacctctttgaggaaaattttcttgtcacttaccgccctaaagcaatgagaatgagagtgtcctgtggccccagacagcctccattctcagttttcaccatgaacatgctgggggaacactaaagggactccctaaagtcaatgccattattttttattttgaaaaatttcaaccagaaactgaccgggtgctgtggctcatgtctgtaatcccagcactgtgggaggccaaaacaggcagatcacttgaggttaggagttcgagaacagcctggcttacgtaatgaactctgtctctactaaatataaaaaaattaaaaatcatttgactccaaaaggcagaggttgcagtgagccgagatcccaccactgcactccagtctggacaaaagagttagactctgtctcaaataataataataataataataataataataataattaattaattaaaatgttagccaggtgtggtggtgcagtcctataatcctagctactctggaggcagaggaagaagaatcacttgaatcccggaggcagtgttttcagtgagctgaactcaacaccctgcccttcagcctgggtgacagagtgagactccatctcagaacaagagaaaagaattaaccagaaactaaaagcgacgtgatggtattctagagcatttggaaggtagggatagaaatactaactctagatgaggcacagtggctcactcctgtaatcccagcactttgggagtccaaggtgtgtgtttttattttgaaaaactgtaagagaaattataaaagcagtgttgcagtagtctagagcacttggaaggtagaaatggaaacactaagtctgaggagaaggatccaatacacatcccttccacatactcacaatcacacacttagggacagagtctaagggaagagataaatcccaggttcggaacaagtctcttgagaatggtgtacgggagatctaagatttctgtaaaatgaaagcctgactaataaaatcacaataccgctaagtgtgtgaactatagctgacaggcacagaaaccaacaacttcacatgtcaagacataaacatccatccaactgtaaatttttaatattttttttttaaaaactgcttcaataagaattttgaaatgaggaaaatgaagcacaaatcaaaatttgagggatgaagtcaaaactatatttggaggaaaaatcaaaacctacatctgtttaatctgaaaaaacagacaggaaattctctgtgccattttgggctgtgtgtcaccatccctgactggctggctgcagattagacgggcatgttcctaagaaggtggtgacttaccagatctggactcagtttgcagggtgctgggacctctcagagaaccaagcagtagctccaggcaccagggctttgggtctgtcctgtgcaaactcaggagcttttgttgatgtttctaaccacaccctccccttctcaatcaccagcttccaatcagaaagtgatacctgattagatcctgaagttccacccagttaatcctgattgagtttcacactttcttctgattcattgattaaattagatgtgcatttatgaaagtgaaagaataaataacagggtgaaagtccaaaagtcattaattcatttattccccaaacactgatgaagtttgactaacatgtgaccttcatagtgacatggaaggtttaatctgttcctggcattagaaagaaaaaacaaaacctgatgatatctttatgggagaatatttggccacattgaaattatccaaacgtttcagagctaagacagctttaaaaagacggtgatgtcaaccctaagaaaacagaatacaaagctctgttatccaacagttacctgggttttatgcttcctaacggggcaggtcatatgtgggttcaggttgaagaggggaaccactgagggtgttattgatcacaagactaaggtcaaggcttcactgcaggaaatcaggacagaatgacaaagtgaggtgggggctgggcaggatgggaccgggtgttctagtagaaccctgggaaggaaccaagacagcataaaacatggtgggtattttgtgggcatctccacagaaggattgaaagactctgtctggattgagtttaaaaattaaaaagggaatagttacagaagagacagtgcagactcttcaaacacaacattgtctttgagggcagagaaggcagaaacagtcttggcccctactagaagggaaagcgtgtttactcccaaaaatgatgggctcgcctcagaaaatcagcctgggaagatggaatctgagaatctgagctggggcagatgccagagagaagcagtgtggccagacctgggaagggagactttcccaacctggaagccatcgaaggtgggagctgtgggttttgcaggatgtgggagaaagtgaacaagggtccaagtctctgtcatggtgctatggtctggaaacctttcttttagactcagggatcttcccacagtgggacatttcccagcaaccctcacccacaggtgtttcccagggcccctcatcctcatcaataccctcgtgccattccccagcatattttgataattaatgttctgccatccttaaagtcctcccttgtccctgatattgaacagagagattctgattaaagtgataccattaggtatacaaagaaaactcaggccatgtgtggtggctcatatctctaatttcagcactttgggaggccaaggcagatagattacttgagcgcaggagtttgagacctgcctgggcaacatggaaaattctgtctataaaaactatatacgaaaaattagccaggcatggtggtgtgcacctgtagtcccagctgcccaagaagtttagatgcgaggatcacctgagcccaggaggttgagactgcagtgagccatcattgtgccactgcactccagcctgctcaacagaatgaaaccttgcctcaaaaaaaaggaaggaaagaaggaaggaagggagggagggagggagggaggggagagaaaaagacagaaggaaacagaaagaaaggtggaaagaaagaaaaagaaagaagaaagaaagtaagaaaaagaaagaaagaaagaaaaagaaggaaagaaggaagggaagaaaaagaaagaaagaagaaagaaagaaagaaagaaagaaagaaagaaagaaagaaagaaagaaagaaagaaagaaagaaagaaagaaaaagagcgagccttcttgtctttaagagcagcgcatatatactgttatattgggtgcacacctaaaatacatttcccccacaaaacctggaagctctatttcatgttgaaatatctgctaagttcacggatggctcccatcctaagagggatcacacagtgattcttcc

SEQ ID NO: 1879604 - DNA, 4001 bp, Homo sapiens
tttgttcaatttatgtagttagcccttccacgcctcagtttcctcatatatgaaagggggcataggccctatttcaaagatttgtggttgagctcttaatgtagcacccatcccaggataagtgctcagcaagggcttatgtctatgatcgcctggcttctgtacctggtgttcactctgtctgcaattctgcatcacctccctccacccttctctgctcggtcaccccaactttaagactaagccagtgttgttttccttgggaagcttcccctgacctcctccactttctggccataaatgtataaccctatcatagtgcttagtgctgaaactgtttccgtcttctcactagatcgtgagcaacttgagagcaggaattaaatctttaagtatccacagaaacttgcatataaatattcctcactatatattcattgggtgaacagatgagtgcaatattctagattaattaatgttttatttaatcctggaacttttttttttagacaaaaatgctgcccctattttaaagaacaaaatagataacccagggtagataatatggggagaattttatgtctggagctacttcctgggaatgatattctgtttcaccccagggttctgaaggccaagaggcattttttttctggggcacaactgttgctttctgttccattgtggaggtgtggagaagaagagaaagagaaggaatgacaggccctagcccctgagaactctaccttagtgtccaagcataggaatatccttactttggggaagttttcatcactcactgtgtccctagtagcatgaagggccccagctggatgtacattaaagccctctcagcccttccaggtcagttaatattaatagtattttgttgaacaaataaatggtggaatgttgcatccaaaggctgttgtgtagtagtagaagaagccataatttccctttcattatagtcagttggtgggaagggagctcctactggctgagtcaggcttttttttttttttttttttttaagatggagtcttgctctgtcaccaggctgaagtgcggtggcacaatctccagtcactgcaacctccaccccccagtttccagcgattctgttgccttagcctcccgagtaggtgggactacaggcgtacaccaccatgcctaggtaatttttgtatttttagtagagacggggtttcaccatgttgaccaggatggtctcgatatcttaccttgtgatccgcccgcctcggcctcccaaagtgctgggattacaggtgtgagccaccccacccgcccgagtcaggcttttaattaaccaagaaaagccttgtgaggaatggagcaaaaagttcaggataatacaccatccttagctgtctcatagttttctcttttgcaagcctttacaggatggggttgaccaaataaatctgatttatagaagtgcagattcaaacatagcccttgagatattcaaatatttttctgcaaacataatctgatatgtgcagcaggaataaagggcagtggctctcgaggaggagggagctgcagggatggtggtgttatcaataggagtccaggctttttccaaacacacacaagctccctcttcctcaaaaccataaaaaaaattcgttcacaagtttagtcaactaatattgtgtgccttttgtacacaaggtattttgggtgcaaacatgaacaaaacgggctcacactgtctcagccctcacggggcttagtctagtctgggaagacagactaatttgaaacataattgggaagcgctgtgatgaggaaggcacagggagctttggaagcagaagattagtctcctaccttaggcctggcagtgtctggactccttcctgatagtggtgctatctacactgagacctaaagaatgaggaggagctagccacagaaagatggggaaaagagagaaagggttgaggtgagtgacaggtgtgctgggcaaaggaaacagcatctgtgtagcagaatgttatgtatctggaaccctggaattgtcaattatgacctcaaactgaggacaaacaggagcattcacataactatgaagcaggactaatcaccaatcccaccatgggcaggacagcagagatcgtcactatgctaactgccaggaataggaatccacacacttccgcccactgcatcctggcctgaagtgctaccagtgtctgttggagacacgctcacatgcaacaagtaatgtgaagtggctttagtataatacagacaggcagcaagggacaaaagaagcctaggatccattgtgaggcagtcctcaaggctcaagacagctgtctgggaaggttggagtcttgactgtacatgccccccacacaacacagctgagaggccctgaaaggcaattcctcctgagttacatatctcaggggtcatgtgattcactgggcaaagctgagaagggtatcctgcttctagaggagagaggaataaagcctgggctgtcccaggcagcttctctctagctccagatgttactttttctaggagggacagaaacgaggcttgggctgtttcaggcagttactgcctattttgggtttgtttgtttgagaaggtgtcttgctctgttgcctaagctggagtgcaatggtatgatctcagctcactgcaacctccgcctcctgggttcaagctattctcctgcctcagcctcccgaatagctgggattacaagtgcctgccaccatacctggctaatttttgtatttttagtagaaacagggttttaccatgttggccaggctggtctcgaactcctgatctcaagtgatctgccttcctcggcctcccaaagtgctagggttacaggcatgaaccaccatgccaggcctattttgggtattacgttttcagcatattctacagtttttttgagaactgcaagcaagaaagggggtgagaattaggtcagtccaaggccccctggaggactgtcctgcggtcaccccccaccaacccagatatccctcttagcaaagctagtgcatttcgtacgtccacagacttccccagatctggaggtagaggtttgccttgtcaggccgatgtgacaccttcactgacacaatcttggtgcaacatcactgagtgagccagagtacattttattaggcccaggagtattataaccacaagcagggtggctgtacctgcctgagcagtgacctacccaaggttccagtgatccagataagaattcattaaagaggccaaagaaggattcttcagttgtccccactgtctgcagcaaggtggggctgcattcggatctcccctacctgtgtctccacaataactatctatctatctatctatctatctagagcaggaagtgttggcaatgacattcctcctgactggtctgaaaggaagcctagaagaattctgttgtccaaaacaactttcttgaataagttgaaggatatctgctgggctgctatggcaggggcgggggcaggggcagggtcagtggaagaaacaatatctttcatggtcagggacagattttttttttttttcagctctgactcctatgtatggtaccaaagctctcataaaggacataattccagagtcagctcctcctcctagcaggtccctaggtagcctggtgtacaagtttaggctgctggcccaacagttcatctcaccccaaggagtgctgtctaggggcaactccagcaggcccaatgtatggaatcccctcatccatcagcttttcaggcatgacattgcccctcccatatttgggtcacctccagctgccctcagagaaagatgtagccctcgggtgcacacagcatccattcccgtttcattgttcagtgacctgttcatagtacgtaggcattggcatgcaccagctaggcctcattaatcacatagttgtatgagctgagttctcccattcgatattgctcatgaag

SEQ ID NO: 1879605 - DNA, 4001 bp, Homo sapiens
tatctcccattcagagcctgtccagggctccccagtgacccggacctcatgacttgccccctacttttgtagctttatcatgctctgctcctctttccatgtccttcaccttcttgtgctggacctgtgctcttgctgttttgtcttcatttcctactccctcgcaacttactacagggcactagggccagagctctgacctcatctggccacctgcctaatgctactcagcctttgctagaagtatgtattcatgtcctatcactctgctggacagcgagttccttgagagcatgactgtgtcttactccttccatagcccctacggtgcccagcacaaggcctggcacaagtgggtactgttggtgtttgatgaacaagtgaatgaacgagcacactgattgcatctgctcaccatgcaaggactgctgtgaagagcagtcagatgtcacctcacccatctgtgtcatgttttaacagttcattaagcactcaaccccatttcactcattgacccttaaggtagcctccagtggcagcttttcctgtctcctttttccagatggaaaaaccaacattcagaaaagttaaataacttgcctgtagctacaaagccagaaggtggctgagccaggataaacttttttggctctttttctctgtagctcatgagactgagattggcatgagctggtgttcgttctcctattttctctgatctctccctttgcaagggcccagcagtgcttttacatctcatcttcaagaatgaatcctgggcttggatagtacttataatttggctagatgagctttgtagctaccaaggattctatttgcatctttagaagttttgcctcaagaaacctgagagcccaggaaggctcttgggttggccaagctcactaggcaaatcttttttttttttttttttttttgagacggagtctcgctctgtcacccaggttggagtgcagtggcgtgatctcggctcactgcaagctctgcctcctgggttcacgccattctcctgcctcagcctcccaagtagctggtactacaggtgcccgccaccacacctggctaattttttgtatttttagtagagacagggcttcactgtgttagccaggatggtctcgctctcctgacctcgtgatccgcccacctcggcctcccaaagtgctgggattacagatgtgagccactgcgcctggccgcagatctttaacagaacctttaagagtctggacttagagctaagtgttgggtgagggcagcctcttgggctggttttctcccctgtgaagtcatggctctgcagggcctggttttttggggcttgtgtggtgaccattaaatccccactgtggggggttgtttcacaagagggaaatctggtgctcctccagatggcctgatatgaaggagtcacgcctcccgcctcccggagctgcccagtggctgccttgtccttcaagtgcaggagctggttcaaatgtcaggaatggaagccactgtggtaaggggcattcccagggcaggggtatggtggggaaggttgggtgctgggcctgctgaagtactgtaaaaggttctgagactctccagttgagcactcctttctccagaggcctggaattggagcaaggccaccgtttcactccctccccctaagaagaaccaactatgatcctggggcacttcaggagtcagtgtatgtctgcctttctgtacagaggacgggaaggaaagcctggataatctctacactcagctacttcctctccccttccctgaccctcccaacattgactgccttagcagcagcaggtattcccttgggtggctggccagggtgtaggctggcaactggggaacctgccctcactataattgagagttgacttgcccctagagagtgccctgtccctaggtttgtggaattcagtctccacaaacctagagaggagaggacaaggacagtagttggattcattctctggggttgtagctgtctccgtctctttgctccagaccatcccaatctggcaaaacaagccacatggggctgctcgaagtgtagtaagaagaattgggaccaacctacccttgaagccgtgtgcccgggcgtcctttgaggtgagtatgttggaagggcaggagagtagaggctcagacagtgctgcttctgtgccccaaaccccttggtactgcccaagtaggttgtttcctggtcacttttcattctgttatgaaatatttgttaaatgcttataagatatcctggtcactgtgtcctcctgagtgcatacaaacctgtgaccacaaggaacctgacaggtcccccacatgggacactgactattgtgatttttgagttgaactctgcttttcttcaccagccctaagaattgaccatgtagccagtatttttattttattattttttgagatgaggtctccctatgttgcccaggctaggtcttaaactcctgggctcaagcagtcctcctgcctcagcctcctatgtagctgggattacaggcacaagccaccatgcccagctccactatttttagtgtttctctgaggccataattcctcagccttctctttttggccaatctgggcatcctttactggggtgctttggtcttacctctgtgtctagggatcctttagcacccactcagcagcagagattcctacctggcccaggtctcttgagaccccttctgtggtagaaagctaagtagcatttattagtcccagctgcctccctctaggaactaaatggttaagcaccagccccaaactatatggttcagatgtgtgcatttggagagctgggatacaaaagaaatacttgtgctttctacccacacagaggagatagaaatatgtgcatgaaaggatgtgggcccaggtagaaacagaaatgaaggagccaaatctgtataaaagatgctaagaagcagagtctgtaggaactggatctggaattagaagaggtgtcagggttggtattagggtcaggaatggagttggaagtgtcgcaggggtagggggcaggaaaagctgtcccagtattcagattgccagctatccagaattgtctaaagatcctgggcaggaactggtcctaacttgcctcagaagcatcagaaaaaaaaaagggagacagctagggagtgtggctcactgcatagaggccgtccccacacttggctataccctcttcagttctttggccagatgctgggcagagacaatcaagggcacaggctctcacagagcaggaatgtatgtgagcagtattggtaatactagataacatttactgagcacatactatgtgtcaggcactgtgctgtactttatatttgtttactcatttaattgccaagagcaaaggagcattcagggctaatcaggaaaacaaatggaggcttcccccaaatgccctattttagcactagttcctgggtcactggaagttcttctctgtgtgaccttggagtatcacttaactcctgtgagtcccaggtttcctatctaaatgcaggagcgatcaatcctggatccatctaccataccaaataatttgtagcagaaacagttgaatcttacttgtgtgtaaatatgcatttattattattattaaattaccttaaatattatttaagggactcttaccaatttattttgaaaatttaagcatatgaaaatattaaaattatgaaaagtaaaaggaaaataaattacctataattacatagtaataatacaataactattaatgtcttagtgtagtcctctttttctagatggatgttttttactttgttgtaatcacagtcaacatgactgaatcctaatttttcactttactcaacatctctaggttgaggagctattttaagaaatcctattatggttccttttgtataatcatttatttttatttaaatctaaatatattcaaattttcaggtttg

SEQ ID NO: 1879606 - DNA, 4001 bp, Homo sapiens
gaacctgggaggaggaggttgcagtgagcagagatcgtgccactgcactccagcctgcgtgacagagcgagattctgtctccaaataaataaataaataaacttagataaaatttttcaagtgcctacctcgtctgccccaaacacaaataaactagaatataaattccatgaggaaagagatttttattggttttgttcacagctgttttcctagcacctagaacagtgtctggcacatagtggacattcaaaacacatttgttaaatgaaaggattcatcctaaagttaaggatggttcagtaaatcggatggaagatgatgaaaaattaagcaattagaaaaaaactgtccttgtgtaatgtgtcaacatggaaacaggacataatgtaaacatcagaatcccttgctgtgattctggtttttgtggctctggttacattgtttttttgtgtgtgtttttttttttttttgctttcccgtttcttaaacattggcgttcccaagtttctccttggtcctcctgtcatttttatctactctcgtagcttcaaataccatctagtttatagtttatttagcatgttgtccaagccaccgtcttgggcccagggctctacctgtagcttttcatccacacttctcaggttgcttcttacacagcgccatagtagttaaaatacggtctggggatagtcgtctcttcatcagtctccccctataaaatggaggactcatagtataagttgcctagaacatattagtaaggactcaataaatgtttgagtaggatgagctgggtggctcatgcctgtagtccctgcactttgggaagccgaggcgggtggatggcttgagcccaggagtttgagaccagcctgggcaacatggcgaaactccatctctataaaaaatacaaaaaaactagctggactcccagctgcttggtggctgaggtggaaggatcgcctgagccctggaggtggaagctgcagtgagccgagaatcgcaccactgcactccagcctgggcgacagagtgagatcctgtctcaataaataaataaataatcagttgagtgcatactgtgtgcccaactacctttaagaactttacatatgatcccggcagccctaaaaggtaagcatatctatctccattacacagattaactaatgaggaaaagctatgtttataatgaacagtgaccaaaaagtatgcaaacgttaaatgaggtgttaaagtggtgggattgtaggtggtttctttttttctttcaaaaatttgtttagtattgtagttaggctgtttgtgtgtatgcatgtgtatgtgtgtatgagtgcgtttgtgtgtgaccaaaacagtaactggcaaacgtaacaacaggaaattgtagggcagggtctgggaaaaggggaggaacccaaggtactgacaagcccagaccggactcccccgaagtgagcaggcagcaaaggctgagagtgccagctgcctgggcactgacggaccccacccacggaaacgatgccttatgaggaagctaacccgggccacttaccgacgacctgcgcaggcgtggcttgaggaaacgcccgctgtgggcggagccacccgaaaggctccggtcgggggcgggaacaggatcggcccgcgggctggcgtcgataggctgccgcagagacagggcgggctctgctaagcgacgcgcctcgccgtggggcggtgcctgcgcctgagcctctacgagagggaaggaacgctgctccgagctccgcgtcgcgtcgcgtagattcgcgtcgccgtcgacctcagaggcggggccggaagcgctacggtttgacccccgagtccctctgttcccgaaggggcggccgtctttctcccgacccgctccgcctcctctccttcttccccattacccggaggccgaagcccccagccagggcggggcggcgcagcccgagctcccggacccggaagaagcgccatctcccgcctccaccatggagcccaccgcaccgtccctcaccgaggaggacctcactgaagtgaagaaggacgtgagtaacgcagctgtgcccagggcgggcgggggcgggctgcagcccagcgggagacgaaagcggaagcctggagtccgaggacaaggaggatcctccaggtcggaggagcggaaagtcctagcacaggaggactgtggcgagccctgcatccgagggaccttggtggcagtgatcctccagtgatctgtcaatccaggttttacatcgctaaacgcagagcttgggctttgttgccaagtggtgttttgattcttgcccactcctcacccatctcctcatgctttccccccaactgggttcttggagatgcttcgttagggactggcggctcagattcatccttaagtcaggctgcctaggctgctcactcagcctagagcgaaggctgtaccaggtgaaggatcccaagcagtggaccaaaaatgtgaagctcttttgcataagggggcttgaggaagctcaacagctgaaagcacaacctggaattcccctagtaagcagacgcccacatatttaaattggggttgggggagtgaatacacgtagctgagaattaatgtacaggtaaacgtcgaaaatattcagtagctaaattatgctcttctcggatggtgcagaaccacataaaccttcatatttattcgtaacgaatggctttgttgagatatgacattctttttcctttgcgtttacttgttttgtcagatgagacctatatgagtatcactaaaatactttatctgaagtcaaatgaaaaacagaaactcaacatgaaacgtgttcttattgaacactgcagtacttttacaaagtcattttgatgaactggacaggatggcaactttttaaatgttcatccacttcaaatcccttcctcttccctgtaaggtttattacactgtactcacaattggtgtgactcaccagcagaaggaaactggatatgactgggagttgtgcttagtttcctcattcaacagagatttatggagcacttgctatatggaaagcactggccttgggtctggaaggatacaaaaaaatgaagatcagtttcctgctttacattctagttgagataagaatggaacataaataactactgtagaataaatgttgtcttattcatggtgagtgccagtaaaaccttgaacttccaagagctaggcctcctatgttccagatgctgtgtcacacagtttacaatgttcccacttaaccttcgcaacaacctctaaagaagataattgccattcccattttacagctaataaaacaggaactgagaaattacaagtggaaggaaataagatctgtatacaagtacagatgtgaagagtggcttccaggtctttgttcttctctgtcaattcattgatgttatctgtcttcaggatttcattttacgcctatatcagaaataaataaccttgaggaaaccatggatgggtttcaaaaggtctatgaaagaaactatgtgcatgcttttttcttagaggtttttttcatgatattttcaaaatgtcttctgatcttagagagttttaaaattatccacatatttggacttttctctccactctaggtccttatttccaaatgtctactggaaatctacttttatatcctacagattgctcaccttgtcaaatattgaacttttactatccttttcccaaagttgcttactgttgctgctgtattgcctttcttgatgaatggtgtgctaccaccctttgtcttgggacctcccacttctttagtgtctccccctcctcctatctagttatttgcctcattgtgttagttggatttagtacagtttaataaatatggattacatgctactgtgaggctgatactgtggttggttctaacagttcaaaaattaaaaatgaaaacacaatcctaacttgaaaagagctcaatttcttg

SEQ ID NO: 1879607 - DNA, 4001 bp, Homo sapiens; identical to SEQ ID NO: 1879602

SEQ ID NO: 1879608 - DNA, 4001 bp, Homo sapiens; identical to SEQ ID NO: 1879603

SEQ ID NO: 1879609 - DNA, 4001 bp, Homo sapiens
gtggttgggcgccagactgagggcgaagaccagcaggaaccccaggaccatggtcttggccgcgcgccggtgcgcgccggcggttgcagggcccgggcccgggccagagggcgccttgagcgcccgcgccaggctcacgttggccgcgagcaccagcaggaaggcggccgcgaaggccaccgtggcggaggccagccccgagcttgcccagcggtgctccaggcagggaggggccaggcccgccagccaggcgaaggcgcaggcagcgcgcgcggggcgccgtaggcaccgggccaggcgggcagccgccctgggcccgggaccgcgtacgaagccgcagcggcacacgctgatgagcgcggcgaagaccaccgccgcataggtggacacgtagtaggtggccccggccgcgtggcaggcggcctccgggccaggcccaggtagtaggtgagccacagctgcagcgtgagcgtgaagaactcatcaaccagagccaggttgaacaggtagagaagcagggcctggcccaggcgcccgccgctgcggatgaacattgccagggccgccacgttggctggcagccccaggcccagtgccaaggcataggccgcgggcaccacgatgaagcgagcagggtcatcccagaggctgcagccgccaacacccaggtccccaacactgctgttcatctctgaccttgaagtggcagaagaaaggttactgcggaggctagcgacaaaggcagcccccattccaccttctcccaccccagtctcctcttcttcagcccttgctgggaggggacactagaggcagagtccatgtgagagggaatgaagaccgaacctggccagcagctgctgagaggagggtatggactccagagtttttggtgacaaactgtgggaagcgaggaagaggcaggagtcctagataacttggaaatttccaaccttagtgactgagagggtagagatgcccctcacagatggagtatggttcatacatgttgggccacagacctgtgcagtaaacccacgtaggactgagccaacagggagttctggagaaacaggctgaaatataaagaagaggcctttccagaaaaagccccaacacccgcccccccctccccgcccccatccctgtgccacccagatgagaagcatggatggaggaatgggcttgcggtgcagtgcctatgcacactgacctcagacttgccttggtgaaggtcctctcccagagaggtgccccagcgcttgcctggagcacccttggctgggctgaaaagcttttgccactctcaagcctttcatcctgtttcctcccccctcactttttgaccacaaagaggtcctgggtcagactcaaacctctggacagaaaagcaaaaagtgcacagacccagcaatcaggcagattctagataacacacatctatttgccatgtgaccttgggcaaattactcagcttcactgagcctgtctttgctgcagtaaaatggagatgaaaatacctacctcacagggttgttgggaggattatgagaaaacctaagtaaaactgagccctgtggctgacactggggagatacttcattactgttagttcccttcccttctaggcagcacatagataaatgtgtacactcacacaggcacacacagtgtgtcagagacacagacaccccaggcacacaaaacaacacaaaaacatctgggcatattcctaccctcttcccaagggagtaagtgcacaaaccaatgtcctgttactatttgtgacacacttacacactcctaggatgtcctaaaactcagttcttccaaaatctgcatttttgcctttgagcatctcaggctccaatcctttctgagaccctgggtaactgtatttcctttcccaccttcctctattctgttctccatgcctgtagccccaccctgacccatcccctgccatcctaccagactgttcctttcttgcctcttgctataatggctgctggagttctctctggggtcctgactttaaggatctgagacaggggagaatcccctcccacccacacatcccagaccctcctatcgccagctaatcccaagaaacgacatgaagaatgggtccgacagctggaagggctggagcccacctgtggcagctatgagctgggtttttggggctgcagtagggccccaagggaagggagtgtcatcggaggacaagaaagccttcagcacagggagggagataaaaatgtattaggaagggcaggcagctgaacgtcatcgtgctgagctgacctagatttaggctgtagtttggggggcacgtttcctgaggcctggcttctccttgggctgctaaggaggcactgcttgggctcaagatcctcctgctgctgtcaatcccaactgctcgtacacaccagctgcccagcctactcctctagcaccctgactttcctgcagctgctgggcagtcctacagccaagcttggggggcccagtagctgcttatcagcctacagacccagacttggtaaacaggagccctcaatctaatgctagctgcgagaggttttactcaaagtccatcctggcaggagacgggctggcggtggcatcctggaaggggtggagaaagaataaggccaggatcctcggggctccaggctctactttcaggggcttcaaaattttcaagcaagatgggcacagtggctaatgcctgtaaccccagcactttgggaggccaaggcaggtggatcacctgaggtcagaagttcgagaccagcctggccaacatggtgaaaccccatctcaaaaaaaaaaaaattccaatcagaggggaaatgctgggaaagcagagcagatttcatcaccccagacaggtcatcccatctaccctcagattgaagagagctggggtgccatgcctgtccattttcagctttggcagctggtgcagtgaaaagtttgagttctggaatcaattaggacttagttctagttccaggtctgatatataggcactcaagctttccaaatgcattttctcatctgtaaaacaaatcaatatttaataatgactagcatttactgaacatttactatgtgccaggctatgaaatagttactatcattatccatagttttcaaataagctagtaagtgacagaaaccattgtctaccccctcttcttccttgctgaccagtgtgggtaaatcttagtctaagtccatcatgggaattccattctcctgccagtcattagtctaggaatggaaatgggacatagctctgcccagtgagatccatgcgaaaatctagggtcttctttttttttttttttttttttttttttttgagacggagtctcgctctgtcgcccaggccggactgcggactgcagtggcgcaatctcggctcactgcaagctccgcttcccgggttcacgccattctcctgcctcagcctcccgagtagctgggactacaggcgcccgccacagcgcccggctaattttttgtatttttagtagagacggggtttcaccttgttagccaggatggtctcgatctcctgacctcatgatccacccgcctcggcctcccaaagtgctgggattacaggcgtgagccaccgcgcccagccaaatctagggtcttctaaggcacccttcctctcttttcacctttcaatattatagcaaatgcactgtctggagctgctgcagctatttcgcaattctgagggcaatagccaatacactgaaagcagcagagcagaaagtttaaagaatgttgattcttgatgccatcattaggcaaactgaccaacattgaaactgaagtggttatctctggacctcttacatgagagaaaaggtttccttattgttttgacactaccatttatttagtgtaatctatctatccttactataggcagactacaccactatgctttcagactcagaagaaaaaaatccaac

SEQ ID NO: 1879610 - DNA, 4001 bp, Homo sapiens
ccatcttgagttaatttttatatgtgctgaaaggtaggggcccagtttcattcttttgcatatggctagccagttatctatcccaccaccatcgaataggggagtgctttccccactgcttatttttgttgattttgtcgaagatcagattgctgtaggtgtgtagctttatttttgggttctctatttgcttccattggtctatgtgtctttttttttttccagcaacatgctgttttggcaactgtagccttgtagtatagtttgaagttggatagtgtgatgcctctggctttgatcttggtcatttgatgaatgacattggtagtttgataggaatagtgttgaatctgtagattaccttcggcaatatggccattttaatgatattgattcttccaatccatgagcatggaatgtttttccatttgtttgtgtcatctatgatttctttaagcagtgtttcatagttctccttgtagagatctttcacctccttggttagatgtattccaaggtatttttttttttttttagcagatattgtaaatgggattgcattcttgatttggctctcagcttgaatgttattggtgtgtagaaatgctactgattttttttttttgagacggagtctggctctgtcgcccaggctggagtgcagtggcatgatctcggctcactgcaagctccgcctcccgggttcacgccattctcctgcctcagcctcccaagtagctgggactacaggcgactgccaccacacccggctaatttttttttttctatttttagaagagacggggttcaccgtgttagccaggatggtttcgatctcctgacctcgtgatccacccacctcggcctcccaaagtgctgggattacaggcgtgagccaccatgcctggtgaaatgctactgatttttgtacattaatttttgtattctgaaactttattgaagtctgaaaatatttttaataattttagtaatacttgtcatttaacactaagcttttaaaaaactgtaaattataaaagtaaccattttagcaatataaatgtatataaagaaaaatatcaagtcttctccctatcacggactgtgatctcactcttcctcagtatactataaatatcactcagcaacttttcccccttactttaatcaaggaattcccactaggacaataatatagagctaactcattcttcaataactgcataatagtccacagtgtagtaataccaaaatttattcaatcaatgccctattgatggataattgtttctagttttttgccattacaactaatgatgcaataaacatccttatacatttatcctttcacactaacgcttttatttataagaaacagattccttctcgggattgtttgatcaaaggaaatcctccttttttattataataggtagcatcccatactaaaaatgttgtcacaatttacactcactggtagtgtatgagagtgcccattttccccaaatgttatctcagctcttgatgttattataggctgactgatactttttgataaagcttatttgcatttgtctctactaaaagtggaaacattcactgtttcaatttagttgattgctgactgataggaagtttgcagtcttaggtctggtggatttaccaacttatgacaaggtccatctgacctagtaatagagaaagagcccaagggaaacacagcatatgaaaatctattgtttcagttcctgaatcagatacaggattcaaatgccacagataggttaaggaatttggttccaaatctattgctctcagattagtaagacagactctggaaaggaccagagcttaaaattacaacttaccatgttttatccagatgctgtttcttgtcctggagttctcgtttcaagctctccacttcaaccttcagctcaatgttctgaaaaacacacaggcattaatcgttattaactgccacagacactctttcctggatccaggttcctatttgagtcttgccttggtccacagcctctcacctcatctctgccctctttgtgacccttgacataattagggatttagttggatcagcaatctagtcaaggaagaataaactgtacagcttcagggtttcccctgagctacttatcaattttcccaacctatttatcattacccctggatcatgaacactgcttaagtctattcgttctctaaaccattgcaggacagagtatatattaaaataaatttttcctatctaatacaggttgttcctgaaaacgaaattgctggaataatacttttaatagaattatagtaatagaacaatacttttaaatgtctggggatttaattatttaaagaaatttggttgtaaacatttttaaaaacaatgcttttatcataaaattggaattttataaattaggtttgcttaaggtgagaggggactctgatggtaaagttatacagggaacaattaatttttattgaggtgaggatgcaacaagtaagatttggggaaacagaaataaggaaataaaaacatcccaagtgtgtctggtgcaggttaagtggcttagtgtgtggtaaggagtatagaaaatagtttgcaactagtttgtgaaaatcctgctaagacaactagataggccggccacggtggctcacacctataatcccagcactttgggaggccaaggcaggcagatcactcgaggtcaggctttagagaccagcctaaccaacatggtgaaacctcatctctgctaaaaatacaaaaattagctgggcgtggtgacatgcgcctgtaatcccagctacttgggaggctgaaacaggagaatcgcttgaacccaggaggtggaggttgcagtcagccaagatcatgctgctgcactccagcctgggtgacagagagagactctgtctcaaaataaaaaaaattaaaaaagtaaaaaactggataataatcagtagaaatcaaagacttatcagggagctttaagcaaagtattggcatgatcgggtccatgttgaagaaggaattatgaagaaggtgggtgggtcaggggcaactaaccagaatagggagggggactgtctaaggacaagaggtacagggagaaagactcaaaagccatttcagagacagaagccacaggccttgatgacttgtgagattcagattagactggagggaggaccaaagacaatgctgaaatttccagcatgtcagtgggaatgcattctattaactaaaataggggcaggtttgtaggggaacctaaggaggtttctgcaaaatgttaattgagggattactttatttcagcttaaacgttagcatgcaaagatggattagtcccttccctgatgaagtccataatacagtattaggcaagaagaatgttatttagtaaagaagtctttagatcagaggttgacagagagactgaaggtaaagtagctaaagtatgaaaagtagtattgtgggtactagaacagtagggaggattttactttactatcgccatataataaccaccaacacctagacttctagaagtccaaggcaacatacaatagcagcatattttctaccatacttgtgaaggcatttcataacccatgtttccatgcagggtggtcgaaacacaaatactaattgggaaaagtagaaacctagtttagatatttgagagttacttagaattaaagaattttagagctggaaggcagttggactcaaggcattttagatcatattactagtatgtttttagtgacatactgagaagaatgtttgttcccctcataagtaggtaccttttgaccaaggttagaacatagattcagatccagtgagatgaaaatatcctaatttcttcaaaagaaggaatgatagccctgtcttttcaggatatactttaaagttattattttatgaacactaaatagcattaccagatttagcaaataaaaatata

SEQ ID NO: 1879611 - DNA, 4001 bp, Homo sapiens
gagttaatttttatatgtgctgaaaggtaggggcccagtttcattcttttgcatatggctagccagttatctatcccaccaccatcgaataggggagtgctttccccactgcttatttttgttgattttgtcgaagatcagattgctgtaggtgtgtagctttatttttgggttctctatttgcttccattggtctatgtgtctttttttttttccagcaacatgctgttttggcaactgtagccttgtagtatagtttgaagttggatagtgtgatgcctctggctttgatcttggtcatttgatgaatgacattggtagtttgataggaatagtgttgaatctgtagattactttgggcagtatggccattttaatgatattgattcttccaatccatgagcatggaatgtttttccatttgtttgtgtcatttatgatttcttttagcagtgtttcatagttctccttgtagagatctttcacctccttggttagatgtattccaaggtattttttttttagcggatattgtaaatgggattgcattcttgatttggctctcagcttgaatgttattggtgtgtagaaatgctactgatttttttttttttttttttttgagacggagtctggctctgtcgcccaggctggagtgcagtgatatgatctcggctcactgcaagctccgcctcccgggttcacgccattctcctgcctcagcctcccaagtagctgggacaacaggcgactgccaccacacccggctaatttttttttttttgtatttttagtagagacggtgttcaccgtgttagccaggatggtctcgatctcctgacctcgtgatccacccacctcggcctcccaaattgctgggattacaggcgtgagccaccgtgcctggtgaaatgctactgatttttgtacattaatttttgtattctgaaactttattgaagtctgaaaatatttttaataattttagtaatacttgtcatttaacactaagcttttaaaaaactgtaaattacaaaagtaaccattttagcaatataaatatatataaagaaaaatatcaagtcttctccctatcacggactgtgatctcactcttcctcaatatactataattatcactcagcaactttccccccttactttaatcaaggaattcccactaggacaataatatagagctaactcattcttcaataactacataatagtccacagtgtagtaataccaaaatttattcaatcaatgccctattgatggataattgtttctagttttttgccattacaactaatgatgcaataaacatccttatacatttatcctttcacactaacgcttttatttataagaaacagattccttctcgggattgtttgatcaaaggaaatcctccttttttactataataggtagcatcccatactaaaaatgttgtcacaatttacactcactggtagtgtatgagagtgcccattttccccaaacgttatctcagctcttgatgttattataggctgactgatactttttgataaagcttatttgcatttgtctctactgaaagtggaaacattcactgtttcaatttagttgattgctgactaataggaagtttgcaatcttaggtctggtggatttaccaacttatgacaaggtccatctgacctagtaatagagagagagcccaagggaaacacagcatatgaaaatctattgtttcagttcctgaatcagacacaggattcaaatgccacagataggttaaggaatttggttccaaatctattgctctcagattagtaagacagactctggaaaggaccagagcttaaaattacaacttaccatgttttatccagatgctgtttcttgtcctggagttctcgtttcaagctctccacttcaaccttcagctcagtgttctgaaaaacacacaggcattaatcgttattaactgccacagacactctttcctggatccaggttcctatttgagtcttgccttggtccacagcctctcacctcatctctgccctctttgtgacccttgacataattagggatttagttggatcagcaatctagtcaaggaagaataaactgtacagcttcagggtttcccctgagctacttatcaattttcccaacctatttatcattacccctggatcatgaacactgcttaagtctattcgttctctaaaccattgcaggacagagtatatattaaaataaatttttcctatctaatacaggttgttcctgaaaacgaaattgctggaataatacttttaatagaattatagtaatagaacaatacttttaaatgtctggggatttaattatttaaagaaatttggttgtaaacatttttaaaaacaatgcttttatcataaaattggaattttataaattaggtttgcttaaggtgagaggggactctgatggtaaagttatacagggaacaattaatttttattgaggtgaggatgcaacaagtaagatttggggaaacagaaataaggaaataaaaacatcccaagtgtgtctggtgcaggttaagtggcttagtgtgtggtaaggagtatagaaaatagtttgcaactagtttgtgaaaatcctgctaagacaactagataggccggccacggtggctcacacctataatcccagcactttgggaggccaaggcaggcagatcactcgaggtcaggctttagagaccagcctaaccaacatggtgaaacctcatctctgctaaaaatacaaaaattagctgggcgtggtgacatgcgcctgtaatcccagctacttgggaggctgaaacaggagaatcgcttgaacccaggaggtggaggttgcagtcagccaagatcatgctgctgcactccagcctgggtgacagagagagactctgtctcaaaataaaaaaaattaaaaaagtaaaaaactggataataatcagtagaaatcaaagacttatcagggagctttaagcaaagtattggcatgatcgggtccatgttgaagaaggaattatgaagaaggtgggtgggtcaggggcaactaaccagaatagggagggggactgtctaaggacaagaggtacagggagaaagactcaaaagccatttcagagacagaagccacaggccttgatgacttgtgagattcagattagactggagggaggaccaaagacaatgctgaaatttccagcatgtcagtgagaatgcattctattaactaaaataggggcagatttgtaggggaacctaaggaggtttctgcaaaatgttaattgagggattactttatttcagcttaaacgttagcatgcaaagatggattagtcccttccctgatgaagtccataatacagtattaggcaagaagaatgttatttagtaaagaagtctttagatcagaggttgacagagagactgaaggtaaagtagctaaagtatgaaaagtagtattgtgggtactagaacagtagggaggattttactttactatcgccatataataaccaccaacacctagacttctagaagtccaaggcaacacacaatagcagcatattttctaccatacttgtgaaggcatttcataacccatgtttccatgcagggtggtcgaaacacaaatactaattgggaaaagtagaaacctggtttagatatttgagagttacttagaattaaagaattttagagctggaaggcagttggactcaaggcattttagatcatattactagtacttttttgtgacatactgagaagaatgtttattcccctcataagtaggtaccttttgaccaaggttagaacatagattcagatccagtgagatgaaaatatcctaatttcttcaaaagaagggaatgatagccctgtcttttcaggatatcctttaaagttattattttatgaacactaaatagcattaccagatttagcaaataaaaatataa

SEQ ID NO: 1879612 - DNA, 4001 bp, Homo sapiens
tggcccacagaagggatgagggaatgagaaggggctagggataagaatgaacgaaaatggaaaaactaaaacagaatgatttaaaatgtgcaaatacactttgcaacctccacctttcaatttaggaattgatatatatgtacaatgagatccatgtaggctaaagtgagtttcactttgtagttgaagctacttgtaccagttctatcattagtaagtcaccgtttaattctgccaaagtcagacaaggatctttctggttagtgcaaacaaggtttttcatcttgggctgcagtctgacccgccagtgctcagtaggcaagcttgtgatgaattcaaacactttccagttccccacctccaatggcagccagggtctccagactgtttaagcactccaagcttcttccaagaatttcttctagccgactgcataacacctgagccccctccagttccacctgcagagtttggtctctctcagagcttattaaacatgcctcacagaaggaaaatggattagctatcaactgtagtgagtccgtatttgcttccaaagaaccatcaatgccattttgagccacacgattttgtaaagtaattattctccaggacacaataaatgaatgtagtctttgtgtggctttcgtgttcactgctgatagattagtaaggaccattgctttttttaaaagcttaccccttatgctagattctgggccaatttcacataaaattatagctcctaagacttatttcacacccctatagcccaaacgagaaatttcgttatttggctaaaagcttttgtttctgaaaaactaaaacccaggacaaactaaatataaactggagcaagactgagccaagtagaaccactactgaagatatttgttttctcatttgttatcaaacttgacggtgggatggtgtgctgaaaaggaatctggttcataaaaactaaagctccagaggttctttaaaaggtaatacaatcaactggtcctatcatacctttcctctgccttcattttcctggtagaaagaaaacatttttaaagcccaacaataaattacaagaaactgaatagcaaataataataataataataattgaaaaagaggaaaaagagctagtaggggaggcaaaatgagaaaaaaaaatgaagagaatagaaaatgatccagagaggtatcatatatgtgaccaaaaatcaagaggtagaagaaaatgtattcatcatgatagttatcggcggtcccaggatgatattagccatcccaattattatattttctttgatgatattaaatgaatatcagagcccattatagccttacttttttttttttttttttttttgagatggagtctttctctgtcacccagaatggagtgcagtggtgcgatctcggctcactgcaacctctgcctcccaggttcaagtgattctcctgcctcagcctcccgagtagctgggactacaggcgtgcactaactcacccagctaatttttatatttttagtagagacagggtatagccttatgtttgtaatagaacagcctttaacaggacatggatcacagaaaagaaatgaacatacattgagtgcttagtatatacaaggcattgttttagacaccaaagctgtcttcttatttaatctctgcaatagctgtatgaaacaggcactattcccgacttaagattttgacactgaggctcagagcaattcataaaacaaatgacaaagtgggtggccctggtaattgtccctgttttttctcccctcttcagtatcataagcatctgcacttaatgaagaataaaaggcataaaaagaatacaatagtaaaagaaataaaaatttcaataaagaataaaagaaaaaacagccactctcttacctctctggatgggcatggaacttcaccagactgctatagagctgtctctctgcttgtaaggcctcactgagccgactccgttcatctactagtccttctagcatcagcagcaactgagaaaagaagagagaagaagcaatacgcaaatggcacagtgagacatgaaaccacagttaatcctgagaaacaagaaaatgcattagcatgtactatgacttaaaaagcccactatcttagtacttaagcttttgatactattttatggtttttgaatcagtgtcatattatcttttttttaatctttaaaacctgtaaggtagaattcaaacatgggagcaaaaagaagaaaaaggagagaagctagaagcacaggaaagcagctaagagaaaagagtaagagggaaacaggacaagcaagagggaaatgtatgtaataggacttactagtattcttcattcattcaattaatatttactgagcaccttctatgggacagactctgttctaggttctagggggaagcttactatctaggggaggaaaaagacattcattaatcatagatgtgtgtcattgtgagtgtaataagtgctataaaggtaatgagctatgataatgtataaccagagttgtttaaggtagagttaaaagccagaatggagtggggtgagtagttagtgagagagatgagtcttttggaaaagtctggcattgaagaaaagttaaatggggctgtagctacaaagaaatttggggcaaatgtaggggtttctttctctttctttttttttttttgactgggagagatttgaacatggttaaatgcagataaaagagaaagattcagttgagagggaggtgacttaggtatgagtgtgaggataactattggtatgtgtccaaaagaactgctgctcttttcagaactacaaatgtcagaaaggggcatctatagctgctaccgaccaaagtaagaaacttcagagcacagtttctctctgaaataccatcaactaaccctccacaaatagctgagattgacagctttaccatggtttatttcacagtagaaaaattaagtttgagccaggcatggtggtgtgcacctgcagctccagctactcaggaggctgaggcaggaagattccttgagccccagagtttgaggctgcagtaagctatgatcgtaccactgcactccagcctgggtgacacagtgagaccctgtctcaatgtggtgactcatgcctgtatgtaattccagcactttgaggggctgaggaggacagctcacttgcagtcaagagttcaagactagcctgatcaacatggtgaaactccatctctactaaaaaaaaaaaaatacaaaaaaagtaaataaataaataaggtttatattccaataacttacctgttgtctttggtttcctgaaatttcttgaccctgggattctactgaagcaactttttcccaaagaagtaagacttcctgggtcaggcgtttcatagctcttatgtcttcaggatcaaccagttgcatttgcaggtcctagaagtcaaaaaataagtgtggatgtgaaaatagtaataaaaggattattcagcagaggggagcatgggaacaaatgttcttgaaatattctgcctatactttcaagtgggatatggataatcactggccaagggagtcaatgtgtgcaaatattgtctgaagaggccctacaagtattctgagctgtgaacatttccagtggtctttaaaaagttttgaaagacctttatgagatcttctttccatatcagcagcctgcacctgcagctcttcttcctgcacagccatcatggactgtagagcagaaagttccatctgtgaaaagaggaaacaatgtctgccatgtttacattttaacactgaggcaaatgcttttgcatatcatatcactatcagccagtaatgcaaaagaaaacgagaacatgaatagggctctacagcatcaaatcaataatccatgcagtatggtaacaaaggatgttttatgggaagatgtcatagttgttcttaatgatgtcttccactttagctggcacta

SEQ ID NO: 1879613 - DNA, 4001 bp, Homo sapiens
agctgtgcctgttgaggctgctggcaggcaggcagaaatttggcctggggcagctgccatgaggcaagagctgggcctggaaaaagcccctgggaggcaagagcagggcctgcagaggctgttctcaagtcaaagctgggcctgttgatgccaccgggaagcagaaggtgggcctggagagtttgacttgaggaagttttgggcctacattggccgccattagctggacaggaactgggccaaaaaaggctgttgtgaggcagcagttgtgcctgtagacccagccaagaggaagaggtgggcctggagaagcccccatgaggcagaggttgggcctgtagacgctgacaggaggcaggagctgggcctggacaggtcaacttgaggagattttgggccttcataggccaccaggaggcagcagttgggactagagagtctgacttgagtaagttttgggcccggagatgatgtcctgggacaggagttggccgtggagaggccaccgtgaggcataagctggatgtagagaggccagtgtgaggcaagacctgggcctgtctaggctgctgggagacaggcaggaatctggccagggaaggttgccatgagacaaaagttgggcctggaaaggcccttgtgaagcatgagcttggcctaaagaggccactgggtggcaggagctgggtgtgtagaagctgctgaaaggttgggagcttggcttggggggtccacagtgaggtagaagctgggcgtgaagaatctgctgtgaggcagacgttgggactgtagaggctgacgggaggcagaggctgggcctggaggggccaccaagatgcaggagctgggcctggagaggctgcaaagaagcatgagctgggcctggtgaggtcaacttgagaaagttcagggcctggagagaaggctgggaggcaggagctgggtctaaagaggccattgtaacgatggagctgtgcctgtggaggctgttgtgaggcagtagcctcatctgcggaggctgccgtgacgtagggtatgggcctaaataggccattgagagtcatgagcttggtctgtagaggctgactggagaaagttctgggcctggagaggctgccgggaggtaggagctgggccaaaagatgtaagcacatttgcatttattaggcactttatttccattattacactgtaatatataataaaataattatggaactcaccataatgtagaatcagtgggcgtgttaagcttgttttcctgcaactggatgttcccacctgagcgtgatgggagaaagtaacagatcaataggtattagattctcataaggacagcgcaacctcgatccctcacatgcacggttcacaacagggtgcgttctcctatgagaatctaatgctgctgctcatctgagaaggtggagctcaggcgggaatgtgagcaaaggggagtggctgtaaatacagacgaagcttccctcactccctcactcgacaccgctcacctcctgctgtgtggctccttgcggctccatggctcaggggttggggacccctgctcaagtgcatccaaaacgacccttcccacaccagtcttcacagtggtcaagggcagcaaccacttagctcccaaggcatgtgcctcagctggcatttcgtcacaatcaacagtaagtggtagcttgagtcactgtgaggtcacctactggaaatcaccagcatcccatttcccactggcaaagagctcagcactgccccctgggaaaccaaacctatgcccaaatcccatctgtgtgggtttacctcctgggacccttcctaacatataaccttcataacatacttgagaggctgaggtgagacaatcgatttagcccaggagtttgagatcagcctggacgacataactaaatctcatctctacaaggacgaggtgggaggatcacttgagcccaggaatttgtggccagcctgggcaacaaaagaagaccccatctggccaacatggccaacctggccaccacggtgaaactctgactctacaaaaatgatctgggcatgggtgacatgcgtgtgtagtcctagctacttgggaggttgagatgggaggattgcttgatctcagaaggccaaagctatagtgagctatgatcacatcactgcactccagcctggatggcacaggaagattctgtctcaaaaaaaagaaaagaaatatatatttaatctctgtccctggttcctggcacagagcttctaaagctcttacaaagacctcagtgatagatgtgacaggagcatcttttgttttaatatttggtcttggtcccaggtttctaacacaagagcctctaagaactttgggatctccagcatggtaagaatgcatttggggatgttgttgagatgactgggtgactgcaagctcctaaatttcttcaagaggagggctgattaccatgcaaccacatggtaagaggcttggaactttcagcctcatgcactgaactccagggggaagaggggctggagactgacttaatcaccaacagccaaaggttttatcaatcatgcttgcataataaagcctccataaacaccctgaaaggggtttgcagagctttcagggttgctggacacaggagatgctgggagggtcgcatgttcaacagagggcatgggagctctgtgcccctccgaacttaacttgccctgggtatctttcttttttttgagacaggatcaggctcttttgtccaagctggagtgcagtggcacaatctcagcttactgtaacctaagcctccccagtccccagctcaaggtatcctctcatctcagcttccctagtagttggaactctaggtgcacaacaccacaccagttattattattattttttaattttttatagagacaggttttcaccatgttgcccaggctggtctcaaactcctgagtttaagcgatcctcccaccttggcctcccaaagtgctgagattacaggcatgagccactgcatccagcatgcacgtctctttcattgactgtttctgagatgtatccttcacaatgaaccagtaataggaaatgaactggccagatgtggtggctcacatctgtaatcccagcactttcagaggctgaggtgggaggatcacttgagaccaggaatttgtggccagcctggccaacacaacaagaccccatctatacaaaaaataaaagaaactagccagatgtggtggtgcaggcatgtagtctcagctactagggaggctgaggtgggagaaccactggaacccagacaatcaaggctgcaatgagctatgactgcaccattgcacaccagcctgggcaacaaaataagaccctctctctcagaaaaaaagaaaataaactgtttttctgagttccgtaaactgttctagcaaattattaaacccaagaagacagttacgggaacccccgattggtaacaggttggtcaaaagtatggtgacaacttaggacttgccattgtcatctgaagtgaggatggcctcgtgggactgagcccctaacttgtggggtctgtgctaactccaggtagtgtcagaataaagtcatgggatacccagttaatatccagagcactgaagaatctggtgtagaaactccatacgtacattcagtcggaagtgtgtgagtagagacaaacatgggcttttctgtcacctacctgcttaactgcataggagaggcaatatgtggtgctcatgaacaaagcaaacattaaagtcagaccagacccaacatttgactcagtcttaatatccaggtgagcctgcgcaaatcattcattattcctaaggttttcatcactccattcataaaatggggataactgtggcacctacatgtgattctgtgagaattaacgaaatattatgcttggggttattgtgatcattatacctgttccaaactatttgacaaggacagtgatggatgaaga

SEQ ID NO: 1879614 - DNA, 4001 bp, Homo sapiens
tgtggttaaatactccattggggaaattgccagtgatgccctaggctgcaggcttccctggttgcctacttcctcaattccgtgcccatcatgtgtggatgtattatcatgcatgaagagggtcacagaatcacagagcgcctcactctctcacacagatcctcacgcacaatgtcatgatggatatcttcaccagctggtaggcagccaaccactgaatctccaagccactccgaccaaacttactctgtcttttgtagcagggatgctcaccccttcctaattgcagctccgaatattcagatggggacagtgaagcacagatctcaggagtcctaagtattcatggctaccactaagttggataggtgagtaggaaatgctagaaggggtgaaagcctatagaaaggaggaaaagagagactgaaagatgaagtagaaaggaaatgcatgacaaagagtgagagagatggagagagacagaaatagaagcagggagtgccacaccagaagagtggaaacagagatgggctggggagagtcctaggccccattcccctcctcgccatcagccggccctcctctgctctgcctgatccagtgccagctatctcctgatgccccatcttgggtctggctctttctagaccaagggctgaaggctaatccttgtccccatgcccaaaggtaatccattttgcttcttggactgaagtgaacattttagggcccagatgtcctgcctctcgtcacttccaggctgaccctggagcctcagaaccctcaatttccttgttacaggagtaaagacaaccccctcctcccccacaaagctggataaaaagcttaaagaagaaattaattgagaatgatattaaaggaaataaactacaggactgcttgaatttggggcccagttataatttaaaataggaaagctggacccctactctctcccttccaacccctctgcctctccgtgattacttccaacttcaggcagaagactgacagacttgagtgcctgggagtcccctcctgcccaatacagggacctctaggtccttgcagctgtctgggatggcccctcccctcaggcttaggcagctgcaacagatgtggaagagggacgggcagcaactcttaatcttcaggcttccttctcgaatttacagaggatttggaaccaaacgttagaagggataatctaccacgacttaatgtcaaaatgcacagaaattcttttggtgctgccacctcctccacaggtggttatcccaattgccaggcttctcaaagcactcccagggcctggctcttcttaccccagtgcccatggagctcccacctgtcccaccctaaaaggtcagtatataatggtccttacctcctgcccctcttccccagcatcctcagttggtttgacctttgtcagggctgtgcctggggccagcttggaaggagagggaggcaggaaggaaggaaggtgtgaggaagcggtgagcctagcacagaaagctgggagggaagaggactgacttcctggcagccggggctccggttcctgattcctgccctggtatcctgtcccaagaatggcctccgcccagactgcctggtgatccctgagcagctctctgcactgctccagaaatcaggaggatttttcagagcccagagagcagatttctccacgagccctaaggaaatctgaatctctggtgaggaaagtgacatggaggatgaaggaaacaagctctgccaagccccaccatggccaggccagaccagcccaggtacaactgttgatcagtgagaattgagagcagttcccctaaacaacactccctttgcttcttctgccatactaaggcctaggcaaatggatctctccaagaagggaggcaactgggctgcctttccttgtaccgtcagggggccttattcctatcctttctgtcccttcttactcaccattccctacactcctcccatctagtggtgtcatcctaacgactgggggtggggggcacccagaactgaggttgctatagtaacagatgagatgaggctacagccttctatagttgtggactgtatgctctcctccccctcgccccccatgcctcatttgcagccttagtctctttctgtctcccaactccagctctctttctccattctgtaggctcccctcacccctctggatgtgagcctgtggttatatgccttcttacacatgctcttggctggtttagacacatacaaacacacacatgacagatactcacagccagtgcacccacagccatatatccagtgctggcacatacacctccattaccagaacatccaaacacacccacagatacccagccactgcctcctccagagctgtgcccacaacccggggattagcatccataagatccgagcacacacacatttctcctctgccactttaacattcctacccccatctctcttaggggcctccttgtatctttcactctcttagaaagctcctacccactgcccccaagtctttgtgggtgagtgtgttacacacattaatctcttcccgcctacctcctctgtagatctgttttagattcaaagccctaaatctgaactcctcccgacacacacacacacacacacacacagacacacacacagatgcactctttcctcccgcaggatctgtaatatttacaaactctccttccatatgaaagcagggaagtataacccccaatcctgcccccttttccagctgagggcttggccccagagtttcctccactggggcagggtcttcttgtctcctgctgcgctttcccttccagttgtactcatgcccccctactcattcttatctccatctctagtcccctccccatcatccccctcacccgtacccccctccttctgtccttggattatcagtgaagtgaggggggttgggctccagagcttgctgctgtgacctagatttcaaggcagagacagttcctggtgctgacagtcagagagcattgttcctggcccggcctggcagggccactgctgggcccttctgtctggttgcacctgggtgtgcaactgagcatgcctatgactgcctgtttcttgcgggggtcatggtagccctcctgtctggctcattgtctgcctgtgtcatggtgcctgccaccaagggaggcttgtttattctggtccaggtagggggctgggaatggggacttctgggtctgtatctcttattttgtgaccaccatgccaatctcagttcccctgcagtagagcaagaaggaaaatgtgaatgtgtcaaccaagcccctttgatctgccacattcccagcctaatgctggggtgatttgcaggcagcctccgtcagggacaaggtcatcttgctgcttgcccaccccttggtctagtcgcatacagagtgtttatgatacaatttactttttaaaacatgctttacttttctgactaaaaggaaatagatactcattgtggaaataagttccatttttgagcttaccactagtgtcacattttatcaaatccagaaagtccattcaaacatctgaccttctttcttctgtcttagccacagttcctatcttagtggaaggaaggccttgaatgttctctacttctcacctaaggatcatgaaagagggatagggtgaaagcctaggtgagatctggccttgctgatctcatcagaccatgctgaaggtagtgccagtaggatgttgatacgatacgagaagggggggcagtccccttttgccattctcccaaagccgcatctaaagtcccctccccccaccacccagccagcctgggaactgggcagggggccagagccagttgcttggtattcttgggcacgggggctgcaggcacagcacaaagggtaggagagagagctgagtgggggcctggtaaccatcaaaggagaaaatgggctccacaaaggtggggg

SEQ ID NO: 1879615 - DNA, 4001 bp, Homo sapiens
gaaaatacaaataattacaagagacttctgattctggcagcattttgaactagattagttaaaactttattataaaacaatgaaaaattaataaaacagggcaaacatcttttctcattgttttccagggctgacacaagtaaataccacattccttcctcagtccccacaaaggtcatgtccttctcacataagaaatacattcatcccaacccaacatcctcaaaagtattaacccattctagcatcaactcgaaatccaaatctcatctaaatcaagaatgggtaagattacaggtatgaatcatgctggggagaagttcatctccagctgtgaacctggaaaaacagacaagttatctgcttccaaaatacaatggtgacaggtaaaggatagacattctcatttcagatgaaagaaattagaaggaaggggatcttgtatcccaagcaagtcagaaacatagcatgacaaattccattagattttgacgcttgagaatcatcctctttgccaccttgctctgttctctgggcccacactggggtggtggactgatcctacaggcccacccaggcaacaaccccaccttctcaggcctgggtggtagctccactttccggagccaaggagaagatagctccatctcctgggcctgtgtcctctgggcccatgttggcagcccagctggactctacattcgtggttctgcaaagttattcttccttcatttcatcctgtctctgtctcttttcctcgagactagcaatgtttctgcttgggtaaaattctcaaaaatcttgtgcaatttacaagggtttgcaccatcagaaaaagtcttctacagatcatttctgactaactacatctctattactgacttctactgagatcgattgattggattcatgagtcacatgcctaatatctttagcaaatgattgtccagccacccccttgtcactgtgtccagagcatgctatctggataggctgagaatcttccaaatcattaagtgttacttttttttagttgcttagttgtttcttcttccatttatctgtctcctttcattttatcacagtagcaagaagaaaactggctgtacctttaattctttgtttagaaatcccctcagctaaatatcatcaaaaggtctaatttccacaaaacactggaacacaatttggccaagttctctgccacttttatttatttattttatttttttatagttggattattttttattctaatgttacttgaataagaacaaaattaaaataaacacacaaaaaaatgcctctgtgaatcagtcacagggttcctgtaagtctgggctggtgtcctttctcttctgcttgcctagctctttgatggtctctgtctctgcaggactaaacttggaggttagcgtcacattgtcataatcaaattcctcatcaagtgagaagggttgagcttcatctccacatatctcttccatctgtttgtccattctttttacagtaggctttggcttcacttcacaggtgggaggctgggccacagaaggatacaggaaggaatgctggtgcttacatcctactccacttctcctgggagcagcagcaaatcctcacttttttggggtttattctcttcatccatgtccaaatcttccaaatctaggaaattgtctacctgttcttccaaacattgtgatgaagtacgaagaaaaatggttttatttctaagatggtagtcattagcttcatttttatgagtaacttttgcttaggtaaaaatgttttccgaagaatcagttccaaacactccccttttggacacaagatcctcttgtgaaagatgagtaaaagtgttcagaaattcttcatcatatgtttgctcatgacaattaaggaatttatccaggacttctttgattaattgatcttcatgcattattttcaatcctgatgtatgagcccacattcctattcacgaggccacagtatctatgagtgaaaacatgtagtgtttgtctttctgtccatgcaatagtttgctcagagttatggtttccagcttcatccatgtccctacaaaggacatatttatttattttttaaagttttgtttttatttgaaatggtggactatattgcccagggtggtttcaaactcctgtatcaagctatcctcccacctcagcctcccaaagtgttgggattacaggcataaactaccatgactggcctctaccactttataatgagaattgcctttcctcaagtttccagattacagattactaattcctggagatatttcagctgtgtcttttattttcatcagcatagagaatactcaaaatccttgcctctcccatgacacaggtgcctaatttctgtgataattatggtatattaatcagtgttctcccgaggaagtgtgtgtgtgaaggtgtgtatgtgtgaggagggacagacagacagaaaaaaaagagaaagagacagagacagagaaagatttgttttaaggaattggatcagctgtggggctggcaagtctgacatccagagggcaggtctgcaggctggacattcaggtaagagttgatgttgcagtcttcagttcaaaattcgcaaagcagcgggttagaaacccagggtagatttttacatttcagtcttgaaaagaacacctttttctttagagaacgtttgtctttttaaagatcttcaactgatgagttgagtcgcattcacattatagagggtaatttgcattactcaatgtctgctttgagtttaaatattaattacatctaaaagctacctatatagtgccatctagatggtgttttaccaaagaactgggcacattaggctagccaagttgatacataaaattaatgtcaagaaaatgacacctgttaccacctccaggggaggagtcccactaagtggaagatagaaaagtgtataagagtgcccaccatcaggagcagcagtccccagatgtcttcccactgcctggtttgcaaggtattgtaattgccaagagacacatgactcacataggtattagatggagcaactcttcactcacatagaaatagtgcaagatcagctttaatagtgcctatggccggtgggtttgttccacagccaatacaaggagatggggtctgtacacagtcgtcttgtgctacaggtaaagcaccccattctgtccctattgggaatagatataacagtgagggtggccaggtgttatatgacatacacactttaagtagaacaaaaagcatctatcaagaccagaatagagagacacactcccgaacacagtgatatgcccatcaaaaggctatgagggctccttatcaccctgtaaggaagtgtcccaggcccaaagccactcttatgtggtcatgaaggggttgaaagactgtgcacatgagaccacctttcccaatagtccacccctcccctgaccccttctgggacactgtaatgacagataaaacctattaaatctgacaagaccactacctgcctcaaattgaaagatggagctgggtttgagtctgctgtgcctctgaacaacctgtatgcatgcagtttgctttcagagcctccttgtcattttgagacagcacttcatcaggttcactggaagaaccagacccaggaggatgatcaggccttcctggaaaatggtcctcaaccaacaacatgagtgcttggattaagccaactaaagaggtaaaaaaaaatgagtgtagagagaatgcaggtgtacagctaataaccatccagttgagcaccccaccttctccaattcagtttctacattccctaaattattaaggtataaacagcaacaagtgttggcaatacctacctgtttggccagcacataattgaaggctattcagttatctatcactatggtggtgagtgagttcagtgagacttactggtcttgaagcatgaagaacatccaagttgtc

SEQ ID NO: 1879616 - DNA, 4001 bp, Homo sapiens
tgtctctctaaaataataactggtcacagccggcaccagggaaaggcagtctcccaatggctagaaaatacctacaactggtgatcagcagcttctggataggatcttaggagttggctgagtgggctcacaggtgtgaactaagaggcaaaatggtggcatttaactggtactcatatatgaccttcttctaggaacacttgactagtaagcgaagaatgcctcaagtgagcatgcgtacaacctcagttaacacactgagcatgtggtccctcccaagtgctggcaggccactgcacatgcagacagcccacctcaagggaagaatcaggggaaaagggacacaaccccctggaagcatgccaatgtataaaaccccaagtcaaaggtcaagcagcgcacttgaatctctcaagttgcccgcctggccctcttccaagtgtacattacttcgtttcattcttgctctaactttcactcctgctctaaaacgtgccttggcctctccctctgccttatgcctctcggtagaattctttctttggaggaggcaagaattgaggttgctgcagacccatacagatttgctgctgctaacacactttggtgcatgagactcagatacattccctagtgctaacaacagcattacgtattcttacacaatgagttaaattagaaacgaaggaagtctctggagtactgatggaatccaagaggaccaacaatatttaaatagtaagttccagtggcaatgtcagaaagaacttcaagtaccttagggaggataacagttgatcaaacaaacaaatgtagaaaatttcatgtttactttaaagtcacgtaagtgtacaatggcattaagtacatttacaatgttgtgtgaccactgtcactacccatcttcaaaactttttcatcatccaaaactgaaatcctgcactccttaaaaaataactccccctaaacaataaaattcatggttttcaagacaaaatacaattcttgaacattttacaataagctaaagtagattaaaatgactttgagcatacaacaggagcagtcaggcttagattgctgcaaaaaggctttgcaggctggacaccatgatttgtacctcaaatctggctgctatttcccacactcctaggtcccaaagaaatgtgggtgaggtcctgcggttgacacaccgtcactgtcatactactggaaaaacagcccaaactgttagcctcaatgatattgggtcaattgtgtcatcttcgtgtgggaagaatgccctaattatcattactccctttggacaaaattagcaagtcatttataaatcatttcactttcctccctatttgcctcctcccgcttccttcaggttccatccctcaaagtcattgggaaaagccttgcaaactggatagcagttttgtgcatttccggttcaagctgccttactcactttttttttttaatttaaaaaaactttggattttttgtagagacaggatcttgctatgttgcccaggatgttcctgaactccaggcctcaagcaatcctcccacctcggtctcccaaagtgctaggattacaggcatgagccaccacacctggttcaccttactcacttctattccaggacggttcaactatgatgttttggctcctcttctcaagcagctttccacacctggttccatgatctcttctggcacagtagctggtatttggcaaacataggtttcatcctgggatctcagggattgaaatctgtcctaggtgtgcaccagaaagtggtggcaagagatgaagcttcggaggaggctgacctcggccaggattcttaagtctcaaagtttcagctttctcacccctcaacggacatgaaatctacctatttgtaactccagggaagtaaatgagataatgtttggaagatatctagtctaccagctgctcaggcggggggcgaaggttctgttccctgtcccttctctatcaaatggctttaaaatcagaagaaagtattacgggtaggaaatgggactgcgaaaaaaatggaggctgattctggcctaaaggatacttatctctatacaaagggcttctgattcaaagaggccccgggattcaaaaacacaagcagagctacaccacgtggggtttgggacgagctgaattccggataaagatgcctgtaaagaggagttgatgcgaatccagaaaagcacttgaaatgcccaggctttgcatggcacattccccaggattttttcgcaccgcatttagaggtttagacggagtgagctcgaatcaggccaaaagccttaggttactcctgggcggcagcggggcagaggtcagatcaacaggtgtggaaggctgcgaggtgagggaagaagcaggtgtcggtggaggccccagttcctccggcccagaggctccaacgctgctattggtgttccagcagcgggcggaggggtcctgcccggcatctgggcgcgctgggcccagagcccgggaggaggcagacggaggcggcgggtcagcggcgggccagccccggtgggcttccgctcccctccgccggcccggtccggcccgccgcggaggatgcctggaggttgacgtgaatggcctgtggctgggaagcccccaggcgccctgcctagcccgggggcggggccgcctagccgccggccccggtggcgtgagggctggggcgggggccggggacctcgcggggagggagcgggagggaaagcggcccccgcggcccttcaattggccgcaccgcccctcggcgcagaggcgggaggaggcggccctccattggtcgggcccggcggccaatcctcgaaggcccaggcggaggcgggggcggcctgtggggaaccgaggtgcgggcggcgagcgaggcagccgggtgcttcgcagcggagctcgaggctctgtagcacccagttggacccagtcgcccaggcaccgcccgcgccccgcggccgtctcctgcgcctcccagaggagggagttcgagcatcccccgcggcggccactcctcggggccaggagcggggaagcgaagtgcgagagaccccggaccccagcgctgtctcttcccgccgcccgaaccaccatgacccacttcaacaagggcccttcctatgggctctcggccgaagtcaagaacaaggtacgcctggctcgggcgggcgcgggggcccccggggcacccttgggctggcctggcgctgggccgtgcttcgtttgctcttcgcgctgtggctcaccgttttcctggagaggggccgtcgaggcggcgcgagcgtctctgcctgtcccggtcgcgtccagtccccgggcttgcggggccggctcccgggcacccgcctggctttgttcccgcgccgtgggacaggactagtggctggcggtgggttcccgggcgcctggagtcccgcggcgccagcctttccggctgcgggggtctcgggggccgtttggtgactgcagaacgcgccctccgggaagggggcgctcctgcgtggccactcgcccttaggcggagcccgtctgcgcggccagggacccggcgagccgctgccgcagcccccgccatctgcccgggccccgggtgctggcggactccgcgcctccccacggggagagagaccgcctaatgtcccgccgaccccaggggccccgaggaacggaagccggtccgggacccatcacagtctccgatctcggtgcctgggaggcatttggaggcagattgctgctgctgcttctgctgttgcttttgcgggaaatggagacaaagcctgagcgcgccactgtgcgagtgatatctgcttaggcttgagactttttatgaaacactgagaagtttgaagtacattagactttcacgacataaaggattatttttgtgggttgcttttgtttggggcttgtttgctgaggcggcttatagtttggagcgattgggatttggtgacgc

SEQ ID NO: 1879617 - DNA, 4001 bp, Homo sapiens
ggtgctggagaggatgtggagaaataggaacacttttacactgttggtgggactgtaaactagttcaaccactgtggaagtcagtgtggtgattcctcagggatctagaactagaaataccatttgacccaggattccattactgggtatataccaaaaagactataaatcatgctgctataaagacacacgcacacgtatgtttattgcggcactattcacaatagcaaagacttggaaccaacccaaatgtccaacaatgatagactggattaagaaaatgtggcacgtatacaccatggaatactatgcagccataaaaatgatgagttcatgtcctttgtagggacatggatgaaattggaaatcatcattctcagtaaactatcgcaaggacaaaaaaacaaacaccgcatgttctcactcataggtgggaattgaacaatgagaacacatggacacacgaaggggaacatcacactctggggactgttgtggggtggggagaggggggagggatagcattaggagatatacctaacgctaaatgacgagttaatgggtgcagcacaccagcatggcacatgtatacatatgtaactaacctgcatattgtgcacatgtaccctaaaacttaaagtgtaataataatagtaaaaaaaaaaacataatttgtgaaataagaagaatgaaaaattttaagtaaataacattggagaaaaatcataatttgtgaaatatgaagaatgacaaatttccattttaaaaatataagtttttagtttttttcttactgcaaaaccaatccatgttcattgcaagaaaaaaatgcaaagacaaaaagaacacaaacacaaaccatattccaaaaacccaactataatcattgttaacattttaagtatttctacatcaaaaacggaatcatagtaatcatatatttcgtaacctactcaatcagtgttctacatgcatcaaacacccaggcatctcctgggtgggctttgacctacttcaaacatgcatacctgaaatgccttggggatgcccacagatgcatctactcagtgcctgtccacacatgaataacctggaagtgtggaagaattaacaccccagagggaaaaaaatgaccaatagatatagaagccaatggacacattcttccccctttctgctcccaacccttactctacagagtctagagagatgctttacatggctacttgaggagggctcagcctcacttaaccagcaatcagtttaactcagcagtgaccaatatcactatcaatatcaataatgccttctcctcctgttggctctccctttcttccctgccttactcccctgctctgtcacttctctttcctgggatggcacttgctaataaagcaatagtacataagccatctgccattagatttgcttcctgggaaacccaggtttagccacctaatttttatcttaaaaatatatgttaaatgtacttttctgtcactatcaattcttccatacataatataaattcaatacgatcatagaccttgtttttcttccttaattctttatgctcagtatctagattagtatcaacacattttcaatgcctacaagagtgtatcattgctgcgaaggtatgagtccacctacttacatttttactagtgtatacctcaatatattcattcagaccacacttggacattcaagttgttcctaattttacctatgttaatgtgccatggttaggcagcaaactccgggctcaaacacatgattatttctatattcttaaaagcgatttatctgaatcaaaggttatgcacaattttaggaatattttacaagcatttgctatcctatttgaataaaaattatgatattctattcatttttacctgtcagcatttcttctagtgaaccaaggtattctcatagcattggcagaggaaaaggcataatccatgtccatctttttcatcagcttaaaatccatgtgcttttatgggtggcaatgaagcgatgagtagcctcaagccagcaaatttggagtggggagaagaattaaacctcaaaaatccttgctgctgaaacaatatttttttcttttcttctttttctttaataatggtatccctcttcccactatccttcccaattgtaatttacttttcatgtcacagaacttagcaccaaacaaattacacaccttatccaaagctattggctcaaaatgctcagacggctgttttcactataaaccacaggcaaagtgattccagggtgttgtttttctgatagtaaaagaaatcctggaaactctttacaattattcctgcatggatcaatgcggcgtagagcggtagtccagagatcagtaggagacgtatttgaagctgaatcaatgctgacaaagaaatacttgccattcctcaaatacttgaagtacctcatttcctatgaactggattatctcttcataaattgtgggcaacagctaagataagtttagcccctgcctttgctaccaaatatggcaagcggatttgtgagtaatggagacaaccaagaaatcagtttcagaaccgcaccccgcccccctcaaaaaaaaaaaaaaaagaaaaagaaaaagaaagaaaacaatttttatggtttgggaaactaatcagtcccttctctgcatgaaagaaaaagccacacttagaaacctgtttgctgcaatgagtttgaatgcctcatacctggcttggtattaaaacttaatgttggaatttggaagactgctttcatctagtattgagttaattattggacaagtacattaaaatgggttgatctcagaaaatcagctaacagcccttatcatactcctctatatcaaagcaatgtcactgagcatcactacaaacagttagaaaattaaggctttttttcctcttaaaatattttctgtctcaaaaagttctttataatgtgtgataaacttctttaaataagattttctcaaattttctttaaaagtttcaattaaacatatgttttttaatgggggcaaccgaaccatatcacggatgaaaaataaaatcaccaggtatccaacagaagggccagtgggtaaatcaggctgcctgggctgagtgtaaaacagatctgttcattgcagaactcgggggattgaaataaaacctccaacacatgtcatcaatacatttctgctttaataaacaccgcttaaatttcccctggcatttaaaaaaatgcatattaaaaggaagaacatgcacaattcaggctaaggacaaatcttgagccttctcaagtagaaatgtgttcaatttgataattttggtgctgtgtctatggagagaatgaaactttgttccacccccatctacaaatttttatgcacctattgataaaatctgtagatgtccttggcccaataaaaagacaaaaagaatactgcctgcctgcacaaaccatgacgctctcactgcaaaccatctcaaagacctctctctctctaatcaaaacaattcaccaaggctgagtgatgatctgaaagaaaaaaaaaaggagataaaataacaaagaaaataaaccaaactaacacatttttaacctacatatgttgaaatataatttcttacaaataaacaaacaaaaacatgatgttttgactaaatgtttttgattaaatgcttactttaaaaatacaaaaaagaaagacccagttatagaataaacattgccaggagaacaaaagctatacaatttaccacaaatttgctctttctttcattttagcatagacatgaccttaccttttatatgttaaatgattaaagattatattatttttgttttatttttaattttgtgggcacatagtagatatatatatttataggatacataagatgttttgatacaggcatgcaatgtgtaataatcaaataatagagaatggggcattcattccctcaagtatttatcct

SEQ ID NO: 1879618 - DNA, 4001 bp, Homo sapiens
gcttgagcctgggaggtcaaggttgcagtgagccatgatcatgccactgcactccagcctgagtgacagagtgagaccctatctcaaaaaaaaaaaaaaaaaagaaaagaaattcaaattatcaagccccatcccagacctactgaatcagaagctctgaagacaaagcctagcgttctgttttaacaagcctcaagaccaggggttcccaaccccggggccacagaccggtatgctgtcaggaatccagctgcacagcaagaggtgagcagacaaagcaagcataccgcccagctctgcctcccgtcagatcagtggcggcatcagattctcacagaagtgcgaaccgtattgtgaactacacaggcaagggatccaggttgcgcactccttatgagaatctaatgcctgaggatctgcggtggaacagtttcattccaaaaccatcccctccaacccccatcagtccatggaaaaactgtcttccacagaactggtgccaaaaaggttgcggaccgctgtgctagacaaccactgtcataaaccaacacatcccaacaggggttggaattactggaagaaatgaaagctgagacaccaaagggatgatattgatttgtttgtacagaggtggccatattggtgagaagaaatttttatctacaaaattcattcattcaacaattttttaagcctctgccacatgccaggaaccattttagacttaagggatttagtagtgagtaaaacaaacatagtcacagctctcatgggctaattccttacaatgcaatgtctaggacaaataacagaacaaaggagcctagccctcagcctggacacattccatgcaggacacatcagttattgacaggcatgcacagggcacacatgtgttctccagccactccacctagatttaaggatgatttgaggatgaatgtcgttcagcatgtgaatcccaggaagtagattggctgccatcatgtgctcattcaaataatccgtgttagccatgttagttaacaggctccatgctggtaacacttcagggctatggctgcctttctccctctccctgaaggtctccaacactgaggcccactatctgcttcacgctgtctgaggttctcatctccacaccagatgacactgtgttactagagtggtcaataggcaaggccaaaatgatgtccacatttcagtggaccagctgcccacatccctaaacgaaccccatcccaaatgtctgcaatataccagaggcgtatgttcacatggaaacacggaggttaccgggctggtttcagggaggcagaggccgaataattcgattccggcactgaggtggaaggaagcaaaggatgaggtccatgtacctgtgttaaaccaataacttgcacatacaaagtcgtgtgcaaatcagaattctctgtttctaaggcaacagctctgagcattgagaaagaggcctataggcgtgttttgggggaacaatcttcctttagcactttagaccttggaaagggcttcagccccctagctatcccaggacgaagttgccctccactctctcggtcgccccctcgcttcagaactgggaacttgattcaagaaggaagcctgcggggagtgtgtggtggcggggagaaggggagggtagaaggggataagccagccccctacctcgtgaggcccgacggggcgggggccacctcttcaatggtcaggggcttcttcagctctgcgcaaatcgcagcgcggtagtgccggccgctgccctgtccggctctcctgcaacacaaaacaagggaagggtcagtcgggcagccccgccgggagcaccctgggactgccttgcggggctcagggaggagtcggggttgcacctgcagacccacgcccgagggaggcactgcctgcagagcacggccgccaaggccaagcccagcgaggggcgagggggagtggccagagcgcggcaggaagagccggacagcgccgcccagccccgggagagcggaagggcggcccgcgaggcctcctggcgacgcgccctggcagccacgacccaaccccggcggggcagctccggtccagtgcgcccggcttctacggccgccgagaccaaacgaccgcgcgagctccctgttgggcctctctggaggtggagccggctggaagaaaaaaagaataaaggaaaacaccaggaaacggaattcgattacccgagattaaccttctttggcatttttataacaaatttgggagactttttttttttgtagtttcaacttttattttagattcaggggctacatgtgcagatgtgacctgggtatattgtgtgatgctaaggttcagggtacgaatcatctcgtcacttcggtgctgaacatagtacctaatagtttttcaacccttgcccccctcaaaattgggaaactttttaaaccacacttggcgacatttaaatagtggttcttggctgggtggttaacgcctgtaatcccagcacttttggaggccaaggcgggtggtggccagtgtctgtggtctcagctactcaggaggctgaggcgggagggtcgcttgagtgcaggagttggaggctgcggtgaactatgatcgcaccaccctgagtgacagagtgagaccttctctatcgattagatagatagacagacagacagatgatacatagataaaggttattgggtcctctgccagtgcaaaaaatcctaaatgcacaggtaaaggctttatttatgtatttatttttgagacagtgtccttctctgtcacccaggctggagtgtagtggcactatttcggctcactgcaacctccgccacttagggtcaaaccatcctcccgcctcagcctcccatgtagctggtactatagttgtgcgccaccatatctggctaatttttgtatttttttaaagacgggtttcatcattttgcccaggctggtctcgaactcctggcctcaagcgccctgcccgcctcagccttccaaagtgctaggattacaagtgtgagccaccacacctgcctaggtgaaggctttaaagtcagcatttgaacaccttgttagagttcaattcttgttactaattttctcacatttgcaggaccatttacactaaatccaaagagttactaatgatccaatgttgaatgagcctacacaaatccaaataatacttccagttaaaatcagaccaaaacccaccacggggagagtggaagagcattggttctcatgtccccaatgccagtattatgcttggcacatagtagatgctcaataaatgattgttgactcgaagaccaacacagaccattcacactaggcgaataagcacactctggaagaattgaaaatatacaatataatctgtgaaatattataaaattgggtagatctctattgcaacagtaaccaaatatttataggctagctatataagagaagcacacattatgttggagagaatatttcgtttgacaggtaacttttaaagacagcctgatgtctttaaaagacatctggcagaagagtagtctcaggttcaagcccagctctcccacttatttgcgggtttaacattgacatttcttggctctctgtctcagtgaactcctctgtaaaatgaacacatcgggcagaataatccctaagttctaaattccttctattttttgacagaaacagaattcccagatagagcatgacctggaaggcatgatcaggaatggaataaagggaaaatggagagcaaaaatgaagtaggaatgaacttctgagattatagcctaaaggctctggggaaaaggagtacaagagcaaggtcctcaccttggatatacaacagagcttactgttattttaatagcactcacaaggaatttgagaagtcattttagtcctctcccccttcccacaagaggaagactagaacaatgactagaagctgagaagttgaaaaaact

SEQ ID NO: 1879619 - DNA, 4001 bp, Homo sapiens
ccagcatgtgaatccaggttctacaattgactggcactatgactttgagccaggttccttacctctttgagcctcattgacaaaagcagatagtaatagtactgagttttattggaattaatttatgacagtttttggcacctactgaatcccatgaatattagttgcttattattattaataatcattactcttaaataattatattctgattttttgctgtctcaaaagcgtggggtggtgtacagtaagattttcaggtagtaaatggagttctaagagtagaacttaaagccttccctgtatatctccaagtggtctttcctagtagcactgccctcttctcacctggctagggaaggttatctagaactcatacggggaaggcaggtcaaaagacagaggtttttcttttaagaattggctatcagagctcagcctaccctagtttgtcctcctcagggacttcacttatacaactctctgctgcagatctatgggctttggagaaatgactcagaatttctttttgatttggttaactaatggcatgtaggaccattcttgttgatggtattgttattaatataacaccatgatagcttagagctgattttggcaactaatgttgatagtaaacagtttacttacctgtaagtagggtgattacctggaacaaataaaaggtaagttgtaattgctaaaatgtaatgcagactacaatgaatggaaggccagtgtttaatggtacttaagcttttactgggttattttgttgaattttacatgaggcaagagcaacctgctggggccactgccttcagtattaaaagatacctatgttttggactttatacaggaaataattccatttcttagtatttttaaaattatggtaaaatacacataaaatttactaggtgtatagttcactggcagttattaacactgttgtacaaccatcatcactgtccatttttaaaaatgtttcactatctaagcagaaactcttgtactcattaaacaacaacctcccaactccctcttcccttagtccctggtaacctctaatttcactttctgtccctatgcatttgccaattctagatatctcatgtaagtggaatcatacaattatttgtccttttgtgtctggcttcactcggcataatgttttcaaggttcatccatgttgtagcatgtatccgaatcacattctttttacaggctgaataatattccattccaatatgtacatagcacatttggtttatctctccatctgtagatgaacatttgagttgtttccactttttggtacttgtgaataatgctgctacagaacactgaagtacaagtatttgtttgagtccctgctttcatctcttttgggtatatacctagaagtggaactgctagtacctatgctaagtcaatgtttaacttgttgaggagccaccaaattatttctattgccgcaacatcattttacattctgatcagctatgcacaaggtttctaatttctacacatctttactaatacttattttctgtttttttgataagagccattctaatgggtatataaagcagaatctcattaaattagatttgctttgtaaactatttattaaaaataagagacacgaagagaacttattattatatgcttcgcttaccctgtatatcaagagctgcaaacatcctgtgcgagtcccaaagtgaaaggtaaaatatggttctattaaattttaaacatagtaacacgaatatttctccaaataaggtaatcttgagttttgggattgcatttaaaattcctacagcaaatgctcaggatataaacatatccattagtcattacagaagtccacacgaggctgacacacgtagaataccattattagcaaaactaaactcagtacagttacaactgcctcaaacttgaccccaaagtattgaaagctcctcagagagcgggccagcagcgctgcgcatgcgcgctcccgggcgtgctcccgcgcgtgcctgcgtatttgcgtgcgcggccccgcgcggcaacgcaggggcggaaccgcatgactggcagtggcatcagcgatggcggctgcgtcggggtcggttctgcagcgctgtatcgtgtcgccggcagggaggcatagcgcctctctgatcttcctgcatggctcaggtggatttcaattttacgtcctggttttctacagctcgggaaacatcctcccctcggttaccccagtattgcccaagtggaggtgtcgccgggcccaaatagggcccagtgggtggctcccccgtcgccagccccggctgtagatgcacgggcagcgccacctgcccccagcctcccccgttagtcttcctctttctatcgggcggtcactggtccaccaccctcgctttggggccttgtgtcccgccgctcagccagccctccatccccacaacacacctccccattcctcgccccaagtttaaacagagcaagttagtaaggtaagtcttctgctagagggaaattatttagtgtttttcattatcagctactagtgatttttcagtcgtaattgcccattgctttttccaggctcccatactaatgtagacaattgagattcacagttaacttagatactgtttacagattatctcttttctgtaagccactgtgccatggctggagtgctttctctcactttcctttttgctgcttctctttccttcctttccctttcccgcctgtgtcattaaacttccaagatagactacaggggcaggacccccagggacaggcatcttccactacctgcccttagtaacgtgtgcttaatgctgtatcgttacttaacactcatctgtaatcacttttgtctgtcttccccactggattgtgaacttcccactggattatgagagtaagggcccttgtgtcaacctttgcacccccagtgcttggcccagggtaagctctcaggaaatgttttttaaagaaatgagatgcagccggtgtcctcagggggcctacctaaagttaaaaacaaaaacaatccaattagtttgagtcagcagtgcatggaagatcacaagacggtgcatggtttcctgccaagtgaattgtaagagaaaaaaatgtggttaggcattattaaggcatttggaagatgaaaagcttgtcagacttttcgaagaaagtggtctttgagccgagacgggtaggcttaaatgggacggtgattggaagggaattggaaaggtactgggcagagacctggaaaagggcaattgtgggaggtattctctttattttgaaaatgaggccagacaggttcagcagcttggccaaggtctcttagctgttactgtgagtagtggcggatttgggattagaacccaaagctctccgacctcaaactcagggctttggtggggtaaggtgaaaaagtttgaactaggatatattgttttggagatagggaagaagaggtccaatagtgtttaaagggaaagacggcatatatttagaaggtgacgtgtgtaagatgacagcggtacttaataactaggagactggtagtactatttagggctccaagagtgttcatttataagtacccagaaattccccaacactgtaccctttctcataatcaattctcattatctttaggaagaactcctagactatgttcttttttcccctggacctctttgcttaaaataattatcctttttttgaatttcagattacatttttataacctgtaagggtatgtctctaaaattcagagtcatgtatgtatgtattttttcctttgtactttgaaccaagaatttattcaaagaattctgccaagtatgcgagtataatgtgattcctatatatttaaatctccactgaagtaaataaaaccttattgggagtaggtctttatcatctttatcgttgggagtaggtctttatcatccagtaggtctttagca

SEQ ID NO: 1879620 - DNA, 4001 bp, Homo sapiens; identical to SEQ ID NO: 1230

SEQ ID NO: 1879621 - DNA, 4001 bp, Homo sapiens; identical to SEQ ID NO: 1251

SEQ ID NO: 1879622 - DNA, 4001 bp, Homo sapiens
tatcctcactgtcatgttcagggctcagcacagaacctgaggctaagccaggtgtcctctgttcctgtggcacccccacaggctccagcacttccccactgcagccttcgttagcccgagtcgccacttccctgctcagggccccagctcaggggaggttctttcttatccctcctccataccccactctctagcacacagtggataaatgaacatgattctgctcggaggtggtatccccattttacagatggtgaaactgaggcataagaagcttaagcaacttgctcagccaataagtgggaaaagcattcacagagacaacagcatataatcccagccattaccaccccttagagaaatgacgtatcaggcagcctgtcggtcttggggccaactacaagtttcagcacggggtgctgtagatgaagctgatggttgaggtggtggagagggtgaaggagatgggggtggtggcgtggggtgggcaagtgaggagagagctcctccagcaggtgacacagcggcgctgggggagctggcaccagactccaggtgttcagcctggagttcacctgtgggaggacccagcaaggtggacaatctgaaagctgggttgcagggaggggagtagggactcgaggaggcagtgggcctcgggatggcagcgaatagtcacagctagattttcagagccaggagcccaggcccctggagaggaagagattgtacaaagtcactccccaggtagcccagggtaatgatggtaaaaataatagttgccccttctggcttctaaccaggagtcatctcactcaacctcaccacaaccctttttacagttgaagacactgaggctcaggaaggtgacctgtagcttgtggagctgcatttctaaacacggcctgtctcaactgcctgtcatcaggacagggtgtcaggacctggggctaaggatgggacccaggaatcagaaacagacccaagtcagaagcagagaagcagcaaagcgggactggatgcctaacccagactgggcagagctgggagcgccctagcctcagggcgggtgcagacagggggtcacgaagccggatctcagtgacagagtccgccacctctttctttccagggtacagaccagaggagcctagtgggaggggagcaggcagattctttccctctctggcaggggcatgtatcataccggggagtggaggaggataagggcggcatctttcttgggttggtcccttgggcatccacatgggagtggccctccgtcggttccctggtccagggtccccggtcttaccgggacaaggacagcaagacgggagacggcagccccatcccttagcttcggctgccatctggtggccaaagcgcagaactgcaccatgtggaaccaccggatccccccacccagccccggccgggcctcccgggggcacgaggggcgtggcacgactcccacagccatcagcctgaggaccctgccctcagccgcctcagtctgaggggaaggcatggccctgaccttagagaccccaatttggcgatggggcatcacatccctccgggcatctcagagctgcctgcccgagggaggcgaagcagatggaaagccccccagccacgtctctcagtcagaggaaacgggtctcctcttcggccagccgggtcctcttcccccgggtgccgcctggctgtgcgacccggcagtcctcccgcctctccgggcctcagcctcctctcctggacagtcccgtgggcttccgggagcccggtgtcacaccgccccgcgtgtcgcaggtggtcatcgtggtgacagacgggaggccccaggacagcgtgcaggacgtgtctgcgcgggcccgggccagcggcgtcgagctgttcgccatcggagtgggcagcgtggacaaggccacgctgcggcagatcgccagcgagccgcaggacgaacacgtcgattacgtggagagctacagcgtcatcgagaagctgtccaggaagttccaggaggccttctgcggtgcgcgggcaggcgggggcggagccagggcaggggcggagaaggggagagcggcggggcggggccagggctggaggcgggaccgaggctgaggcgcagacggagccagcgccggcgcagggcaggggcggggccggggggggggcagaggcggagacgggagagagatagaatgtcagtgccggggcggggccggggaggagccgggggcggaggcggagacggagagagtcagcgccggggcggggcaagggtggggccagggcaggggcggagacggagagagcggcggggcggggccagagcaggcagggggcggggccagggcaggggcgaagacggagacagtcagtgccagggcgggaccggggcggaggcggagagagtcggctccaggggcagggccagggctgagcgggacgaggccgtggcaggcgcagagactgagagtccgcgctgaggcgggccaaggctaggggcggagccagcgctaaagtgaagacagaaaaagtcagcgtcggggggcggggccacatcagagggcggggcctggctggggcggtagcctataaaacggcgggaactgagttacacggcaacatcagggcggggccagggctagggacacggcttaggtggattgggggtggaacctggattagactgaggtggtgccagcaccaggggtggggccgtagctggggcggagcctgataacggaggagggtctccagccccaggttaagggagttggggagaggcgatgttaagagtccttttatggccgggcgcggtggctcacgcctgtaatcccagcactttgagaggccgaggcgggcggatcacgaagtcaggagatcgagaccatcctggccaacatggtgaaaccggtctctactaaaaatacaaaaaattagccgggcgttgttgcgggcgcctgtagtcccagctactcgggaggctgcgccaggaaaacggcgtgaacccgggaagcggagcttgcagtgagccgagatcgtgccactgcactccagcctgggcgacagagcgagacgactccgtctcaaaaaaaaaacaaaacaaaaaaaaaaaccgcacacacaaaaaacaacagagcccttttatgtggcagaatcctggcagggaccaaggagggcccagagctcaggaaggagagctcccagaaaacctacacatgtttctgtgtcgtgagttttgggtgccagagttttctgtgatgcgggagagtctgagaggcctgggcactggcaggagaaggttcagagcccttctcggaggggaggtgtgtgtgtgggtctttgggatgtgacccgcaggggcagggtgtccagtaggacaggatcagggttagggcagggactttacccatttgtaaaatgggtctaagaagagcatgcacgttattgagaggatccagtgagataatgcaaaatgtaaccctcattatatggtatttgacagataggtgctgtgttcattgtatgctgttctagacacttgggtgtcttgatacagcagtgaactaaacagactaaaggccctaacccttggcctttacctttttagtgagacttttcattcttatcatcagcattataaccttcttcagggatctaggcactggtgcaatgattccagacgtgggctgagagtcgggggcctgggccccagtatgttggagatcttagtttccctgagtctggatggggcctggtatccacagtcagggagggacaacctgtctgtagtgcccaaggcactatgactgtgagatctgagctacttattgtccccgcagtggtgtcagacctgtgcgccacaggggaccatgactgtgagcaggtgtgcatcagctcccccggttcctacacctgcgcctgccacgagggcttcactctgaacagcgacggcaagacctgcaatggtcagtggggtggacaca

SEQ ID NO: 1879623 - DNA, 4001 bp, Homo sapiens
aacttgcctagtgatgagcggaagtgagccctgtcatggataaatgggcaggggcagttaccttctctaggcagagggaatacaagggcgaagaccgggaggcgtgattgtgcttggctgctcgaagaacagcaaggaggccagtggggctggggcaagggagggaaaagcaacaggaggtaaggtggggaggggtgtgcacagctcaggtaggactttctaggccacagaacggtgttaagattttctctgagtgagaggggagccactggggcatttgaacagaggaaggaagtaatttgactcatgttttaaaaagatcacattggctgggtgcggtggctcatgcttgtaatcccagcactttgggaggccgaggtgggcagatcatctgaggtcaggagttcgagaccagcctggccaacatggtgaaaccccgtctctactaaaaacacaaaaattagccgggcgtggtggtgggggcctgtaatcctagctactggggaggctaaggcatgagaatcacttgaacccgggaggtgaaggttgcagtgagccgagattgcaccactgtactccagcctgggggatagagcgagactttgcctccaaaataataataataataataataataaatgaataaatgaaaagatcacattggttattctatggggtataaaggcagcagggagtgctaggatgaaagcagggatgcccagcacggtggctcacacctgtaatcccagcactttgggaggtcgagacaggcggatcacgaggtcaggagatcgagaccatcctggctaacacggtgaaatcccgtctctgttaaaaataaaaataaaaaaaattagccaggcgtggtggtgggcgcctgtagtcccagctactcgggaggctgaggcaggagaatggtgtgaacccaggaggcggagcttggagcgagctgccctccagcctgggcaacagagcgagactccgtctaaaaaaaaaaaattggccgggcgcggtggctcacgcctgtaatccagcactttgggaggccgaggtgggcggatcacgaggtcaggagatcgagaccatcctggctaacacggtgaaaccccgtctctactaaaaatacaaaaaattagccgggcgaggtggcgggcgcctgtattcccagctacgcgggaggctgaggcaagagaatgtcgtgaacccgggaggcggagcttgcagtgagaggagatggcgccacggcactccagcctgggcgacagcaagactccgtctcaaaaaaaaaaaaaaaaaaaaagaaagaaagcagggaacgtcactgagaggctcttacacaactccaggcaagaaacagtggtgcctcggacacaggtagtaacggtggagacggtgagattgcggaagctttggaaggtggagctcatgctattcctgatgggtcagtttggggtgtagagatgggacagttgagtttgtcagcgggaggtcatcgatgaccttgacaagagcagtttcagtggagcgatgggggtgaaagccccacagagagagctggagagagaaaaggaaggagggatgaagatggtcaattcagaaaacactgagatgttttcctggaagggggagcaaagaaatatgacggtgtgggtgtgggggtgtgtgtgcatgggcttgtgcatgtgtgtgtgtgtgtgtacaattggaagaactgcagccgattgtgtggtgatgtgaatgagccagcagaagagggggacccctggagctgtgggagagacgcaaggaattgctcactgttgtcctggaggaggtgagagaggatgaagggcagtgtcccagtggagggcgtagaattcaagttccacaaggcgtccaggtaacaggcacggatacaggcgggagtgaagggagaggtggagtctgaggaagtttccttctgattgcttctgtttcccagtgaaacagaaagcaaggtctccagcagctgacagctagtacagcaggttctttttttctcaggtgttatagatagctgcgccttccgctcaccacaggtgaaatggttggcttgtatctggggccacaccacataaaaaccatttgaacagcaggatcacactcagcatgatgagagcccacatgaggctggaagtgcaggaacttggaccggcggggggaacctggcaggtcacattccctctcaaggggtgagtgctcaccaagtggaattggagtgtgactctgtagcagtgattcatgcacaacgtgctctctctctctctcccctccctttacacgcgtgtttaaatgtgtgtaaattaggctgggtgcagtggctcacgcccgtaatcccagcactttgggaggccaaggtgggcagatcacttgaggccgggagttcgagaccagcctgggcaacctggtgaaacaccgtctctgtgaaaaatacaaaaattagccgggcgtggtggtgcacatctataaccgcagctacttgggaggctgaggcatgagaatcacttgagcccaggaggtggaggttgcagtgagccgagatcacgccattgcaccccagcctgggtgacagagcaagaccctgtctcaaagagaaaaaaaaaatgtgtgtaagttaaatgcaccatgatgaagactccactataaatggtgccgctggaacctcgggcctcctgactccacatcagttttgtctctactataatactccatctctcatcacacatcactagggagcaccaaaattgcagggaagagggtaacccaggctgaaaggaggaagagagcacttaaactagaaaattctagaacatcagacctcgatggaccttcacagatcatttggtccaacacccttatttgacagacatggaaaatgtcattcactgactcccccaatatcacacaacagaatcctcatcatccccatcatcatccccatcatcatcatccccatcatcatcatcaccatcaccatcatccccatcatcatcatccccatcaccatcatccccatcaccatcatccccaccatcatcatccccatcatcaccatcatccccatcatcatcatccccatcaccatcatccccatcaccatcatccccaccatcatcatccccatcatcatcatcaccatcatcatcatccccatcatcatcaccatcaccaccatcatcatcatccccaacatcaccatcatcatcatccccatcatcatcaccatcaccatcaccatcatcatcatccccatcaccatcatcaccatcaccatcaacatcaccatcatcaccatcaccatcatccccatcatcaccatcatcatcaccatcaccatcatccctatcattatcatcctcctcctgatcaccataattgtcatctgcatggaagctagcctatattgattactccctgctgccaagctgtgtcccatttcatcatcaaagcctcttgaggtggccactctcattattttcattttacaggtggtgaaacatcacagagcaggtaaggtataaactgggagaccctcctcccacccactctgtgaaaacctttactagagatctcgcattgggccactaaccctaagataggaggcagaagggggctccccttgaaactcgaaagaagtaaatttaagaccagtaaagggaagttttgcttcacacagagggggtactggctaaaaatactagtggcttcaagaagtatttagatcagttcatagatagttgatcacaaggcagtcagagtgatcttttaaagacataaattaggctgagcatggtggctcacgcctgtaattccaacactttgggaggccaaggcaggcggatcacttgaggtcaggagtttgagaccagcccagccaacatggcaaaaccctgcctctactaaaaaaaaaaaaaaaatttccttgttgtggtggtgggcacctgtaatcccagctactctggaggctgaggcatgagaatcac

SEQ ID NO: 1879624 - DNA, 4001 bp, Homo sapiens; identical to SEQ ID NO: 1260

SEQ ID NO: 1879625 - DNA, 4001 bp, Homo sapiens; identical to SEQ ID NO: 1274

SEQ ID NO: 1879626 - DNA, 4001 bp, Homo sapiens
catggctcacagcagccttgacctttcgggctcaaacgatcctcccacctcagcctcccaagtagcggggatgacagacgcacaccaccacacccagctaattaaaaaaaaaaatttttttttgtagagataggctctccctgtgttgcccagggtcatcttgaatgcctggggtcacgtgatcttcctgtatcagcctctgaaagtgctgggattaccggcgtgagccaccacaccctgcctcccacatttttaaaaaccaaatcaaactattaaaacaactaaacctgaagtgttgccaaatgccatgccaaattggtgtctttcactttttttcataaagagtatccttaatttattcacagaccttgattagaacatgattctgttaacttagagtaaaaaaaaaaaaatcctttcctgcatgttgggttattggaattcaggctggctcagcctcagaagtgcttgtatgctgctctcttcctctgtgagtgttttttctctagtgagatgtgtttctctgattgcttcaagattatcagaggaaaggctttaacatgccttctcaccccttcttgattctttccctgtgtgatcagtacacaaaagaaaagctgtagtcagtgatttctgtgctcctgaggccatactgttctctaatcttccccattccagggatgccttccagtttagtattttggtagaggttaacatgcttttctcccttagccacttcgctttttgatgagttataaaagtaggctgggcacagtggctcacgtctggaatcccagctctttgggaggctgaggcaggaggattgcttgagcccagtagtactgagaccagcctgggcaacacagggagagctccacctctgtttaagaaaaacaaataataacaataatacttatatctccaggtaatcacagtgatgaggaaaaaaaaatcttatagtagtaaggctttacagattaaacttttcttacttggcttcctttaggaaagacttttagtcccataggtgattcacatacaaacctcttcatgtaaaagaaataggcctctcttctctagaccataaatgtgtgcgtgtgtgtgtgtgtgtgtgtgtgtgtgtgtgtgtatacaccgctgggcatggtagcttacgcctgtaatcccagcactttgggaaggcgaggcaggtggatcacctgaggtcaggagttcgagaccagcctggccaacatcacgaaaccccttctctactaaaaatacaagaattagccaggcatggtggcatgtgcctgtaatcccagctattcaggaggctgaggcaggagaatcacttgaacctgggaggcggaggttgcagtgagccgagattgtgttactgtactccagcctgggcaacagagcaagactccacctcaggggaaaaaaaaaaggggtgggggcttttgggccaggcgaggtgggacttggataaagatcacccagtgaaagtgtgtgggcactcaggccttcaatcccagcatttcaggaggccaaagcaggaggatcacttgaggccaggagttggagaccagcctgggcaacatagtgagaccccgtctctacaaaaagtaaaattagccaggtgtagtggcacatgcctgaagtcccagctactcgggaggctgaggtgggaggatcgccttagcctagtaggtcgaggctgcagtgagctgagattgtgccactgcactccatccaacctaggggagagtgagaccctctctgtctctctctctcaaaaaaaaaaaaaggctttaggcagggaataaggctctaattgcagttaaagggtttcaccaccacaggcatagctctgttcccctttggtacctcccgtgtagtttcccagtcacggagggaagactgctgtcattcagccctttgagttcaacagacttctggaaaaggcaggagacagaaaaacaaaaaggagctggggtgataaggaccagtcactctaggagtaatgaacagagggtgaggccaggcacagcaaacaaaggtctccccagttttctatccttgagctaagctccctctgtgatgttactgttgtgtcctagccacctactccccattgtcagaggaatgcacatgcaggacttacatgtgacctgtttgtgcttcatcattgggagctatgacttcgcattcaccctaaagaccagcatcagtatctttttagatactgagcactcacctccccacccgcaccgtgtcccctacttccttatgtatctcctacattctctccttccctcctgttggttccactgacgcttaggctcggactcctactccctctcgccttcccaagttcttcacccctgcagttatcctctttctcttctgcatgatccacttcctttctcttctgcgtgatccacttctccctttctactggacgattctcatcactaggaaaaggaggtttattatcttccagcaggaagaaggcaaaaagcaaaatgcctccctgaattcgtgttcttttccagttctgtgccatttttctacaactgcacacagcaaagccccttgaaagtgttgtctttgttaattagcctcgcttcatttcacattctcccttcttatcttactcaacctttctgcaactttgactcagttgaccgctactgcctccttgaaagactttctgggggtgcagcctggtgcggcggctcacacctgtaatcccagcactttgggaggccgaggcaggcagatcacgaggtcaggagtttcagagcagcctggccaacatggtgaaacctcgtctcaaaaaaaaaaacaaaaattagctgggcgcagtggtgcgcgcctgtagtcccagctactgtagcatcgcttaaacctgggaagtggaagttgcagtgagccgagattgcaccactgcactccagcctgggtgacagatcgagactccgtctcaaaaaaaaaaaaagactttctgctctggcatctctcttgccacgctgattggtccctctcagtttcctttcttggctcactctcttcccaccttgtatatgtagcagtcacatagggctctcttctcttcctacacagtttccctgggtgattttatccgagtcccatggctgtaatatagatacacacacacacacacacacacacacatatacatgaatgtgtgtatgtatgttatcaggtaactcccaaatcttatctctagccctgactcttatcttgatccctatcctgagctccagattacctgactattcaacatcttccattggatgataagatatctcaactttaacagaaccaaaataagactacagattcctcctacctcccaaatcatttcctccccaagctttttctaccccagtatacagcaccaccactcacccagttagagaaaaaaaaaaaatcagggagttatacttggtgcctctctccttgttttttcttttactcttgatttttatatagagacagggtctcgctatgttggacaggcttgtcttgaactcctggcctcaagtgatcctcctgccttggcccccaaagtgctggaattataggtgtgagccaccacacccagccttctttctccttaatactccacagtctatttaatcctgctaccttttcctccaaaatttacccagaatatgaccacttttcaaaatcatcttctgaactactgcaaccacctcctaattgatctctcacctctaccttgattcttctgcaatctgttgtccacatggcagtcagacagaccttttcaaattgtaaatcaagtgatacccactccctgcctacaattccccagtgccttcccactgcaaataagatgaaacccaaattcctacccatggtgtgcaggctttcacctgatctagtgtttggtttttttgttgctgttttttgttgttgcttttttttttttttttttttgagacagagtctcgctctgtcgccca

SEQ ID NO: 1879627 - DNA, 4001 bp, Homo sapiens
agaaccaagggagtggagggtgtaagtcccaaagtcccaaggcccagacgtctggagttctgatgtccaagggcaggagaaaatggatgccccagctccagaaggtaaatttgcctttcctctgctcttttgttctatctgagccctcaatggattggatgatacctgcccacatttggtgagggcagatcttccttactcagctcactgattcaaatgccaatcacttccagaaacaacctcacagacatgcccagaaataatgctttaccagctatttggatatcccttaacccagtcaaactgatacctaacattaaccattacacatatattcatggaaaaaactatctttcaaacaaaaaaaattacaagagtggcattgctttgcatttttgtgatgctccttaatgtctggcttcatagaagacaactggtttcctatgtctgcttctatattcagtctgtttgtgatatcacatgtcaggtagcctctggaaaacttcactgtacatactttttttaatgagaaaatgacaaataacatcataacaaatcattttgacttggcagacacctaacagggtctcagagaccctcagggtcccccgattacactttgagaaccgctgaactagaatataagctcagtaagggcagagactatatatctcttatatcccagcacctagaccagtctggcacatagtaggcactcaataagtacttgttagttaaatgtatgaacctgaggctatagtatgaaagatattgagtgccaggctagtaagtttggaattcacttagtagacactaggcaaccagtagaggtttctgagcaagtaaatgtaacagtctgattaatctgaccacaccaaggaggacgagctggagagaagaacaacttggatcagaggtgccaattaggatgcttttgatgtagtccaagtgagtaacagcaaggttctgaagtgggatgaagactgtgcaaactgaaagaggaggatagaagtgagaaattactggatacactgtattagccctcaactagaaatccattaatctacctaggcttgcctttaactgtgtgatcttgagcaagtcaatcaactccttgttcaatacactttcttcattagtaaaataaaatattatattaaacatggattgtcactttctctgcaactactcaaagtaatttgcagataatagttatatcactaaaatattaattttaaatgtcacaaaatcttaatttcttattgctaacttttcctgcatttacttatgctaatattggttattaaccatgctttttaaaagtaagattagagaatcagtataaaacttcaatattagttgaagtgtttgcttaggagaaaaccatgtatcatttattaaggccttttaacttacttaaatctcaagcaattcctatgatagagttattttccacattttccgattcggaaatattaagatatgtactcaagacttcataccttgtagtaacaaaaacagaattcaaaaagatatgtatgattctaaaacatatcgtcttcctgtaacactactccaaagaaattgagaaaccattcaaatttggatatgttgttattaatttggacatcttgattgataagcataaaatgtagcacatttggaatcaaactgattaccaccttaattatctagaaatatcacagaaaagccaactctacaaggttcaacatggcaggacaatggctatatccagataattaaaatgtataggaaactacgggaaaaggtgaaggaaagagttaagacctttcagaaacttgagggaaacagaaaacaagcagacaatcattttgtcttattttcaaacctgagtacaccactgagaaagaaacaggctctgttcttcatcatttctttgttcatttttggctgaagtggatttaggtccatgctgggaataaatagggtaggctctgaggtggttaccaaatcagcaatggcacaagtagtactactcatgaaaactattccaactgtctgactcagacgtcagctcagatttcaactccctgcagccatttggttgaaaggatttcataattttcaaggaagcatttaaagtttgtatttcatctcaaggaaagtaaaggaaatactcgttctctgccttggatcggaaatgtgcttgattttgtaaagattgcatagagagagaacacttacttgtaatctctttaaaaaaattatttctctttgcatcccttttctgcctaacttcacagcaactgtttgaagaccaatgcagtcacctttccttacctacttctacagtagtatattctgaaattataacatcagagctaattattgctttatagtatactgagatacatgtataaactcctgattattactcattttttcagtaaactttgcttgagaatctatgatataccaagcattatgttagacactagggatccaaaaatgaataaaacaggtccttaccttcaaagtgcttatgtttagtggggagacagtcagacaagtaagtagatatgtctttcattgatgagttcatattaaacaaatattttagcaactactattttccagatgttcatatcaatgttggagatacaaagataaaaatttactcctcaacagtaaggtaatactatccaggtaaagcaaagaaaaattcagaagggaaaaaaatatatagtttaaaaatcagaaagctatgagggttctaaaatgagccatgtagaaatgagatagacttttcccaggataaacctatacttttagaaattggatgcaagaacatgaagaaggtagtcaggagggcagaaaaatgggaaaggaaaaagagaaatgccgtggaagctctgcctggtgaattaacagcctgaaaatgttcctatgtggctttgagaaaacaagccaactgagtttaaagtgtgctcctttgagatttttccatgacttccatcatggctatagattagcaggttgtttatgtgacaatcaagcctggataatgagggtagggatggagagaagtactggttagtagctaagtgcaaaattgccctaacgtaactattccggtgaaaaataccaactgctttttggacatatccttttacccttttgattccaacccaacaccgttctctacatttactaagctttggggtttctattgacttccaattatttcacttgagtaatattcttaattagtacaagcacaagtcctttatcgtctctgaaacactgccaaactttactctcccctcagcaagggaaaacttaattaacattttgttaatttctagaattgtttcaatttgcccttctctggggtttccactcgctctgagaaagggaaaaaatgttcatagataaagaatatagtagatgaggcataaatatttacatggaactaatccagttctcaaaatgatttagaaaacctagactgttttcgaaactattgtgacaggttgtttatgaagtattaacccacaaacaacaggggagagagagacatgagatagccttgcaatccctttgtttaccctgtagctcccacccccactttaaactaatcctggcctctgctgcccccagaaaagctagaccatagttgaaatgcaaattgaggcaaaagaagttaatttttagcttttaagctttcagacatgaagacttggcataagcaatacatttcaaagactatttaactagccatgccttctgtctctccccatcccccagtgggaagagtaaataaaacctttatgaattagaggaggtagcaagagtttggagataaagcaaaagatgagtcctattctttgcccaccccacccacagacttgtgggattaaaaggaggtggttctcctgtaagcctgaggatatgagatggaccttagtgagagggccttcagccctgcagttctgtcagctacagacaagaaaggtaga

SEQ ID NO: 1879628 - DNA, 4001 bp, Homo sapiens
cttctttctagaaaatatgctccatgaggaactttcagcactgtgcctggcacataatagatattcagtaagaacttatgggataaataaatgaaccttgtaaggaggacattaaaggggttattaatttccattttaattagaaatattaggtcactttcccaaagtcagaatattgtatggtgtttccccatgagtcctccaaagactgggaccatgttttctacatttttgttgccccagcagtcactggtatgtagtgccaaggaagaggataaagcagtagttagtgaattggaatcctgactgctctactgtgtgttaccttgggcaggttattaaacttctctgtggcacgatttcttcatatgtaaaatggggataaaaatagtacttgccttatagggttatgaaaatcaattcaattcatataggtaaagctcgtagctcagtggttgacacatatgaagggcaatagatgttcttcttcactcacttttgcctcccttttctttttctaggcatttaattaatatttgcattaaattgttgacctttctatagttttcaaactgttttaatgagtcatcgtatttcttttcagtttctctaatcccaagcagggcttctttcttgacttcaatcactcactccttgaaaggtagcaatgttgccttaactgaaaaggttaagtaaccctctcccttttttttttttttttttaattttatttgtatctgccttggccatgtacatagacacccaacggccccttctcccagcctggggaaggggtggtggattctggaggaagtagacatcagagtgaggacacaaagttcaacagaagctgctgctcccctcagcaaggggcatctgtgtgagcggggacttgtaccctctgctcttcctccctaccaggccatctgcgaatctgcatgcgttctcctatttgactcaggtcactcttccctctccccatggactagctatgagcaggagacacaacctcttctcttgtgtgtttcagcttcttttcctgctcttcccatcccttaaattctattcctggggatagagacatgaatacccataacctctctcctaagcctcctcataatccagggtgccacatccagactctcgacaactggtaaggccagcgacctggaagctcatcacagcaggctatgtgtgaaggtaggacagtagacatgagtgtttatctgtgtaaggcaggactgccaccatggcagggtgtggggagccacggggctctgggggtgtgtctgaaagtgggggcagaaaggttcaggaagccaaagacatgggcttatttatagtagaagtccacgtgggctccaggcttgaacacccccttttgcagcgagctcagccgtttctgggctgacaccctgcaatccaccagctctccctttgccttcagctcctgcagccttttcgcatgtctgggtccatggaggtctaccgggctaacctccgggacacgtctgtgtccacaggacctggggcctaattcggcaccctcacattaggttcctccgacgccaggacctcaacagaatgttaccagcagcctttcccgcacagcacagcgctcagcctttgaagggctgcagggcacagagggttgagatgttaaccacagttctgttgaggccaggactggttggtaaggccttcgagacgctgcaagtccggcagagagagcatggaggtcaagttcagcgcccagtctttgttcacttgagtggagtcacccaggtccacgaagcctttggacacatccccaggagagcccgcgttgttgatgaagagcagttgctgcagctcctcggtcctggggagctgacgcaaggccccaagcagcgggctgcaagccagcctcggcgcccaggtctgcgggcacccgcacgacgcgcaagtcagaccgcccggcgcccagctcggcctccagctgccgcagcgcatcgtcgttgcgggcgttgaggaccagcatgcagctcggcgacagcagcgaggccaggaggcccaggtcagcacaaatacagcacgctccaggccgccctccatgccgcagtcctaatcatgaactaagtccctgataaagggggagggggaaaggagccgccaaggctggataaggttttgtcttcaactatgagcagaaatatttaatatttcgggccttagtcatttccggagactccagctccttgctcaatttttagaaagtttttgtttttgtttttttttttttgagacagtctcgatcttgtagcccagcctggagtgcaatggcccgatctcggttcactacaacctccgcctcctgggtttaagtgattctcctgcctcagcctcgcgaatagctgggattacaggagcgccaccacacctggctaatttttgtatttttagtggaaacggagtttcaccatattgatcaggctggtctcgaactcctgacctcaggtgatccgcccacctcggtgtcccaaagtgctgggattacaggcctgagccaccgtgcctggccagggcaatccttattgtgctttctttagagatggaaagaatgctcccctctttcctcgtctttcatcttctgcacccagctcttagtaggtgccttaaaaatgctagttttatctctcatctccatgcctcaccaaaacggctaggtttgaatttcacttcaaaagtaagagtcaaacgaatgctgatagcagctttactcatagtagtcaaagattagaagcaaccaaagttttaccaataggcgaatggatcaactgtgctcatggcctagccgcacagtggaatactactcagcaagaaaaaggagtgaactatcaatgcacacagcaacatgggtgaatctcgacgacattatgctgagtgaaagaagtcacatacagaagagttcataccatgtgattctacttatatgaaatgctaaagaaaaatctaatctagagtgacagaaagccaaccagtggttgccaggggctagggttgtgagtggggatagaccagcacaaaggaatggttttgtttttgttttgttttgagatggtgtcttgctctgtcacccaggctggagcacagtggtgcagtcttggctcattgtaacctctgcctcctgggttcaagtgattcttgtgtctcagcctcccaagtagctgggattacagatgtgcaccaccatacccagctaatttttgtatttttagtagagatgaggtttctccatgttggccaggctgtctcgaactcctggcctcaagtgatctgcctgcctgggcctcccaaagtgctggtattacaggcatagccaccatacctggccatttttgtttaattttaattttttttttcaatttcactctgaacaaagcatgttgacacaaaggaatctttttggatgttggaaatgttctatatcttgattacagtggtggtgacataggtgtattgctttgtcaaagctcatggatgagtacaattaaaatgagtgcatgttgttgtatgtaaactatacctcaatgaaatttgttagggagaaacaagaatcaagataaaatgataatacagttaaaccacacttgacagtttctggtaatggtgttttttcctttttatccatgttctaaggaaacaataataacaacaaaaaccgttgttgtacagatattccagtaaggagcattggccactccttggagtgaggaggagttgtagagtgttatgcttttatggtttgggaaggagaacatctgttgtgttccatcagctttgttcctttgttcccaaaaggtgtggggtgtgttctgttactttataaagctttctcaagttctgcccatcttctttcactacctcactttcctcctttcattttcttcctttctttgtaattcttggcctgccaaattctatgaagttctgaatcacagaaaagcagatcacctcacatt

SEQ ID NO: 1879629 - DNA, 4001 bp, Homo sapiens; identical to SEQ ID NO: 1279

SEQ ID NO: 1879630 - DNA, 4001 bp, Homo sapiens; identical to SEQ ID NO: 1284

SEQ ID NO: 1879631 - DNA, 4001 bp, Homo sapiens
ccctttcagttccctttcttccccattgtgtcccagtggaggacctgataatacacctgacccatatctaagacatgcagttggcagggctgatagtaggtaaggttcacagtatgttaaaaagtcacacgaggccgggtgcagtggctcaatgcctgtaatctcagcactttgggaggctgagggtaggagaatcacttgaggacaggagtttgaaaccagtttgggcaacatggtgaaacaccatctctaccaaaaatacaaaattacatgggcatggtggtgcacacctgtaatcccagctactcggcaggctgaggcataaggatcacttgaccccgggaggcagaggttgcagtgaaccaagactgagctactgcactccagcctgaccgcagactgagactctttctttaaaaaaaaaaaaaaaaaaaaaagtcacaaatggtttttctctccctggcccctcttctctctgtggtaggtaggttcaaattacagcctaacctcagccatctctgttctctttgctcaagcatatgggtcactgctttgggttcctacaccagtcagacatccacaggctcccagatacagacatgagcctaggatgaggtaatatacccgattaggctctgagcctaaaacacgttccatgaaattacctgagccttccttgcacagtactgtgatctaagatctaacacataatcaagtcatgcactttgtttcttatttgctattgttacatgtgtacagtgtccttaggagtctacagggaagagggataattggcagagattggcattggcagaatcctgggttctccaataaccacctttcacccccagcagtactctctagagtaagatggaggttgaagatgtgtgctgttaaatttcctaatcctggctgggtatagtggctcatgcctgtaatcccagcactttgggaggctgaggtgggagaatcaattaagctcaggaggtcaagaccagccttggcaacatagtgaactcctgtctctactaaaaatttgcaggtgggtggcctgagcctgtagtctcagactcgggaggttgaggtgggaggattgcttgagcctgggagatcaaggttgaagtaagctatgatcatgccactgcactcccgtgtgggcaacaaaaaaaaaatttcctagtctttcatgcacgtgatgctggcttggtgtttacagcttcgtattcctgaaatcgatatgtgccagatatcactgcagactagtccttatttgatagaaataaaataatttacattttattttcatgtaaatgtgacagcagcagcaataacataggcattcagtaaatattcttttgaattaggccagatcctaaatatcctgaaagaaacatgacatgtcactatctactccttcaagacaaagatatactttttttctttcttcacttcagtaagctggtctacaatgatggacttttatttatgcaacaatttcaatactgttcaacatattgggctttttttttctccctgtaagtagaatctgattttgaaatctagtagtgtactgacaagtgccaagctgttctaattaggttacctttcacatttataaaaatggtacgaagttctctgaataccattccagaaatactaattcatacttacctattttcagtctcctaaaggttccaaagatcttaatatatgttcactcagcacaacatggctgcaccaacaactaccccatgttacaaaacaaggcaaagagaagcagaataactctccctatgccccgggagaagtatgacagaggtgcagggtaagagggtttctgggtcccagccacctgtttcacattcctctttcaccttctttcttcctgggtacggtgaggctcctctgatggaaggtaagatggctgccatccttcagttatcacagtactgtacctttagaatagacagcatcagcactgtgataactgagccagggcagcctgtcagtcactgtgtcggtcaacggcatcctttctggtggctgcattactctctctgaaggctccccatgaagtgaaggactaaaagatcaccttctggttggagacgtgaggaggcagaagaaaaagaaggatcagagcccagcaagtggtgaggctgaaatattaaaaggcccagttgaattaaattagaatgaaagatgaacacatgacttatccatattaatgaggatgaacaactgcatgattaggttttcactctaatacatcaaatatgcagtaagcttccagcatatttcacagcttatctcttccatgcatggattcactgactgtgcctccctgacctcaatcattgatttttcatatatataccgaggaactactacgttctaaagccctcttctagatgttcaggaaataaagataactaagacatgattcctgtcttcaaagtgctcataaccaaacatgacaataatacttcatatctgccaaacattcaaaactgctctatatgttttctcatttggttttcacaagacgctatggggctggcaatgaattattcattaattcatcaaaaaaggattctggaaatagattagatattattaccccattttataggcagaaaaaaaaaaaaaaaacttaggtgatttgccagagatcatatattgctaagttatggcgaacccatgtccagaaccatgtcaaatgagtgaacacagtgctttgttttctctaccctaccctagctgtccaactccatcaactggatattcagtttacacaaacaaaaggatttctaaaaacatttactttttgttttagttttctcagtaactgagatcatgaagcagaagctagtggggctttataattaagaagaaaaatgcacattagcaaaaatgactttcattcctcttgctctgagtgctaagaatgtactcaaattagtaacattgatatttttcactatagtttatgtcaattctatacctatggtgatactgacaaccttcagaatacctttttaaaaagtaataataacatatacacatcacttgcttttaaattatctgtacctttgagacgtactctgaagtcattttagggatgattcttccttttaataaaaagtacaaaagattctgaaattggaattcaggcatcagaatatcaacttattaaaaccatgattcacttgggttttttccatgtcataaggtttcaagttatttcaatatgagtggaacttgacagatatttgaaaaataattatgttttcattaggcatttgctcaatttcaaagactcattatatgcatattagatattagcactgtacttcaaataagtcaggtagatgaatcaattctttagatcagcagaagtcagaaaataaaagtacagtgaatctaactcaactattaactttacgtactatgaaaatgaccttatcttcagaaaagcaacatccaatgaaacaatccacctacacacaaattaaaaacaacattgcctaaaatgcaaaaatatctaaaaattaaggaggtcatcatctaggtcttagccaactgtaatacagagttgaaacacgagagggcaacgaagattaaagaaaaaaaaaaaatcacagttggatcccataacctaaggttcttggaaatagttgcacatttttacccgaattataaacatctgctacgtgaacaaagatactgtgattattttagagtaaaattttagatagctgttccacgaaaaaggataagattatcaactaatatttcttgaccacaattctgtcagctttggaaaactgaatacttaccctgaaacactgaaggttgggtaagtatggagacaaataaataatcctgacatatttgtagttattagactgttcttcaccaaaatattagtgtgattcaatgtctaaatatgaagtataaagacgaaggaagtgtactgcaaagttgaaattcactctact

SEQ ID NO: 1879632 - DNA, 4001 bp, Homo sapiens
ggtttcacaatgttggccaggatggtctcaatcccctgaccttgtgatgtgcctgccttgacctcccaaagtgctggaattacaggcgtgggccaccgcgcccagccctaggcatcagtatttttctaaacattccccaggtgattcttaaagtggccaggttcaagaacagctgatctaaaggttcaactcactgtaagcatggaacagcctcaaaggaacttcctgcaagtgatccagacttaactctgttggtcttaactgcttttaattttcttgtccccactgaccagttatgtgctgaaggcaattaattgccacctctcattttaactcctttcaacagaggaaataagcaggcgtattcctccttctctgtatctcaccccagttcctgacccagggtgtacttgacaggttaacacttggcgatgcatgacattgaggtgccttcctctccctaacctgaaggacgctctagtgagcaattatcacaccaaaagaaagatgaaggagtctgcagcattcaaagacagaagagcagccaggcatggtggctcacacttgtaatcccagcactttgggaggccgaggcgggtggatcacgaggtcaggagttcaagaccagctaggacaacacagtgaaaccccatctccattaaaaatacaaaaatcagctgggcgtggtggcaggcgcctgtaatcccagctactcggaaggctgaggtgggagaattgcttaaacccagagaggcagaggttgcagggagccaagatcgtgccactgcactccagcctaggcagcagagctagactccgtctcaaagaaaaaaaagagcactgagaaccagctgtaaatggtgatctactcttgctaaaacgattccttaagctcaacagagtcaatcttgtttcaaatgcatttagtggcagaaaaacaaactaattttctttcattatttgactggactcaatgcattcaagtcatgaaagttgatgattccaaattcagaataaaataacacatgacacagatagtttagcattttatcctcatttttaacctacaaagtgtaatgttctcataaagtattttaataaatatattaaggcttaaggtaattactggtttgagtggcgggtggtttgctttctagcacactagtttacattcggaatcttaaaaatgaaaacatttgccatcttacagtgagtgatacatcacattggcttgccccagtttttgtgttctttttttttttttcactattcaacatgtcttcgtattatcttccttcctctcgtatctgatagacaaagaatgatataaaattttggttgaaaaaagccagttgattgggatgactagaaatgttaactttttcagtaaaaagctttcaccgaatcactgggcagttagtaatgcagcttacaaataaataaagctgaggcgagaggtttaaacagcaagaaaagctgcagagcatattgaggaagggaagcagtgaaatggtggttttaatacatcccaaactggaagcaagaaccctaacacaaagaggattggaatactctaccatctgtaaggaagtagctagctacaagccacctcacacaaaacacccactaaggcctttcaccgagatcctcttgttatattctcattatgaatccccagcaggtgcacctcaataaataggtgtggaggatactgctgaggacctctaggtcacctaagcagaaactgctgccatcaaagcagactgccaccatgcatccgcggagaactccctgcctacaaatgaaactggtagcgctcatcccctgtgcccgaggaccgtccacaacggaggtgctttcttgcaagagaagcagcaaatgatgacagcgtgtccagtaggaagggcttcccaacagtcacatccctcccaagaccctctagatggactccagaatccagtcgctgctggagagggaggagacaggcagtgacaagtcccgaggagggcctcggtccctcctgtcgtgcagggagttctgctcctggaaatattcctcctcttcatcgaagaagccgttctccagagcgtaagtgcagtctgggctggaggctgcctggcatgcccccttgtactcctgaatcgactcgtagaggctgtacagttggcagagcaaggacatgtccagctggcggagaccaaccttgagggaaggggtggggaggtaaaaaacgagaagtcagcacttgagtttaatttcagtggaacactcagccggcgatctgcgcctgccagcacattccttccacacggcgcatgattcagagcatcactcggatgctttggatttccagttttgagaacaccttaattgtgttatgcccatacctcagacgttactcattgagtccagtgaggatcgcatctgtggggcaaccagggcagcctgcagaatttaccctggcgctcctgagtgtgcctgatgaagcaacagcactgcatattctagtggccccacctgctttcactttggacgccaagaaacgagtgtgtcacttcctctcccaatcagactcggagaagacccacattggccttccctgctactgcgttaggatctgactgatgcagtcattctcaactcccaggggcaacagaatgccctttgccagtgacagcagctggccaacgtgacatccccctggagcacccacctctgtgcagttcagtggtcagaggttacactgcctccctctcctccaggcagggtcagtcttatcccagatggttctgggatccctccccagagtaactgactgaatatgaggaagccctggaagatgaagggctctacagttcctcctgaaaactagccccacaaaaacaagcagcaaaagaacacagaacatttataaaagtcatatacttgtttatcttccagttcctccctcccccaccacccatcccagagaaaagagcacggtcacagtcagaacaggaaatgcatcgtttacaccaataccaaagagagaacagttaagcctcttggaaatgcagcatagaccagcatcggtgcctcttaacctttaaagtgcatgagaaccacccggggatcttgttcaacaagcagactctgattcagtgggtctggggccactggatggctgtgcttccaccaagcccctatggtgattccgtgctatgctgctgttccacagaccctgctctgaatggcaacgggaagaaactcaagaagacaccaggggacctgccttcggcttcttggcccctgagcaaggtatttatcaccttcatctccgtgccttggttgatggcaaaatggaacaataatttctcttatggagctattagggcaattcaatatcaatccactcaataaacaggattctaatgcctcccgggctaaagcactaaagatgcatgggtacagctctcctgggcggctggagaaggagcttcttctctggagtgcgccggtggcagcgcctgcagacctaactagctccaggactttaaaatactggaaatctgtcccgatccaaattcttttgcaagccagatgattaaccagagggcacgaaaggttgagaacattcgacttccctgcaaaccttggtatagatcacttccttttctgttaggaaacgaaaggcaccaaagagcacaatgagtacaagaaagcgtcgaggtggagcaataaattctagacaagcccagaagcgaacacgggaagcaacctccacccctgagatttccttggaagcagaacccatagaactcgtggaaactgctggagatgaaattgttgacctcacttgtgaatctttagagcctgtggtggttgatctgactcacaatgactctgttgtgattgttgacaaaagaagaagaccaaggaggaatgctaggaggctgccccaggaccatgctgacagctgcatggtgagcagtgacgatgagttgttgtccagggacagagac

SEQ ID NO: 1879633 - DNA, 4001 bp, Homo sapiens
cttcagcaggaggcttatgtagtgctgcatcatcggcttggggatcagcgtctcgaacaccaggctgtcgacgcatttctccttcagacctgaacccccaccccagaaagcatgagtattgaccagggtcttgaggatagcaagggatcctaaagggcttttctttctttatctaggagccccctgaagaaactcagagccacttgccccatggttccataagagtcccttaacccctagttttgaaaacttagatcttctttttagggacatgctgtgagctgggggtgaggagtgaagcaagaagccaaggcttagcaaaagtgtccctgggagccaaagttaggactgggtcttactcatctttttatatctcacattacttaagcatcttcatattataccttctcagtgagttcttggtgaatgaatgcatgatggattatttgatgatcctgtccctgccttcatgccacaccacctcaccccaagagacaaagactgacctttgagggagactgatatgttattgacacctcgacggcaaggaggcatctcggggggctctgcatccaacactcgtttcacgtggctgatgctgtagccatggatggactcagtgcttagtcccagggtagaggctgggtccattttagaaatatagtcctgacagaaaagacaggcagaagaagaagaaaatatacaaacacaggtgtaaaagccacaacaaagaatgtctatcagaggaaacagaaatagatggagaaagtgcagagcatatgcttttcctaggtagcatttctccataaagcctcaaaggtccccaggatcccagtgcctggacggtttaatatcctgtgagaagccatgcatggtggcacatgcttgtaatcccagctactcaggaggctgcgacaggagaattacttaagcccaagagttcaaggctgcagtgagctgtgatcacgccactgccctccagcctgggtggcaagagtgagaccctgtctctaaaaaagtatatatattccacgagaggatgaacaacctttttgagtacaggtatccctttaccttgaacacttggaaaacagcttcatccagcatcttccagtcaacttttccactgaccttgctacagcccaggaagaattcctgctgcttcaagtcctgtaaggccaaggaaggaaaagctcttgagcttcactgcagatgactccatgaaccggggtcctaaaggccttaggagttgagttctttggttttggaggtacccagggtccagattttcttggataaatgtaacagtatttgttcattcccactgtggctctccctgaagttccttacccctttgatgatgtgctgcgggggcatcctcaccaccacccggagggtcacttcctcctttggaccacaagtactgatgccatccatgggtgacaggtctgtggggattgaaaagaaccaactggttttaggagtacccgcagcctttcctaaactttcccatcattatcctttccaaaataactctgtttgccacagagaaggaatggaggtcccaaactcaaaagtagttaaggttgaaggaccattacaactcagtgtcttaggacactggcatctgcttggcttcggcattgttaccgccctgaccaaagcaagtggaatggtgtaacagtgaaataagcccttttcttcccttcacccttatagattcttctcccacacaggtacctgtgtctgcaagactggggccgaaggaatgggtgagtgccaggcctagggagcggcgtggggaagataatgcagatgatccagggacctgccctggagtggagcctgatgaggggcctggggctaccttcagtcggtcattctctgctttcagcaggtccacctccaactgtggcaagaacagacagggtagggtggcagactggacagacagcaagccttggtcttccctttcctgcagctgtccgcccagacactgacctgcatgttgtgcatggtctcccgaagctgatccagttggtgggcagagttgagggcctccaagcggatgtctgtaagcttcatttccttctcccatagctcagagcgcagctccgatacctccttcttctctggctcctcctcctcatttgcatggaacagcctagtgtggggggctgggtgagcagggcccctgtaagatagcaagagtcaagccaggctacatgaagaagcactagagttactagagaatattgagaggcatggttggtggtcttggcttctcctgcccattgatattcaatcagcatgagaagaaaggtccatctgttggtctcatatgcccagggagaggtcagtaataagtactgcttgtctaaggtctaatggcctcctgtcaactctagcccacagcttacactggtaacaggctgggtggcagggagccaaagagcacttactcggtgacatcagtgcccacggaggacgaggtggaggacttgatggagggtgaagcagtctctgtagaaccatgctgtagtttgggggatgagggggctgaagagtcgggtgtagcaatctcctctatatccgagtatgaggaagctgacttgggccccttttttatactgaacgctttgttgaaggaacttcgaagctagaaaaaagcagatccaggtagagggacattaggactccactactgggatgggggaggactggattgagacttctgagacagagagagctggaggcgggggatttactttaattaagccaccctctataacacttcacttgattcatagaatacggacagaagagttgcctagaaattaggaccgtggaggcagaggttgcagtgagctgagatcgagccactgcactccagcctggcaacagagtgagactccatctcaaaagaaagaaagaaagaaaggaaattaggaccaagagaaagaacagaatcttctagcttgctgatgttgtaggctatgggaacttcctgggtgttctcttgctcatagggggaattgtgcccctgatggggacagagagaaggtcccagaggtcacatggtatacagctcagtgatccaatcccaccttctgcagcagaacaataaccgctcagtctagaacctggctcactgtgggcctcagaggccacctcatgatgcctctgactagggctcatcagcccagaatctgttcatctagtcatctgtcaaccagaaactgacaatatgattctgtggagaacacgagaaggcagtgggctcaagcttcttttagtatttcttgtgcccaggacatcacagaatggttaaaacagccagacagcattttctatgatttccaatgtcctagaagaagggctatttcccagcatttctttagagtacttggggcattataatctgaccatagcttgtttgatcttggtgttgatgagcttgggtgttagggatgtgagctagagatgcaaaccagggtcctgtcccatacccatccacatgcatccatacagcatgcacacaccacacaccacacacacacatacacacacacacacagggacacagatatgaaatggcagcaagaggcagagagtaaaggaggggtcaaaggttataggggacaaaggcaaaccagatctttgggacggtgagaaaaaagaaggaaaaatttgagggtacgctttctaagcgtctctcctggaacataggaaggccgtcaggtgatggatggagctggtgggtggtgcatcttggggtttccaccaggcaagatgtaaaggaggaccaacttggctgtggtggagacatgaatgagtgagtatgtgtgcagctggctggctccaggtgacttcttatcactgagcagtcagggctcaaaagtaccataaagctcatttctctgtagagatgaagaaccaagcctgaaaaggccagagagttgacttgcttgaaattgcataattgacgtaagacttaggac

SEQ ID NO: 1879634 - DNA, 4001 bp, Homo sapiens
ccccattttagcaagataccctattctgttcatccattcgtcaattggttgacgaacaaacttattccacttgttggctattatgaataatgctgaattaagcatatgtacaagtttctgtaggaacatgtttcaattctcttgggtatacaggagaactacccaaaagaattgaaacatagtacctcattttattgcactttgcttcactgaatttcacagatactgtggttttttacaaatttagtggcaaccctgcattgaataagactattggtgctattttttccaatagcatgtgctcattttatgtttgtgtcacatttcagtaattctcatatttcaaacttattcattattatcctacctattatggtgatctgtgatcagagacctttgatcttactattgtaattgctttggggagccacaaaccgcatccatataagactctgaatttaattgacaaatgttatgtgtattctgactgcttcactgaccagctgtttccccatctctctccctctcgagccttccaatttcttgagacacaacaataatattgaaattaggccagttaataaccctacaatggtctctaagtgttcaagtgaagggaagagtcatatgcctttcactttaaatcaaaagctagaaacgattaagctaagtgaggaaagcatgttgaaagccaagacaggccaaaagctaggcctcttgcaccaaacagttagcaaatttgtaaatgcaaaggaaaagttctggaaggaacttttagaaaagtgctactccagtggacatatgaatgataagaaaacgaaacagccttattactgatatggaaacagtctgagtggtctagaaggaagatcaaaccagtcatcacattcccttaagctaaagcctaacccagagcaaggcgctaaatctctttaaagctatgaaaactgttagaggtaagggagctgtagaataaaagtctgaagctaacagaggttggttcatgcagtttaaggaaagaagctgtctttctgtaacataaaagtacaaggtaaagcagcaagtcctgatgtggaagctgcagcaagttatccagaagatctagctaagataattgatcaaagtggctaccctaaacgacagatttccaatgcaaatgaaacagccttctatcagaagcagatgccatttaggactttcacagctagagaggagaagctgatgcctgccttcaaagcttcgaaggacatgctggttctcttgttaggggcttatgcagtggtgacattaagcagaagccaatgctcatttaccattctgaaaatcctaaggcccttaagaattatgtttaattgaatctgctctataaatggaataacaaagcctggatgagggcacatctctttacagcatgttttactgactatttgaagcccactattgagacctactgctcagaaaaaaagattcctttcaaaatactactgggcattgacaatgcacctggtcatccaagggctctgatggagatgtacatggagattaacattttcattgtatcccatagatcaaagagtaatttcaaccttcaggtcttatttaagaaacacattttgtaaggctatagctgccacagatagtgattcctctcatggatctgtgaaaagtcaactgaaaacctagaaaggattgaccattctagatgccttattaagaacttttgtgattcgtgggaggtcaaaataacaatattaacaggagtttggaagaagttaattccaaccctagtggatcactttgaggggtagaagacttcagtagaggaagtcactgcagatgaggtgaaaacaacaaaagaactagaattagaagtacagactgaaggtgtgagaattgttgcaatctcatgataaaactaacagataaggagttgctccttatggatgagcaaagaaagtggtttcttgaggcgcaaaccactttctttgctcatccgtaagaagcaactcctagtgaagatgctgtgaacactgctgaaatgacaacaaaaggatctattatagagtactacataaacttagttgataaagcagcagcagggtttgaaaggactgactccaatttggagaaaagttctattgtgtgtaagaagctatcaaacaccgttacaagctacaaatacatcttttatgaaaggaagagtctatcgatgcagaaacttcactgatgtcttatttcaagaaactgtcacagccccaaccttcagcaaccaccactctgatcagtcagcagtgatcaacattaaggtaagcccctccaccagcaaaaagaatacaacttactgaggttcagatgattgttagcactttttagcaatgaagtatttttaaattaaggtatatacattggtttttaagatataatgctattgcacacttaacagactatggtacagtataaacataacttttacatgcactgggaaaccaaaagatctgtgtgacttgctttaatgcaatatttactttattgcaatggtctagaaccaaacctgcaatatctccaagagaagcctgtatatctgggaggagaagtatggctcatataataactctaattttttgagggttccaatttctctacatgtttgtcaaaacttgttattgtctgtcttttttattttagtcatcctagtgggtatgaagtgatatctcactgtggttgtgatctgcatttccctgaggactaataacgttgagtatctccttatgtacttattgccatttctattatatgtcttctctggggaaaaaaaagtattatatattcaaatcctttacctatttttaagtttggatatttgtctttttattgttgcactgtaagtgttccttatacattctggatactaaactgtaaccagacacatgatctgcaaaacattttctcccatcctgtgggtcactctttttatttttatttattttttaaaaacagcattcattgatttttttttcctgaaaattaaacaggttttgataaaaacttggtgacacttaacagtgaattttctgatttcttctggaaaccatacctagtaacatgaatagaaaaaaatctttgcatcctgagcaaaggagacagaaaaaaaaatccccataaattccatattatgtgtaagtatggctaaaggcaactgagaatagtaaaatctacacaggaagacgtaagtgtgtgacagggaataaccagaacaaagcttaatgtggcagctgtgcaaattctcaaacaactaatcactcccaaaaggagagggcttcatccttcatacgaactattcttaaaacaatataatagaatcttgcttcatggtttcaacagagaggaatttttatattacatagccaaagaactggttttacaacctcagcaattatttatagaataaaatcttcaaattaaaaacaatctcaaatttgactttctgagtatgtgaaataacctaggcaagaatactgaaaatggcgtttcattcaccaaatattttttgagcaccttttatatgtcaggtactattacaggtattggaaaacaacaatggacaaaacacacaaaaaatccccaatgtcacagaatttacagcccgatggagcaaacaacacatgaaatgaaaaagcaaaatatacatagaaagttactgttatggagagaaataaagtagaaaaggggataggtagtatcagttaaaggccgtgattttaaataggatggtgaagtagggcttcaccaagaaggttacataagcaaagacctgaaatacacagggaagaaaaaatccaggtatccagggaagagcatttcaggcagagtaaatgcaaaatcctaaaatagagtcatgcttggcctgagttactaagcaagtagatgtggttagagcacagtaaagaagaaaacagtagaagtaataattaggaccagataatataagatcttgaagccac

SEQ ID NO: 1879635 - DNA, 4001 bp, Homo sapiens
agaggattttgtagtttgtaactatgaaaatttatctggctaaacaagccatcatttcagattgtaccgactgcatgacagtgtcaaactacaggatcattagaaaacctgacccatcctggctaacaaggtgaaaccccgtctccactaaaaaaatacaaaaaaaattagctgggcgtggtggcatgcgcctgtagtcccagctacttgggaggctgaagcaggagaatggcgtgaacccgggaggcagagcttgcagtgagccaagatcatgccactgcactccagcctgggcgacagagctctgtctccaaaaaaaaaaaaaaaaaaaaaaaaaaagaaaacttgacataaatgtcacttatccaagtaactgataaaaatgctgcaaagagctaggcacagaaaagagagccatgtacaacataaaattcacctcctaaacttcatttcaatctgttttacttctttcatctttcaaggatttattattaatacaccagaaggatggcagaggaaggtgaaaactctcatttgaggcagtattttgggcagatccaacaagataggatacttttaaaacagaggctgaacttagcatacttataattgcttactttcccagaaacactctagaagccagaataaaaaatgtttcctctcgaaaaatccttctaaagatgcaataattcatatcattacccaaagcttcctcatcaaaaacgtctaacaaatggtgtttgaacgtgctggcaattatgaaatatcgtttttcatgactttgctcagtaaaagcatgaaaagacaaaaacacctctaacaaattatataacagaaattctctgaaaaacatcttttcattttcagcaactagaaaaatcctatttaatcacattagatattcccatgtggggaaaagctctgagtacaagcatagctcattttattctgctttgctttattgtgcattatagatattgcattctttacaaattgaaagtttgtgaaatccttgtgttgagaaagtctatcagcaccatttttccaacagcatgtgctcatttcgtgtttgtcacattttggtaattctcccaatatttcaattttttcattattattatatctgttatggtgatgtgtgatcactgaccttttatgttatcattgtaactgggagcgccatgaactgcacccatagaagacagcaaacttaagaaagttgtgtgttctaactgctccacctactgtctgttgtccccccgcctctcccatttttctcctctccttagaccttcctattcagcagacacaataatattgaagttaggccattatatggaaattaataactgaacagtggcctctatatggtcttgtgtcacatctctcactttaaataaaaactataaatgactaaacttagtgaggaaggcatgttaaaagctgagataggctgaaagctacttcaaaagccaagttgtaaatgcaaagaataagttcttggaggaaatttaaagtgctactccagtgaacacacaaatgataaagcaaaacagccttattgctgatatggagaaagagcagtttggatagaagatcaaaccagccacaacattcccttaagccaaaatgtaatccaaagcaaagtcctaactctcatttcaattctgtgaaggctgagaggtaagaaagctacagaagaaaagttgaagctagcaaagtttagctcatgaggtttagtgaaagcagctgtctccataacatgaaagtgcaaggtgaagcagcaagtacttatggagaaactgcttcaagttatccagaagatccagccaagaaaactgataaaagtgcctacactaaacacatgattttcagtgtagatgaaacagccatctattgaaacaagatgtcatgcattgacttctctttagctaggactttcacagctagtgagaagtcaatgcctggcatcaaagcttcaaagcttcaacaggctgactctactgttaggggctaatgtagctggtgactttaatttgaagccaatacttatttactatctggaaaatcctagggcccttaagaattatgctaaatctactcagactatgccctataaataaaataacaaagccagaatgatagcacatctgtttgcagcatggtttgctggctattttaaggccattgtagagagcttagattcctttcaaaatattactgcttactgggaaaacacctagtcacccaagagctctgagggagatgtatacagagattaatgttgctttcatgcctgctaacacaacatccactctgcagcctatggatcaaggagtagttttgattttcaagccttattatttaagaagtatattttgtaaggctacagctgccacacatactgatttctctgatggttctgggcaaactacataaaaaacttcctggaaaggattcaccattgctgatgccattaagaatattcctgggtgcagtggtgtacgactggagtcccagctacttaggaggctgaggttgcagaattgttctagcccaggagtttgaggctagcccaggtaacatcgtgagaccctattcccccaaaaagagaggagaggagaggaggggaggggaggggaggggaggggagaggagaggagaggagaggagagatttgtgattcatgggagaaggccaaaatatcaacattcacaagcatttggaagaagctgattccaatactcatggattactatgagggattcaagacttcaatggaaggagtaagtgctgatacggtggaaatggcaaaagaactagaattagaagtagtgcctgggccgggcacagtggctcacgcttgtaatcccaacacttcgggaagtggaggcgggtggatcacctgaggtcccgagttcgagaccagcctgcccaacatggtgaaaccctatctctactaaaaatacaaaaaattagctgcgcatggtgggagatgcctgtaatcccagctactcgggagggtgagccaggagaatcacttgaacctgggaggtggaggttgcagtgagccgagatcatgccactgcactgcagcctggataacaagagcaaaactccaactcaaaaaaaaaaaaaaaaaaaaaaaaaagtagagcctgaagatgtgactgactttatcatgagaatctcatgataaaacctgaacaaatgaggactggcttcatatggaggagcaaaaaaaaagtgatttcctgagatggaatctactcccggtaaggagctgtgaacattgttgaaaggacaacaaaagatttagaatattacataaacctagttgataaagcagcagcagagtttgagattgactccaatgataaaagaaagttctactttgcgtaaaatgctgttaaacagcatcacatgctgcagagaaatctttcatgaaataaagagtccactggccgggtgcagtagctcacgcctgtaatcccagcactttgggaggccgaaacgggcggatcacctgaggtcaggagtttaagaccactctggccaatatggtgaaacctcagctgtactaaaaatacaaaaaattagccagatgtggtggcatgtgcctaaagtccccgcaactcaggaggctgatgcaggagaactgaacccaggaggtggagattgcagtgagcagagattatgccactccactccagcatgggtgacagagcaagactccatctcaaaaacaaacaaataaattaaaaaaaagaagagtccatcaatgtgacaaactttgtcttatttcaagaaattgccacagccatctcaatcctcagcaaccactaccctgatcagtcagcacccatctacattgaagacacttcaccagcaaaaagattacaactcactgaagactgagaaaatcattagcattttttagccagaaagtatttaattaccagccgggtgcggtggcacacacctgtaatcccagcacttta

SEQ ID NO: 1879636 - DNA, 4001 bp, Homo sapiens
ctgactcacctgtatggggtggtgcacgtgttgttaggtaccatctacctatctacaccactgatgtacaacgaggagatcctgccctggctccagccagctgtgccaccgtgggcgagtaccacagagttcaagctttctccagctgctaaattaaaggattagtgctttaacttgggtcaaccacccatttgcaaacctgacaagaaccacaaacactcttacttcaaaaatgcatataagcaaataccactgaaattttatgtagagtatcaaggggttctcttagcccttacactccagtctaaactgcttggttgatgattgttagaccagcagccctctagtattcctttcagcactccaagctaaaataaaacagctgatgtttagtaacaatttctgcaaattattcaacaccatagaagagtgttttgttaagactagagactaatctaacacaatctactcaacaatgttaaattgaccagtaaccaatagatgactagaagaaagtgtatgtaactagatataccaaactatagatactaattttaaaatcttggaaaggttttggaggagccctactgtttctgaattggaatttttcatttgcaaatacttaacaaaacccaccaagccagatagagctctatagcgatgcctatggaggagccttataatgatgttgtccaagtaatgtgcttaacaataatcacactcaaagccaaaggttcccatgctcctgccaatataacatgctcacaacggtcaattccaaaggaagagctgtcaagaagtgcctgaagatttcctcaaagggagagataattcatgagcaaacaaacatcatgtccctaatcttctctatcctggggtaaacaaaatatagttttctcccatgatttcagttgctttctataccaagtcagtaagtaaaactgattcatactggtaacttccaggttccagccttggtttgaaggggcacacaattcaataagagtaaagaagactggccatgtaagcccatcttgaatactgacaacttccgtaccatttacctaacactacaaaccctactccatttaagtctctgagatctttttgatgtattttgagcttttcaacttgccttttttggtgggagaggagggaggaggagaacaaagggagaatttgaagtttttatttctgcttgcattgactcaaattgtggtaaagaaacttaaaaggtaactttaaaattctagtgacactagccaacaatgaaaactatctaattagaatgttagaggttttttttgtttgagacagagttgctctgttgcccaggctggagtgcagtggtgcgatctcggcttgctgcaacctccacctcccaggttcaagtgattctcctgcctcagcctcccaagtagctgggattacaggcacacgccaccatgctgggctaatttttgtatagacagggtttcaccatattggtcaggctggtcttgaactcctgacctcaggtgatccacccacctcagcctcccaatgtgctgggattacaggtgtgaaccactgtgcccagccaaaatgttagatagttttaacacaggctataacatagtcataaattaaagaagacatggtcgtaaatgaaagaagacctctttttggtgggagtagtagtaggggtgggagagtagagttatacatttcttcttagcagttgcttcaacatattttattaataaggactatctgctgaagcacagaaatacaattatgtgaatatcatactaccaatggcctgttccatcatagcagggatagttcttatagtgtataaaatcctctgccccattcagctctctttatggagctttcctcagaagcatcagaaaacacagaattaaatatcacaattcttgttgaaggccaaaaattagttcccagaaggattctttgactttcatccttctacaaattcacccatcaccattgtagataatgtgaggggtgaatttgtagaaggatgaaattcagagaattgtttatgatcaatagattgttccctttattccagttgtcttcccttgatgtccacttaacattccataataaatggacaaatggaaaagcacaattactctgccaaaagtcagtcaacattctcccaggacactcagccatctaacttgaaaactgactggtaataatatcattctaattactttaactagaaatttgttatacagaaatgctttcagtgtggggaaagaaaaatcacttgccacttatagaaagaattctgcttcatgtgaccatttgcaataatgaaacaagtaagacaacactgggttccagtgtacagcacaaggatcaaggcgaaacataatgctttcattacgtaagaataggactgacattattctggctttcccctacccttcatcatttaccaatattttttcagtctcaggaatttttcaacccctgaaactcctagatttactactcaagacacagctatccatcttgaggctttctgccaatggctctagtgcttctatttcaacagcttatagatttgaaagctggaaagagagatatgtaaacaaattctctaactttgatctatgcacccaggtttctcaaaagaagcccttggagagtctggggtatactaagtgtatgacttgcagttgtaatcattagagtgacaacccatttccagtgggtaccgttttagccaacccaaacctttcttttcctaatgcatagagtgactttttaaaaaatggtatatttgggaaagtattttagaatggcatgttaacaaaacaaaaacactctagaatatattttcaaataacagaacttggccttaccaagaggtctaataccatcaggtaaataatcatttttatcagtgattcataatacatccagactctaaatgttaaggctgacttttttctgacactcttctctgcctattcatactccatttcctaactcctttagagtaaaaattgaaatcccatatccctaacaactagacagaagcatcatgtttacatcctgacaaattcattaattctgtacctctgaaatatttagcaaaaagccagcactgactcaatcatagatttccacagacaggtctgttcatatttgtaattggtattcactgaaaggtcaatgactcctgttcccaagtatctatgagtctctagattttcttaattggcctcttttcctcagctcttacagactattgttttaaaactaccaccatttagaagttgaactccgagtgaggggaaaaacaaacaaacaagcaaacaaaaaaaacactttttgattcccactccactcataatcaacataacacagactacttctgacccaggtgtgatggaaggagcggggcacagagtcgggggaggtttctccacacaccaagcaagcaatcaatcacttccacagcagacatcagctgggtgtccaaaaattcaattttgacaccacttacctggaaatagcatcaagtctcataggttgaaagctcagtcccataagactgctccccacttcagatgcccatcgaaaaaacaggttgtggcctgttataaatacgcgttcccatgaccctcctccttaggattgattgatttgctacagaggctcacagaactcagggaaacacttaacttatgcacgttataaaggatatgacaaaggatacacatgaacaaccagataaaagattgatagggtaaggcatgtggtatggcagggatccctgaccctctggcagcagacaggtaccagtcagtggcctgttaggaactgagccatatagtagggggtaagaggtgggtgagcaagtattatagcctgagttctgcctcctgtcagatcagctggcattatattctcataggagtgggaaccctattgtgaagtattcatgcaagggatctaggctgcatgctccttatgag

SEQ ID NO: 1879637 - DNA, 4001 bp, Homo sapiens
tggctaattttttgtattttttttttagtagagatggggtttcaccatgttagccaggatggtctcgatctcctgacctcgtgatccacccgcctcagcctcccaaagtgctgggattacaggcatgagccaccgcacccggctgtctggcccctaattttcttaatagcatcatcgctatttgaaattcttgttttctggagcatgtctattgtccatctctcacactgtctgtctctcactctaccaccagaatgctcagagatctcctgtctcgtttgctagcacttacaacagtacctgacataagagctcagtaaatgttgatgaaatgaatgacatacatttcccagttgtgagaattatctgtttaagtcctttgcctagtttactgatttttttgttttttaaatgtttacatatttttatattaatctttttctatttgctacaatgttttttctagtctgtttgccattttattttaaactgatggttctttatttaaatatcaaatatttttatgatcacatgtatcaaatgaaaacttagcatttattaaccttcccaatcaatggagcatgacttatattcactagttgagtactatgccaagagaatgaatgacacattcagaaaaagcaagacataaaacacattgcaacctccccgagttccctctgaaatacagccatcatcttaactctcctcatgtccaaaaaaccattatcttctcccctaaactagcaatctctgccaatcttccctatcaacagtattctcccaggccccgataccataaatgttggagtcatctttgtcactactctttgaaaccttgtattattaccaacattattcacaaaataccatatggaaacttctaagatataaagttgctttattctatccctcccttcctctcattcccactgatattacctcaatccatgtccttactaccacatacctaggatacttgcaatagctggactgttctttgggcttttagtctttgatccaatagtccttaaacagagttgtatgaaacagaatgacacgggggccttttgaaaaacaaaggagtctagactctcccagtctagataggccccagatatggatttgttgatttgggttaattttcaaagattatgttacaaatacccagctaaaaagcactgctttaaaccactgcttaaccctgttgcaagatcaacccctctaaagcatgactttcaacgtcacttccaatagcaagaacgttctcttgttcctaacatgtaaaaaatactgcaaattgatttttaaaagtcaaatatataaattcataagcttacgatacttttttttttaaaaacttcattaatagatcaatggttacagagggaagaaaatgcattatcctgaaaacagcaaataaaacagaattaagcatacatctagtctgtatagcctgtataaaatattccaggataaccaaatagtcaatgaaagtaagttcttttttttctcttttctttttttttgagatggagtctcactctgtcacccaggtcaggctggagtgcagtggcatgatcttggctcactgcaacctcctttttcgggattcaagcaattctcctgcctcagcctcccgagtagctgggattacagaagcccaccagcacgcccgggtaatttttgtattattagtagagacagggtttcaccatgtaggccaggctggtctcaaactcctgacctcatatgatccgcccacctcagtctcccaaagtgctaggattacaggtgtgagccacagcacccggctgagggtaagttctttacagaaaaattctagctaataaatgcagaagaaatgaaagaattatagaatgttaccttttcccaactcttttttttttgagatgaagtttcgctcttgtcacccaggctgaagtgcagtggcacgatcttggctcactgcagcctcaacctcatgggttcaagcgattctcctacctcagcctaccgagtagctgggattacaggtgcccaacacaccaccaggttaatttttgtggttttagtagagatggggtttcaacatgttggccaggctggtctcgaacaaaggaaatacacagcttattaagtattcttgccccactccccttaaaatgaaaactgtttaaaaaaccaaaccctgaataaaatcaagctttagatctgactaccagtttagaagacatatagggaggaaagaagcaacttagatgacacatcaaagatataaacaggcaaattcagtatatgaaacaatctacagaataaatcaaccaagtttcttcaaacaaatagcataattggggagacagggttttataaccctgggcttgtgggccaggcacggtggctcacgcctgtcatcctggcactttgggaggctgagatgggtagatcacgaggtcaagaaatcaagaccatcctggtcaacatggtgaaaccccatctctactaaagcacaaaaattagctgggcatggtgacgtgcacctgtaatcccagctacttgggaggctgaggcagaagaattgtttgaacccgggaggcagaggttgcagtgagctgagatcgcaccactgcactccagcctggtaagagagcgagacttcatctcaaaaaaaaaaaaaaaaaaaaaagagagacttgcgttatttatcaaccaaatacaatgtatttttttgtttgtttgtttgtttttgagacagggtctccctctggttgcccaggctggggagtgcagtggcatgatctcagctcactgcagccttgacctcctgggctcaggtgattctcccacctcagcttcccaagtagctgggattacaggcacacgccaccacgcctggctagctttttgtatttttagtagggacggggtttcgctatgttgcccaggctggtctcgaactcctggactcatgtaatcttccagcctcagccttcgagtgctgggattacaggtgtgaaccaccacactcggcctaaaaatacattttttagataatcaggtagtctgaagataggctgggtattagatgatattaaggaatttgttaggggatgacagaacaagattgccaaaatgttgatagttgttgaatactgttgatatttaaattttaaaaaacaaaacaaaacttttttcttttgtgttctacctaggacctaccaaagtgttgaatgttacaaacaagacaagaaaggctgaaacctccttggtgggctttagatataaagtactatgtatttgtaactatgaaccaaaacattaacatctctaatacctaatgtccccatacatacacacatacatttttctatagactactcgactcctctacctagctatccttccagcatttcattcaatctcacacaactaaagccgaaacctctatccccaaaacaataccagctctttggcctcctttctatttctttttaatgttctcaccattctgctgttctcacacaggctaaaagcttgctttgtctatccatctaatcagcttatatctataaaatctctccatttctaccaccaccattaccttttaggctttcaatacttctcacccaaggccttcttaaccagctttctctctcttcctcctaccctatccatactacacaatatccccattttcttttttaaaaatattttttattatctttaccacagttatccaattaggtgaattatcccttttcatctgccctatctgtaccacataatattgccaagattcaccttcctgaagtacagatctatttctatcactgtccacttcaaaatcctccaagttcccctcctgtctacgaagcaatgactgaactccccacaatggcattcaaagtgttctgcaacataaaccacctatttttacaagcccacatgaacactgccttccagccacattcttttacaaccacccaccagaggacttccag

SEQ ID NO: 1879638 - DNA, 4001 bp, Homo sapiens
gattatgaccaaatcaatttagcaggttgtgagcagcactttttttttgagacagagtctcactcccattacccaggctggagtgtggtggctcaaacaggactcactgcagcctcaacctcccaggctcaggtgatcctcccagataagcctcccgagtggttgggactataggtgtgcgccactaagcccagctaatttttcttatttttagtagagaaggggttttgccaatatcgcccaggctgttctcaaaccctgggctcaagagatacacccacctcagcctcctaaagtactgagatttcaggcatgagctaccacatccagccaagcagcaattttttttttttttaagatatactttagggataccaagagttcatcacatgtaataagcgttgctttaacaaattgtttcagttgttacaaataagttttgtatgtgtgtactggattgtgatgtaagatgtatttcatgaaattaccatacataaaagtactagaaaactgaagtgctaaattacatgttctgactataaggtcaccagaatttcaaaaaaggtgaccagtgtaacttagagtagtctgaggaagttttaagaaggtatgggacttagcctagttcttgaaagataagtagaatttaagtagatgaaaagagggtatatcaggagataggcagcataagtgaagaggcttgctgtcagccagacggcagctgtgacttagttgtgttaaaacctgttgacggccaggtgcggtggctcacgcctgtaatcccagcactttgggagtccgaggcgggtggatcacgagatctggaggttaagaccatcctggctaacacggtgaaaccccatctctactaaaaaatacaaaaaattagccggacgtggtggtgggcacctgtagtcccagctactcgggaggctgaggcaggagaatggcgtgaatccaggaggcggagcttgcagtgagccaagatcgcgccactgcattccagcctgggcgacagagcaagaatctgtgtcaaaaaataaaataaataaaaatacaaaaagtagctgggcatggtggcacacacctgtaatcccacctacttgggaggctgagcagaagaatcacttgaacctgggaggcagaggttgcagtgagctgagatcgccccactgcactccagactgggggacagagtgagactctgtctcaaaaaataaaaataaagtattatgataaattataacagtaatatatggtagaaatgagacccatctagtagtaagtagtgagaccctgtctctacaaaaaaaatttttttttaattagccaggtatggtagaatgcctgtagtcctagctactcggtaggatcgctagagtccaggagttcaaggctgcagtgagctatgattgcaccactgccttcccatctggttgacagagcaaaactccgtcttccaaaaaaaaaaaaaaaagtgttacagtgttgtctagtcaatatttctccctcctccatcaaactctgtcccaaggtgcagaagaccagacctatagcaaagtacactggccagataggcacatcattaatggcactacccaaactcctcaccactttcctctggactgtaacacctccccgacctctacctcccaacttgaggaaaaaggaatacatctatttcccaaaggtttagacaactgtgcttttccatacagcacatataatcaggcattcagcagccagaggaaggtttgactgcattaataccttacttcgaaagatcctactgtccacctgtgttagaagcctccccttctgtgaaacactaggatgatgtccttccgcttcataaggtattggtccacttttccatttccatggatattttttgtttttgttgagacaaggactgactctatggcccaggctgggggtgcagttgcgtgatctcagctcactgcaacctccatctcccaggctcaagcaatcctcccacctcagcctcccgagtagctggcgtgtgctaccatgcccgactaattttcgtatttttagtagagacggggtttcaccatgttggccaggctggtctcgaactcttgacctcaggtgatccacccgccttggcctcccaaagtgctgggattacaggcgtgagccaccggccccggcctatttacatgttggactgaattaggtacgctcagcccactggtaaaataataaacattttagggctgttttctcagaaatagaactctccctaggaactctttcacaaagcatatccatttagtattgttcaactaacattcactgagggtcttcaagcatcaggaacgttcagggcgaggggcacagcagtgaataagccaggtacccagtctagaggagctgccatgctaagagggcgcgcagacgcctatgagctttagtactgcccggtactgccgagcacagtaagtgcaggacagaggtaagcacagtgcaaggctctaggggaaagtcaggaggatccgaggcgtcctggagaagatccgatctgaacggatcctttcaggatgcacaaaagttaacaggtgaagatacacggtacaaacagaacagaagcaaagcaacagaggcatcagacaactgcgtccggggagaaacgaaaggcagtttggcattaaggagcatgcgggcgatgaggggaaaacggccgtgggagcctgcggcgtccgggtcccaagcagtcactggagggacagagggaggccggaatctgccactcgggccgaggcgctgggcatcaggagcgtttctcctcgccatccacatctggagctgtctctgtgagggctcctgtgggggctgttcctgggagggccgagcaggcggcattcgcgacctgcctccctccggggcaagccagcccacacacctcgggactccgctcagaatctaaagaggtgagatccttggattatctcggggctgcttcatgaactctgaccagaagaaaagggaaggaggaagcagaaggccgcaggaaccagcccgagacgctatgaccccagagattccgcagagtacaagccaccaagtcgccacgccgatgacccacgcgcggagcagtcgaagctaggagaccggagggacagagaaacccaggcaccgaccgcccccgagcctcagagggccagcagggccgctgctcggtttaccttggtcatgccaacccccaccacgaacacccggcgcagggtcgcaggctcccacggggaagaggacatggctgcaccagtgcgggaccggggcgggcgccgcggacgactgccggcactgacaggcggagactgcaccagagctccctgaagcccgaagccagggccgcgggcggcaacacaggcgcgtgagagtgcgcgtgcgtaggggcaggaggagggggcggggtggggcgcgtcctgtggggcggggagcgttctctagcccttaggcagccgaatccctaatttgcggacttgggcatgggactgagtcaacctgtccccatctctgatcctgtgcttaggttctgtacggtgagcgggagtaggcttgcagtggggcctaagactgagaggaggggttggccggaaagcggactcatgaaaggtgaccctgaggagagccgttggggttcgtgttggaattggcctgtgtcctgttagcggtggcagttgagagtgaattcatgaatttaaactcacaggacaccaagaaagcggggatgggcaggatctcacacatggatacaatgtctaaatcaaaaaacccaggctccgtcaccagctgcgtgacctttttaatcttgtgaacaaaagttctccgaaaaggaatttggaagacagagactttattccagcaaaccggggagaaacagccttccatgtttattggagaccggagtctcgctctgtcgcccaggctggagtgcaatgccgcgaactcggctcactgcagcctccgcctcccag

SEQ ID NO: 1879639 - DNA, 4001 bp, Homo sapiens
tttagtcatgcagtaatctagtgacagaaaaagaattctctatgttggctcagtgaagtaaagaaaaccaccatacaggtatttaatacatttggaatgtgattatcccttttccaggaaaggaagacactaattttgttagaactcctgaagttaacacacactagaatgatgttatcccttttaatgaccctacctctctctcccacagatcccttaaccatctcaacacatatttggatagcacataaaattgtaagccactctctgctctggctatgtagctgctaagaatgcccaagctcttttcctttgtagtgagtcactagacatttctctgtacgggttcttctcccttgactgggcttccttttgtgcttgcaaggctgccccatccatgaaatcaagacagaccacataataaactatgaatgttcaaagatctaaatgttctatgttacctgcttcttctgccaagtcagggtagtctcttgaattctcagctccaggcttcacaaactagagatatagaaagagataataaatacaaacaagtatagttacatttttttttttttttgagacggagtcttgctctgttacccaggctggagtgcagtggcatgatctcggctcactgcaacctctgcctcctgggttcaagccattctcctggctcagccaccccagtagctgggattacaggtgcacaccaccatgcccagctaatttttgtatttttagtagagacggggtttcaccatgttggccaggctggtctcaaactcctgaccttgtgatctgcctgcctcggcctcccaaagtgctgggattacaggtgtgagccactgcgcccagccaagtatagttacattttttacacaataaaaatctattcattcactactcattcaaacaaaaaacacattattattagactctaataataaataatataaaatccttgccctcagagtgcttccagtctaacctaagacagacagttacactacagtgtcagaagtacagaatgtcttgacagagacatctacccagacttggagggaggaaaagaaaggcttcccagagaaactgccatttaaattaagttcttatggatgagtagcagttagcaaagtgaaagagaaggaaattttggagtaaagatctagaagtaagagaatacagcagttttttctctgtggaagaactgtaaataatttggtatgacataggttaaaacataaagtggaaagtgttaaggatggctgggtgtggtggctcccgcctgtaatcccagcactttgggaggccgaggcgggaggatcactgaggtcaagagttcaagaccagcctggccaacatggtagaaccctgtctctactaaaaatacaaaaattagccaggcatggcggtatacgcctgtgatcccagctcctcaggaggctgaggcagaagaatcacttgaaccaggaggcagaggttgcagtgagccgagatagtgccactgcactccagcctggatgacagaatgagactctgtctccaaaaataaaataaaataaaataaaagtgatatgaacataaaagtaccttaggtccaaacaatgataacaactaatatttattgggcgcttactgtggtatgcattgtgttaagcatttcacatgtatttactcatttaatcctcacaaccatcctaaaaggtaggttccgtgcattacagataagaaaactaggacacagagagataaacaactaacccaggggcatagagctaataagtaatggagctgaaagtttagtctaggtctggagccaactcacaagggaccctttatgccctgcaatgctggtctgggctttatcctgaagacagtgtttttgtttgtttgttttttgagacaaggtcttgctctgtcactcaggctggagtgcagtggtatgatcacaacttactgcagcctcaaccaccctgactcaagcaatcctcccacctcagctccctttgcacccacagtagctgggactacaggcacgcaccaccacgctaagttaatttttgtattttttgtagagatggggttttgccatgttgcccaggctggtctcaaattcctgggctcaagtgatgctcctgcctcagcttccaaagtgctgcaattacaggtgtgagccaccatgcccagatgacaatgttttttaaaatgagactggaataaaacaacaatcagataccactattaattagaatggcaaaaatccaaaacactgacatcaaatgctggcaaggatatggagcaataggaagttcggcaatttcttacaaaactaaacatgtacaggttgggcatggtggcacacatctgtaatcccagcactttaggaagccgaggtgggtggatcatttgaggtcaggaattcgagaccagactggtcaacatgatgaaaccctgtctctactaaaaatacaaaaatgagctggtcatggtggccagcacctataatcccagctactcgggaggctgagacaggaaaacccaggaggcagaggttgcagtgagccaagattgtgccattgcactccagcctgggcaacagaacaagactcagtttcaataaataaataaataaagcaaaaataaagcacacacaatacacatatgaattagcaatagcactccttggcatttacccaaaggagttgaaaacttatgtccatataaaaacctacaaatgggtgttttttgttgttgttttgttttgttgagatggagtctcactctgttgcccaggctggagtgcagtggtgtgatcacagctcactgcagcttcaacttcccgggctcaagcaatcctcccacctcagcctcctgagtagctgagatcacaggtgctcataatcatgcctggctaatttttaagtttttttgtagagatggatctcactatgttgcccaggctgatctcgaactccggggctcaagcaatcctcctgcctcagcctctcaaagtgctgggattacagtcacgagccactatgatggaaccacacagatgtttatactagctttattcataactgtcaaaacttggaagcaatcaagatgtccttcaggaggtaaaaggataaactgtggcacatccaaacaatggaatattattcagtgctaaaaagaaatgagctatcaagctatgagaaaacatggaagaaccttaaatacatatcatattaagtgaaagaagacaatcttaaaagactacaaactatgattccaagtaaaggacactctggaaaaggtaaaatttatagagacagtaaaaagatcagtggttgccaggtgctggtgggagagaaggatgaatatgtggaacacagaggatttttaaggcagtgaaactattctgtatgatcctataacactggatacatgtcattacacatttttcaaaatccatagaatgtacaataccaagagtgaacactaaagtaaattatggtctctgggtgataatgatgtgtcaatgtatgttcatcgatcataacaaatgtatcactctgggtgtgcccttgctgatagagggagaggctatatatggagggataggggaaacacatgggaaatctctgtaccttgtactcaattttgctgtaaacctaaaatttctcttaaaagtagtctatttttaaaaagagaaagagactgggatgacgagacttgcattttagatcatcctagacacaatgtgaagaaatgatgaaaggagcatggcgggaggcagtgagaccaactagcataattctgaaacaggccaggtgagggctaagacagaagcaaaaaagaaagaaatagacctcagaaatacaagggaagtaaaatctactgaacttgatgactgattaggtaagatgtagtgctttgctggtgagtggtcacattaaagagaaatggctttgaatattcttttgactgcaaaccaaaataaaatacattttaca

SEQ ID NO: 1879640 - DNA, 4001 bp, Homo sapiens
atatttaacatgtggcactttccagaaaaagcttgctgacttctggtgtaagtaatcaataagaggtaacataaaatgaatttctcagcttataacgcaatttttaaaaagaaagaccaacatggtaatagaaacaagaagacttttcaaaaagcatgataaacacaatgacttccaatccccacacatgttcttacgaacttaagagcaaagaggcataaaatgaatccaagaggtaaatgtaaatgtggagagcattttaatattccttttccttatacttttacatatatctaaactacctactttctacttaaaaagaattcttacctaatctgttcagtctgtacaatcccttctttgtgaccctccaaacgggcagccaatctctctttatcaaggcgcacacactcttcatcctggaaataaccactggttaatgcatttaaaatttttattgaacttttaggaagaaaaaacgctacatgtaacttttccttaccaaatttcctacctctacaattctaggtatcagtgtctttaggccaacttcaagactacttttggctacgtaaagataataacaataaatatatgttgaatcttaagactggaatcatcgaaaagcttaggaaaaacttgcttagctacttttttctttatgattaagtgctcttcccatatcatagctgactttcttcagaaagacacaacaaataaattcatctttttgagaaagttaataaccaaatgttatgacaagccttcaccagagtcaacaatttcattttggtatctccatttttttttcatctgttgctacaggtcctgaatccattagcactaatcaaaatgctctaaggaaaaccttaaaggttttcaaaggatggtcattagaacgttagaagcttccaactaaacgcctcatgggccacttcaagattttgtctgaaattcaaccctggtagctcagcttttatctaattcacatattatgatgtcaagtaaaatttagtctgaaaagctgttggttaaaaacaaaacaaaatctggtaaccctgatccagtttaatgtccacattcaacaaataacaaaactgaggaccagagtcaatgactatgactaatgaaatacaaaactgtataaaaagcatcagcatactctagagatccaaaaagatgttgggctccaattcatgtcctattattaatctatcatgtaaaaatcttaaaatgaataaatcagctgaaataaatgcaaaaatattttggcaaatgcatccaactttttccatttgcaataaagatatagcccagatttctcaaattccttactactgattttaaagataactgcagcctagatttttatcaaatcagaaactctaccctcagtttctctttcctagcacagttccttatagatcctcaaaagacatacactgaactgaaaaccaatgttgaaaaccatagctgtttatgtaacacatttcaaccccacaaatgatttggaaaaaaatgtattatgccatttcctgctgattttttaagttactggaatcccaggaaactaggacttctgccatgttgaattttttcaaataattagactgtgatgttcagattgtttcaaataaatggcatcccttgagctgggcgcagtggctcatggcagtaatcccagcacttcgggaggccgaggtgggcagaatgcttgaggccaggaatttgagatcaaataaatggtatccctaaattcatacacattgtttaccacaggtcacaatctcctttcatataaggggaaatattcagttttactgccacaaaatttatacccagtatagcagaatggctagaaaccagactgccaaggttccaactggttcttcaaacctcaggaactcactctgtctgagcctattcgctcatagatgatatgcacagtactaccaacttaatgagttctgggagtactatgcatatcatctatgagcaaatacgattacatgagttaatacatataaagtacttagaataacacatagcatagagcaataacaatgaatcaattatcatcattatctcttaaaaatatcagatccatttctcagaatatccttaattaagattacattaaagtagtaagtacttcatgttcacagctctgagcagtaaagcaagcacccataacacattgttccaaaggtaggcaaactacatcccaaagaccaattctggcccgccatctgttttctgaagttttttatagaaacatagccacatctgttcatttatgtattgtctatgagtgctttcacactacaatattaaagtaaaatagttgcaacataaactgtatggcccataaggcctaaaatatttactatctggcctttcataaagaaagaattctgtagcctggccaacacggaaaaccctgtctctattaaaaaaaaaatcaaaaattaactgggcatggtggcaggcacctgcagtcccaactactcgggaggctgaggtggggggatcacttaaaccccggaggtcgaggctacaataagctatgatcataccactggactccagcctgggtgacagagaaagattctgcctcaaaaaaaaaaaaaaaaaagaacagaaaggaaaaagaattctgacccttgagccaataggttcatccataagaatataaaagcaaagaaaataaaatgatttgtccctcacatagcttgcatgtgagagagctaaaactatagcttgagctacttattaatcaattgttctttctaccacaaaaatttttccagaaaaaaagctcctcaggttactgcaatcaaagaatccttgttactaaagaatcccaatttcaataacaatataaataaaattgtttaaaatacagtttctttacctcaattcgtggtttctttgcttctgctaaaacttcatctgcagctcgtttgactataaaagaaagagaagtaaataaatgtgtagttttggaatgggcttctgaaagttcaatataaatatgcaacaagacataccttgagtagatcgctgaagacctatttctaagggagcgcttctgtctatacttgccgatgttgctgaagacataaaaagattcacgtaaggattactatttcaacatatatattggatattattacaagtgaaatgctttaggttttttatatacttctatatggtgattttctctaggtaaaaaattcagttttaaagcagctctgcaaaaacatgttatttaaaagattaatctatactagaaagtctctaagaggacaaactatttttaacaatttagcttacaaattactgagatgatctgactgaaattagttgcttcaaagtatatgctccaatgtcataacacagacacctaaaaaggtgtaagtaaacacataaatatatatatacacacacacatacacacacatatatatggacaagattttttttaagttagcattcaccctaaacatgcaatttttagttattcacaactggtaaaaaactaaattatttttaaaattaaattacttaatttttgaatggctcaacaaaaaggggtatacctgtccccattcacctagttcccaccaccctatgcagccaactagtctcttatatatccttctagagtttctttctgtagatatgagaaatacaaaattatttttaccctttttaatacaaaaggtgacatactaaacatactgttctgaaccctgttttcttttttacctaacaacttatctcccataaccctccatatcagtaagtagagcatttcctttactttttttttgagacggagtctcgctctgtcacccaggctggagtgcagtggcgatcctggcttactgcaagctccacctcctgggttcacgccattttcctgcctcagcctcccgagtagctgggactacaggcacatgccaccacgcccggctaatttttttgtatttttagta

SEQ ID NO: 1879641 - DNA, 4001 bp, Homo sapiens
tgcctggctctgggaggcagatatggatccaacccaacctttctcagagcagccctcagtcctcccacttagggaaggcggcacaagacagagtctgaatctgactcaggtttccctgaaaatctgcagtgccctttctgctcatgccctgagcctgagacctcaagttggtccccctcaccctctacaagtgggatctaatctacgaaggccatgcaccgtttcacctcctgcactggaagttgtcagggctacaaatgctgggatctgatccacgaaggccatgtaccgtttcacctcctgcagcgggacatgtcagggctgcaagtactgggatccgatccatgaaggccatgcaccatttcacctcctgtggcaggagatgtcagggctacaagtactgagatatgatctacaaaggacatgcaccatttcacctcctgcaccagatgtcagggttgcaagtactgggatctgatctacaaaggccaggcaccatttcaccttctgcaccaggagatgtcagggttgcaaggagctgtgggccagccaatgcagcttcagaaatctatagagggaaaaactgaaaagacacagagggcccagactccaccttgcccaagacacctcgtccgaggtactagtcacttcaacctggactcacgccatgccagccctgctccagtctccaagtcactcaggtccacaccgcaaccaaagttaacatgaaaatctgatcatcagagagatggcacagtggggagctcagtgagaaactactcagtggcttctcatttcttctaaaataaagacatcagaatccttaccaaggcctccaaatgtattccccatcaccctgccccatttggtgcaatccggtcaccccggtctcttctggggtcctctctgcttgagatgtcctccactggtccaacctcacatagccggaatggggctcctatcggattcctctcatagctctagacttttctggaagcactagtgaaaaccctattatagagctctgactgaccatctgtgtgcccgccaggccacaggctccacacagccagcccgtacccatcccattcaccaccaggcaccccaagcctaacacactgactggccacagtaagcacctgagaaatacaatcaatgcatgagtgtcagagctgacaccaggcccccaggactggactccaaggccagtgctcttctgctatcacctggggctggacactggccccttgggttccccagtggctaaggtgaggggtggccaaggacaaggagaggagaaatagaaaggaaattatctttgcttcatgcagcctcctgacttttccagccattatctggagcctgataaggctaatcctccctatcaccgacataaaggcaacactaggtgagcagagaaagtgcagggcccagggcggggcctggagggaaagaaaggcccagccaggcaaagtggctcacacctgtaatcccaacactttgggaggctgaggagggtggatcacttgaggtcaggagtttgagaccagcctggccaacatggtgaaaccccgtctctactaaaaatacaaaaattagctggacatggtggcacatgcctgtaatcccatctacttgggaggctgaggaagaggaattgcttgtacccgggaagaagaggttggagtgagccaaaatcgtgccactgcactccagcctgggcaacagagtgagacgatgtctcaaaaaaaaaaaaaagaaagaaagacccaatgccagggatgagctgcttcagccactgcccagcaaacatcaggcaacatttgtcaagcacttgccaccacatgccaagcattaacctaagtgagacaggatcatctcactgaatccaccacataagcgtatgaggaacgcatgacaagttgagcatccctgatccaaaaatccaaaatccgaaatgttccaaaatctgaaactttttgagtgtcaacgtgacgctcaaaggaaatgctcattggagcattttggactttggaacttgggagtagggatgctcaacttgttcggcaaattctccaaaatccaagcaagtccaatatacaaaacacttccggccaggcgcagtggctcatgcctataatcccagcgctttgggaggcggaagagggcggatcacttgaggtcaggagttctagaccagcctggccaacatggcaaaaccccatctctactaaaagtacaaaaattagctggacgtggtggcgtgtgcctgtagtctcagctacttaggaggctgaggtaggaggatggcttgagcccaggaggtgaaggttgcagtgagccaagatctggccactatactccagcctgggaggtagagcgagactccgtctcaaaaaaacaaaaacccaaaaaacgaaacactctgttctgaagcatttcagatgagggacactcgaccgtagaatgatctgtttacggatgaggttcagagttactcactcctggctcagggtcacagctcatgagtgacagagcaggatttgaccccagctgttccttactcaggagacttacagtatggctgaagcacctggaacatctcagaggcccatggtcaggtggggctgatgggacacgttcatcctcctcaccatacagctagaacctcatttccacctgaggaaagccgccgccccaaggtgggcagtgacttgcccaaggtcactcagctgtccactggcacagcagctcagcccagggactcttcactccatgccatgacctctgccaggaaagggaaggtttggggattaaggaggctgcaagaaagggagaagtcttttccatcccctgaggtgagcagggtcaaaaccctaacagaaggtcggacgcagtggctcacgcctataatcccagcactttgggaggctgaggcaggaggatcacttcagcccaggaggttgagatcatcctggccaacatggtgaaaccccgtctctacgaaaaaaaaaaaatacaaaaattagctgggtatggtgatgtgcgcctgtagttccagctacttgggaggctgaggtgggaggatgactgagcccaggaggttgaggctgtagtgagctgagatcatgacactgtactccagcctggacaacagagtgagactctgtctccaaaacaaacaaacaaacaaaccaacaataataacagaagaggtttggcatctggggtacttaattggaataaacagaagagaccgaggacatctgagttccatacctcccctcctgccaccatccttcactgctgggccctgctgtcttgatattcctgatcgaagatgatcactccaggaagcccattggtgggagagggggatcatcataaccacagcagcacttactgagcatttcaggtgctgggcactccaaagtgctttccatgtatgagaccatttaacacgcaggacaatcctatgaggtgactactactgtcatctttattttccatatgagaacataagggagcccagagagggtgagtaacctgcccggggccacagagctgccaagagttggagccaggatccaagccatgctgtgttctggaccatctcaacagcaaccgttcaacgcctactgtgtgccgggccagatgcagggcacaggaggcaggctgctcccaggggtgccactgccaagcactgcctcaatggcgctttcactactttagaagtgtgatgataatcacaggttttaattattctccaactcaaatactcacagagcacgcattcggtaccagcatccaggaaaccactgatcacatcaccgctaatccttgcagccacctgctacgtggctgttaatacaatcatccccattttgcagacgaggatactgaagggacagaagctgccttgccaaggccacaaagcactggatgggctcaccgaggtggccagcaggacattccaggccaaaggcactgccccagccact

SEQ ID NO: 1879642 - DNA, 4001 bp, Homo sapiens
agagtttctctcttgttgcccaggctggagtgcaatggcacaatctgagctcactacaacctccacctcctgggatcaagggattctcctgcctcagcctcccgaatagttgggattacaggtgtgtgccatcacgccccgctaatttttgtatttttagtagagatggggtttcgccatgttggccaggctggtctcgaactcctgacatcaggtgatacacccgcctcggcctcccaaagtgctggaattataggcatgagccaccactcctggccagccatatcttatacacagtgatcttaaccaaagcctcatactcaaatttagtttgcaagacgttgctgaagatagaacgcactgctgatatggctattgagaggaacacagccaaagacagctaatttgtcttttcttgctgctcgaggaagactttaaaatttgaacctggcagcataggttgataaaactgaactgcaacatgtgctacccttcaagaaaaagaaaggatagcccagagggtagagcctcaggccctgagggcagaggcctgagccaaagccttcaagcctgaaggaatttgtcctactggatttcaaaattgcttgggattagtgattcttttctttcctcctttttcctccccggttaaatgggaatgtcgataacggttacccatgcttgtcccaccattgtattttggaagaagataacttgttttctagtttcacaggttcacagatagaaattttgcctcatcctggtccatatccagagtctcatttatacctgatttagataatttatatgatgatgagattttggacttttgaattgaaaatatataaatgagagttgagacttgatttcatgctgctatgggttgagactttgaggatgttgggattgggttaatgtattttgcagatgggatggatgtgaatccttgggaaccagaggatggcctgtaataggctgaacaatttaacaatgcccctcctcaaagatatcacatccaaattcctggaacctgtaaatgttatcttacttacaagagaaaagggtatttgcaaatataattaagttaaaaatcttaagatggagagatttttctgcattatgtgggtgagccccaaacgctataatgaatgcatcgttaaaagagagaggcagagggagatttaacacaaagagaagagagaaggtgatgtgatgacctcaacagaaagagagaaatttgaagatgctatgctctatctttgatgatggccagaggagccatgagtgaaggcgtacaagaggggtcttgccactgaaaaaaataagaaatgccagcatccaccagaagccagaagcggcaaggaatggattctctcctggagcctctgaaaatgaacatggtactgtcacacttcgttttcagcctactgatagtgattcccgactgctgacttctagaactgtgaatcaattgctattattttaagccattaactttgtggtaatttattacagcagccacaagaaactaatacctttggtttttcagcgtttcctattttactactgtgagggggcttatagattgcaaatgatggagcaaacagcagtgtttctcagatcactagaagtctgcagcaataggcttagtattcacattataagattgttataaaattgttctaattttgtatttgccttccctttggtttctaacatcatcattttacattatcttaactttttttaaatttcagagagatccaaacattggttaaaacttagctaacactaagggtgcatatagttgaaactgttggagctgtttactacagcactttctatgcccttctagttctgacttctaaccctgatctagagccacgatgatgtatttccctcaccttctttggtcacagaaggaggacatttcacccagatctgcggcctaatcacaggccacatttctgaataggccacggatctgggcaaaatgtcctcttttctcaggagctccccaaacaataaatcagtaaatcatatgaatttttgcatgaagttttatgaatagtggctttcttctgggaatacctcccttttttaacttcctctgatttttttctggactatgtatcaatttttttctttaatgtttcttctctctttatgctgattatcatctctttaaacttacccaactcacagaaagctacaaatttttgcacttccccatcccacatgcctatagcagagtcaacaaaccatgtgagcagcagaaaactcatgtcctatttaaagaacacgctgctttctgaaatgaacatggcaactaatctgccaattaattatttgtcaataatgaaactgcagccacattggcttttgacgtgattgtaatattccaatattatactaaaatttcatgttctgggagccctgacaactttcagttagatgagctctaattagaagtttctagtgctcagtactttccactatgaactagcaactacacatagagatctacaatctgatctttcatcatgaaacttgagatataagtaccttgatgcttcaacagagctaaaccaaggctccacctcttcctaatcatgctccaaccagtatttttttttaacttaatgccttttattcattcaacagcttgctttgcagagctcacagctgtaacagatgtgtcctatggtaagctcttccacagtaactgtagcctgttggtcatgagcttccatttgttgaactctacattgtgactgacaaacttggctgcaccttaaaattacctgaagagcttttaaaacttgctgtcaattaaatcaaattctctgagagtgggacctaatgctcagtgtgttttttaaagctcccagtttatttcagtgtgtggctaaagaaccacaacacaatatcctaaacttctcattactgatcattctttcttcaatgttctttttctttattcatcatcacttaacatttcctctaaggctttattagcatagttctataattccttagagttaaagaaaattcagatatttttacatcattgaaagctaaaactttgttacttacataagtgcttaaaaggcatgcaatgcccataaattctgtgttagattcaaaatagttaaccttattttatacattatagaaattctaaggttaattttttaaaaattaggtcttaaaatgcttacatttacaaatctgatcaatagttgcaacctcttgttactgtttgcttttataaattgaccattagatgcttgtgctcatgagttgacacattgaaattatgcaaggttgaattttgaaaaatctctgtcaccatatttaatggttcaagggaatgaaaggattctagttacataggcctaaaggacataatgaaatttaaaatttgtttcccttagaaaagattaagatatattttcttaaaagatattaagaaaggtattcttccatatcctaagttcccttagtaagtttccatgattagcatcaattgttgaagtgaagttaatttatgtgtgtcttaccgaatttactgtggataaaggatgactcaaataagtatacacttggccatctgtttttgcaagttctgcatccacagattcaacccaccattgatttaaaaaatccaaaaataaaaataaaaaatcaaaatcaaaatcaaaaaacaatacactacaactattcattaagcatttacattgcattaggtattataagtaacctagagatgatttaaagtatctgtatataggttatacgaaaatactatatcattttatgtaagagacttgagcattcgtagattttggtaaccacggaggtcctggaaccttccatagataccaagggatgactgtaattacttggaaccagccctgaccatgatcagtatactcatttaccaattcgcttccatttgatactatacattcacaggaccatgcagaggagggcagggc

SEQ ID NO: 1879643 - DNA, 4001 bp, Homo sapiens
tactgatcatggtcagggctggttccaagtaattacagtcatcccttggtatctatggaaggttccaggacctccgtggttaccaaaatctacgaatgctcaagtctcttacataaaatgatatagtattttcgtataacctatatacagatactttaaatcatctctaggttacttataatacctaatgcaatgtaaatgcttaatgaatagttgtagtgtattgttttttgattttgattttgattttttatttttatttttggattttttaaatcaatggtgggttgaatctgtggatgcagaacttgcaaaaacagatggccaagtgtatacttatttgagtcatcctttatccacagtaaattcggtaagacacacataaattaacttcacttcaacaattgatgctaatcatggaaacttactaagggaacttaggatatggaagaatacctttcttaatatcttttaagaaaatatatcttaatcttttctaagggaaacaaattttaaatttcattatgtcctttaggcctatgtaactagaatcctttcattcccttgaaccattaaatatggtgacagagatttttcaaaattcaaccttgcataatttcaatgtgtcaactcatgagcacaagcatctaatggtcaatttataaaagcaaacagtaacaagaggttgcaactattgatcagatttgtaaatgtaagcattttaagacctaatttttaaaaaattaaccttagaatttctataatgtataaaataaggttaactattttgaatctaacacagaatttatgggcattgcatgccttttaagcacttatgtaagtaacaaagttttagctttcaatgatgtaaaaatatctgaattttctttaactctaaggaattatagaactatgctaataaagccttagaggaaatgttaagtgatgatgaataaagaaaaagaacattgaagaaagaatgatcagtaatgagaagtttaggatattgtgttgtggttctttagccacacactgaaataaactgggagctttaaaaaacacactgagcattaggtcccactctcagagaatttgatttaattgacagcaagttttaaaagctcttcaggtaattttaaggtgcagccaagtttgtcagtcacaatgtagagttcaacaaatggaagctcatgaccaacaggctacagttactgtggaagagcttaccataggacacatctgttacagctgtgagctctgcaaagcaagctgttgaatgaataaaaggcattaagttaaaaaaaaatactggttggagcatgattaggaagaggtggagccttggtttagctctgttgaagcatcaaggtacttatatctcaagtttcatgatgaaagatcagattgtagatctctatgtgtagttgctagttcatagtggaaagtactgagcactagaaacttctaattagagctcatctaactgaaagttgtcagggctcccagaacatgaaattttagtataatattggaatattacaatcacgtcaaaagccaatgtggctgcagtttcattattgacaaataattaattggcagattagttgccatgttcatttcagaaagcagcgtgttctttaaataggacatgagttttctgctgctcacatggtttgttgactctgctataggcatgtgggatggggaagtgcaaaaatttgtagctttctgtgagttgggtaagtttaaagagatgataatcagcataaagagagaagaaacattaaagaaaaaaattgatacatagtccagaaaaaaatcagaggaagttaaaaaagggaggtattcccagaagaaagccactattcataaaacttcatgcaaaaattcatatgatttactgatttattgtttggggagctcctgagaaaagaggacattttgcccagatccgtggcctattcagaaatgtggcctgtgattaggccgcagatctgggtgaaatgtcctccttctgtgaccaaagaaggtgagggaaatacatcatcgtggctctagatcagggttagaagtcagaactagaagggcatagaaagtgctgtagtaaacagctccaacagtttcaactatatgcacccttagtgttagctaagttttaaccaatgtttggatctctctgaaatttaaaaaaagttaagataatgtaaaatgatgatgttagaaaccaaagggaaggcaaatacaaaattagaacaattttataacaatcttataatgtgaatactaagcctattgctgcagacttctagtgatctgagaaacactgctgtttgctccatcatttgcaatctataagccccctcacagtagtaaaataggaaacgctgaaaaaccaaaggtattagtttcttgtggctgctgtaataaattaccacaaagttaatggcttaaaataatagcaattgattcacagttctagaagtcagcagtcgggaatcactatcagtaggctgaaaacgaagtgtgacagtaccatgttcattttcagaggctccaggagagaatccattccttgccgcttctggcttctggtggatgctggcatttcttatttttttcagtggcaagacccctcttgtacgccttcactcatggctcctctggccatcatcaaagatagagcatagcatcttcaaatttctctctttctgttgaggtcatcacatcaccttctctcttctctttgtgttaaatctccctctgcctctctcttttaacgatgcattcattatagcgtttggggctcacccacataatgcagaaaaatctctccatcttaagatttttaacttaattatatttgcaaatacccttttctcttgtaagtaagataacatttacaggttccaggaatttggatgtgatatctttgaggaggggcattgttaaattgttcagcctattacaggccatcctctggttcccaaggattcacatccatcccatctgcaaaatacattaacccaatcccaacatcctcaaagtctcaacccatagcagcatgaaatcaagtctcaactctcatttatatattttcaattcaaaagtccaaaatctcatcatcatataaattatctaaatcaggtataaatgagactctggatatggaccaggatgaggcaaaatttctatctgtgaacctgtgaaactagaaaacaagttatcttcttccaaaatacaatggtgggacaagcatgggtaaccgttatcgacattcccatttaaccggggaggaaaaaggaggaaagaaaagaatcactaatcccaagcaattttgaaatccagtaggacaaattccttcaggcttgaaggctttggctcaggcctctgccctcagggcctgaggctctaccctctgggctatcctttctttttcttgaagggtagcacatgttgcagttcagttttatcaacctatgctgccaggttcaaattttaaagtcttcctcgagcagcaagaaaagacaaattagctgtctttggctgtgttcctctcaatagccatatcagcagtgcgttctatcttcagcaacgtcttgcaaactaaatttgagtatgaggctttggttaagatcactgtgtataagatatggctggccaggagtggtggctcatgcctataattccagcactttgggaggccgaggcgggtgtatcacctgatgtcaggagttcgagaccagcctggccaacatggcgaaaccccatctctactaaaaatacaaaaattagcggggcgtgatggcacacacctgtaatcccaactattcgggaggctgaggcaggagaatcccttgatcccaggaggtggaggttgtagtgagctcagattgtgccattgcactccagcctgggcaacaagagagaaactctgtctaaaaaaaaagaagaagaaaaaagaaaaaaaaaaaaaaaaaaaagaaagacatggtcagctcgat

SEQ ID NO: 1879644 - DNA, 4001 bp, Homo sapiens
gagagaggagtctgttcccagaactgtagcacaaaagctagaggctgagtaggaacatcttaaactaagtcctcagtcttatttccagttttcttcctgtagatcggggcttaggacaccctgtcacattttcttcactcctccaccaggaattcctaaagtccatgctcttggatcctggcaaatccaggaggctgggggatgtggcaagcttcagcaagactgcctgggaccaaccctgcagccttaattcccaggcccgctcagcccagctggccagcaaaggcaggcagagcttctgtgtccacacatgagaatgacctgcagctgttctttgtccaggctgaggtccaggattcccactgcagctcctaggaaatctttaaaattaggtcggggatgagcctgtcagtagattaggtagggaacttttatgaagttgagggtgaaccatctggagggtgaactggctggtgtgattctagaactgggggtggtgcctagcagtgcatttgtgagaagacacagccaggcttggtatatgatgtggtgtgtgtgtatattcacaggcatcgtggagcatatacactttttttgtgtgtgttgaaataaaccttacagattacaaagtacttttttttttttttctgagacagggtctctctctgtcgcccagcctggagtgcagtggtacaatcatagctcactgcagcctcgatctcccaagctcaagtgatcctcccgcctcagcctcccatgtagctgggactacaggtgtgtgacaccatgactggctattttattttatttttgtagagatggaatctcacaatattgcccaggctgatctcaaactcttgggctcaagcagtcctctcgcgtcagcctaccaaagtgctaggattacaggcatgagccaccacgcccagccagattacaaaatactttgacatcttttctctacagccctcaaaaggaggcagggcaagcacaattaaatcccattacaaatggggtgactgaagctccattcatggcttgcccagggtcacacaaagaatgaatagcagatccctgagcctgtgtgcttccctctgtgccaggctgctttacccaggcatgggtgcaccttgtgcatgggacatttctcctttgttgtgtcctgagtaccttaagccactcagatattgctcaggtggagtgaggggaaaatgttttcaggttgtattagtcaaaacaaaataccacacactgggcgactttaaaatcatacatttatccctcacagttctggaggcttggaagtccaagttcaaggtggcagctggacgggttcccggtgagggctctcttcctggtttgcagacagccaccttctcttcgcatcctcacttggtgggaaaagacagaggagagaaagagagagagagaaaaatgagatagcgagagagagagaaatgagatagagagaaatgagagagagagagagagagagagagggagacacagagacaatgctctcttttcttaccagatctataatgagggccccaccccatgacctcatctaaccgtaattacctaccaaaggcccatctccacataccatcacattaggggttagggtttcaacataagcatttggagaggacataaacattctgtctacaacatgagtggagatccatctcttctttacctctggtaaggggaccacacgctgcagccagcgagacagtggcatgttcttgttacaactcgatctaactcccccagaagaggaggcagggaaggcggacaaaactgggagagggagagagtgttaggaagagagtagggtggccagaggcagcaaataaaatataaaatgcttaattctgaatctcagataaacaaccaataatgttttttagcataagtatgtcccaaactaagcttgggacatatttatgctacgaaattattcgttgtttatctaaaattcaaactagctgggcatcctgtcttttaatctggcaaccctaaaaggcaagggccaaaaatgccggaggcaagccaacggattccaggagggacaactgctggactttggactgatgatgctctttttatatatttaactttttaaaaaagcctcttttctttctttttaccagcttttcactagctttttaaaaattgtggtaaaacatacataacctaaaattcaccgtctaaaccatttttcagcatacagttcagtgggattaagtagattcacactgttgtgccgccatcactaccactcatttccagcacccttccatcaccccagcctgaaactctacccattgaacacgagctgcccaactccgccttgcttccccattcctggcgaccactgcttctgtctctgtgaattttgactattctaggcacttcacaaaactggactcatacgatatctgtagttttgcgtctggcttctctattgaattcttaaaggggggtgggaactaagcagatcacaagggagctgcccacagaggtaaagacaaggtcaggtaggctgagagacgcaggaaagcgggtcaaggcgtagggctggagggcaggggcgggccctgggcgtgggctgggggtcctgccccggggcgcaccccgggcgagggctgcccggaggagccgaggttggcggacagcttggccctgagcttgaggggaaggcagcgatgggacaaaggacggaggtctaggaagagggtctgcagagcagaaagcacgggtaggggcggcctgacgctcggaagacaacgcatgggagccgtgtgcacgtcgggagctcggagtgagcgtgagttccgtgcccaggcccgcgactcggcccgacaggacagcgctccgggtcgacggggtcctggagccgcgctcggggagggcgcagtggagggcgagcggcggcgttaggacccggaggcgcgggcggactgggggcggcggggctaggacccagcggctccggcagagcggaagcggcggcgggagcttccgggagggcggctcgcaggtgaggaggcgtccggggccgcgggaagtagggtcgtgggggcctggcggggcgaagtaggggacccggaggggctggagggaggcgggcgggaggcccgggaccgttcctgaccgagaagcctgcgccaagctggtgttccgcggccgctgcccggtgcccggctccactgcgaacgccgccgctgggccccgaccgcccgggaggcgtcttgggctcgccccggagcttcctccctggagccgcgccctgcacccggccttgcccggccctagcagggaagccaaggcttgtggggcgcagggacccgggctctgcggggtcccggttccgcctccccactcctgcgtcttcccgcccctgccgggttctgggaagcctcgcgcggctcttccgcagctgctgcccgcccggagctcctggtccctcgtaggggaccccacttctctgacaccgcgttgggttcccggggcctacagcgaggcttgtaactccgggagagaccctggagcggggtgtgggagaacggtctggaggaagggctccgagcacttcgaaagtataaaccgcggtcccaaagaggcgtgctgtgtctgcattttcctgggagtgcacggtttacattctcgaaagcagtgctgtcgactagaaatattgagcgatacacatgtacaagttttgtcacttaaaaagaatttgaaaaaacttcatagatgcaaaaaaaaaaaaaaaccaccattattaaagaatacttaggtatttgtggaatgcattgaagagttaacaaaatggataggcaggaaatatcgcagacctagaatgaattacagttacccactgtggaactgaggagctagggtttctcataaaactccctgatagaagacgacttttgataaatttttttttccgccaacaaaatcccctgtcttctcaactagttactgtctgtcca

SEQ ID NO: 1879645 - DNA, 4001 bp, Homo sapiens; identical to SEQ ID NO: 1879644

SEQ ID NO: 1879646 - DNA, 4001 bp, Homo sapiens; identical to SEQ ID NO: 1879644

SEQ ID NO: 1879647 - DNA, 4001 bp, Homo sapiens; identical to SEQ ID NO: 1879644

SEQ ID NO: 1879648 - DNA, 4001 bp, Homo sapiens
agttcgtacttcattcaacaaacatttactcagccatccctacaaagtcccttgccttgctagagctttacagaggtataatctctggaatggctcatctgtacccttcctcctaggctgagcccagtgctggggactacccgggcaaactgaacaacaggattcccgggaggggcccagttgcagggggcaggaaggtggcatggctctaacctggctttccagttaggagatcaggagttaagggaaggaaatcaggtgcctggacagcctcagagcagggtagggaacaggataggctcactgtgggcccagggcagctggacaatgagggaggtggaggaaggtgccagccatctctgaactctgggtgagagaacccagagggcaagtaagaaaccctggccaattctcatgccttgttcctttcaccatctaagctggggcaggaggggaagtagcctggatcagccccagcaaaaacccagctggcttgggatttctctttgcttctcctattgttctgatccccccgctccccccgacctcctgtgggaaaaggaaaaccagtgatggacaaagggtgattggagttgggccacggggccaatttgtggacgtgcatccaatagagatctcgtgagaacaacctcccgtctgggtacagcactccctggttttcagagtactttcccatgcactggtgttggctctcccaatatgcagcatgatgtgctaagagcatgggttttggcaccagaccacgtgggttcacgtcccagttgtgctccttcctatccatatgaacgtgggccaatttcttagctccctgtgcctcagaattcccataagttaaataggctaacagtagacaggactgtcttgaggatgaaatgggttagtgcaggtgaggcggttagaatcatggggtacatagtaggtacccagtaagtgttggttggtgaaattaagggctctgagatattataagaaacttgccttctgattgtcaataccaaatctagtgctttctgtgattcttcagtggtctgtcttagacagactggggactggaacagggagtaggaggcggggtacgaggatgcttcctcttccaccacagccacctgttggaatcttccaggatgggagggctaaaatcaggccgatttaaaagggggcaggggaaggaatgtgggagtggcgacaggcatagggaggagccaggcaagctgagtgacaagcaggacgggggcagggagggctggtgcccttcacacaccgcaggagggggcagctcctggagatggtagcacaccaggagccagggaccctggagtccagcctgtcgcccgggggagcgcctgccttcctagtttcactctgcagacacctcctcttccctcgtggccggcatggagtgttcccatttcagcctcagaaagagcccagaggtctccttacacagaaaaaaggctgcagattccaagctgacctcagagaaaggagtgaaggagtgaggttttcctggaggcactgagcaaaggcccaagtcttcatggcctgaggcccttgacttcagcccccaaatctctggccataagccaggcctcagtaatttggcaagggggaaggaaccgactcagaaagctcagcacaccctgaaggtctccttccttcctcagagggaatctccctctggaatcaccggcccagtctcttcattccagagtgaggaaacagggccagaagggaagtgactgggccaaggtcacacggcttagccccgatcccaggttaccagatcccgtgatgccccacccccaagcaaagcctccttctggtgccccttggtggctggctccgaacctggtcccatgggaggtgcagctgcgcaggagaaggagctcgcccctcactgtagcccatggcttttagccctacatgagtttgggacagcaatcacataggaatgaaaagccataggccacagcagagtggaggggtccagcggcaggaatctcatagggaagcgagaagctggggcacccgagaagccctcactccccttctcagcacccccgaccccagacccacccacactgcctccctccaggactgggccccccaggttaaattctctcaccatcttccaccacctgcactaaagccatcccagtaatgagtttccagttcttgccctacaaaggcctcacacaatggtcctcactccagggtatgaggaggggtggcttcctggccataaaggacctcctcaaattcccttaattagcttccagccccctgcccagggtccttaactaccccttccctagagaataaggccggatcttttcaaggctgctgctgccagtacccaggatggggggccccaggttaggctccctctttacaaagcttaactctttctagtccagccactggaagcacagagggcaaaggagggtctgggtaaaggagggcagcgatgaggacctaccctttgtttagaggggttaaataggtttcttgagtgcccccaggggtgggggctgggccaacctacccagaccagtctgggtggttaccgacaacacccattcttgcatagtttagaggagagtgagatctctgtctccagacctggttggagtcagaaagagggcttcagctgaaacctccccaagctgagggcagctcactctggagccatccctgacaaggctgtgggaggggtgcgcagtgccctgccgctctcattggcaggacatgggggttagcacagacatctctaggactggattgaagagctgagttaaggcgaaccaaggtctcagggccctggaaaaggtgtgttctaatcacaagtgctatttccccacccgctcccatgacgggtcagctgcaggcatcagcttcagagaagtgggcttctagggctcctgctagcccaggctcaggaaagccccaggggcctcagacctctcccaggggcccccaagaagatggtaagaggccccaggcccagatcaggccctgcctctgccagggagtagctgcctctcccaccccaactgtaccctcagccccagggcaacacttgctggctccctgcacaaccctggtagaagcaacctgttttcactggacaggaatcctgcattccccaacaacagcacagcacagcacagcacacagcacacagcacagcacagcacgcccctccacacactccagacatgcccaaccttcagggccaaacaaccaggcatcctgcggcctcccacctgaactttgggccatctgccccagccccaaccccctctggttctcctttccttcctctctcatgggcccccagaaccccagacccaggccctgcataaagccatggactctaggcagaatgccctcagctccctcccaagggatgctgggccaggggctgggggtcccaggggctgctcacctggcggactcaacaaggccccctttccctcgcagtccgcctcacaattccccgcagagccacttcctgccttccaggcagccactcactcctccactcaccccgagaagctccacgccccagcgagggcaggcctcctccctccccctgcccgcccaccaccggccagggctgagctgtacccaactcaacttgactcacttgtgaccggcccctcccccagccctgaggacggtgggggtgggggtgggggcgggctgggcaggcggggcagccaggtattccttcaaccctgacttgggcctgagtaacaaaggtctcattgagcctctggctgtctggtcggtgaagcacaaacctcttgtatctactggcttttgatctcactccctctgaaccagccatgtattactcacgtccccctgccgggctattggtgcagaggggctgtttggtccctccctccctccccatctcctttctctccttccttcccctgccgctcccctccagcttttttatagtttaattt

SEQ ID NO: 1879649 - DNA, 4001 bp, Homo sapiens
gatagaatgtcgaatgcaaagacagcatctgtgttttctttcctacttcaactcattcttaaaatggactcgcccccgggagcttctgagaagggctccacccgttccctgcagacgacaatgttctttgagcgcaaaagctgtgagtatagataccctgggagtaattgtgggatcagacacaatggggtgggattaggggtaggcagagggtgtgtgtggagtacccttcactgggaatcctaaatattagaagaaaggcgaaaccctaggtggggaagcatgagagtgtgcctgcttccttcaagacacctcggtgtcagcctctccagggttcagactgctcttgtgggcaagagcccagtggggcacacgcacttcgtgcctgagaaaggcccatcctccagggggagaaggtatctgagatgtagctcagcttagagcggtcccagagcgacaagagggagagcttcacaggcctctaagtttatttgatttttctcctgcagtttccatttctcaggaattcagtcttcgtgcgtagcccgtgcacaaccaacgaccaccacgcagggaggaaacctggtcttagtgtttggccgcgctagtggaatcttctgggcgcctggtacgttcttgtccccagcactctgtccttccacctttgaagcgccttgataggacggtcccagatgcctcacaagaaggaaaggcaaggtgcaaagctggcaaagctgtgtggtccgacgctggcgagagctgagacctggagccccagcccacgccttccactctgggtcatccttcccagcttcatcttgggcatgccaactcctgccacgtccgattgtccccaggagtgcccaggcatgcttgaggggtgtggtggcggtggcttcctcttcgctaggaggtgacaaatccgtgttgttttatcgtccattaatatttgaaacaaacaaacaaacaaacaaacaaaaactctaagtagaaggagggagaggctctctcttgctcccacgccttcgcagctgacctgagaggggggacgtgccttgcgtttgttggtgtttgagactcgtcctaaaggcagaggcagggaagacagcgctgaagaggcgtcccaaagagattggacgtctgaacagtcactgcctgccccaacctctttcaggaaggttccaggtctgtgccacactgcaaccaatccggttcccatcctgtttctccaccccttctcggagaatccgaaaagaaaatatgcgttcctgagagacccgccacacttccgatctggaagttccgcggggacccagcccccgggcccccgccccctccccatctcggccgccaagtctggttgcggagcagcgcggccggccgggggtggggctccggcaccgccccgggctcgggattcgcgaagtcacgcgcttccgcaggcttgcgggggcaccttcgcccacggacacgccctttctgcggaggcagcccccagcgaccctctgcccagcttcggcgcctcactcgcgacgctcccaaactgctcaaggcctttcagtcgttcccaactttagaaaatcgccccgtccgcgtctctccctccagccgcaccccaccgtggagaggagaggagcggactgggaacgccgaaccgccccgcaggctcggggaaacggacccccttccgctccccgcccatccccttcacctcgccccccgccccctgcgcgaacccattttccagtcctggtcaccagaggcgcagcgcacagcctttccggtggaaccagtgcgaaaacacccgaggaaatgaaaagaacaagaaagtgctaccttggcaaccacgggcgtttagtggccagctggtgggctggggagggcggccgctgcccccctgccgctggtactctcctcgactacgcgtattcttaagcaataacaacgtaatccgtattatccacccaagaatacccgtcaccgaagagagtcagaggaccaagctgccgctgccgctgctaccgctgccgctgctaccgctgccgctgctactgccgccgccgccgccaccagaactcttgctgctcgctgagcccgcccctgcctggggatgggctgagcttgaccgggaccataaatccataactcgatttccctaaagaaggatccaaagctgtgctcggctgcttcctgcccaaatccaaatggccgctctatttccaattctgaaagacaaatcacaaaatcaaatacttaacacagaagagtgctgtctttccagtgaggagggaagatgtggcaaggctttttgggcacaagtgggagtgacaagtaaccttcagtttacctggtgctctcccagtgctttcctctgcacttctctgcttggtacccagtctggtctcggccagtccactctaggtggtatgattgagtgccatggcggccagagaaccctgtaagagacgtgaatagttacccacacaaatacaaatatatttgcctagacggctttgggaagaagtgaggcttaaataaagataggtcatgcatgggtgaaattttcagtagtgtgttttggaaatgcacttttctcaagcccaagatcatggaaaataaacactcattcaatttactacttgaaatcaaatacttatagatgtacaaaaataggcgtctttcctttgaaggccttatagctatacaacataatgatttttaaagaaaaaaaaaagcttgaaggcacacagtaattaaacccattttccatagtgtcaaaactcactgagttgacaagctggtagactttctatgatttaagcatcattttatatcactacaatgtttaatttcatagcacacttttaaaatatatactataaatgcattgctgtacagctgttgtggacacctctacagaaaaacctttgaagctctgtgttcataaatattattttaagaagaaaaagccaataaaaactcatttgcaaagtgactgtaattttggcattcagagagagaatctctgtgattctttgatgatcaatatggctcttactggaaaagctttgtcttaagatcctgcagtggatattctgataatgggggtttattgttcactaaataaaatggacaagtgcaacgtcactacccaagacatggtgtagcttccttagaaagttctcaatttgctttcccctttactctcaaatacatgaaagtacatccatgtaaggggaatgggggggaatatggaaacatggcaatagacattatgatttcccaaattatgtaagtgcaaatagctcttcatcaaggagtaattatataacagaatctctcccactaccacaactcatctctaactgacctggttgcaatttaaggtgcttaggttgtgtttgctcttatttttttaaaaattataatacttctccgggcacaccaactcatcattttcttgacatgttacttacagatggaaaaatcaacatgaattctaggttttatgaatagatgtttaatatataatgtctgaacctaaaataactagaaagaaaaccaatatagcccaactaccagactgttttacattattttcagataactcttaagtacaccacttacaaaaggacagataccaataaaacaaataaataagcactattttctgttgttacctaacataggtataaagtggagcttttctctggtgctagacaaaaaaaaaattcagaaagctgacaggttctcttcagcttgaactcctagaaacaaaagcccttagggaaagtaatgcaatagtctatgagcaaagtgtacatttgcttctgcactcttctatttaaatctcaactaatattaaaaggaaaacaagaaacacactatacagataggcttggatttagtaaatggaacgttataaactcaaaaggatggtcaagggaggcacacacacacacacacacacacacacacacacacaccccaatacacagggc

SEQ ID NO: 1879650 - DNA, 4001 bp, Homo sapiens
aatatataatgtctgaacctaaaataactagaaagaaaaccaatatagcccaactaccagactgttttacattattttcagataactcttaagtacaccacttacaaaaggacagataccaataaaacaaataaataagcactattttctgttgttacctaacataggtataaagtggagcttttctctggtgctagacaaaaaaaaaattcagaaagctgacaggttctcttcagcttgaactcctagaaacaaaagcccttagggaaagtaatgcaatagtctatgagcaaagtgtacatttgcttctgcactcttctatttaaatctcaactaatattaaaaggaaaacaagaaacacactatacagataggcttggatttagtaaatggaacgttataaactcaaaaggatggtcaagggaggcacacacacacacacacacacacacacacacacacaccccaatacacagggcatcagaatcacagcataaatacccacacagcttttcaatgctttccaagtagtctccttcagttttgcttcctcacaattaaaataaaatatatacacacactgacccacagactcgcacgctttaagaaactagaacaacgcagttgatatgctttctttctacccaagtagcagtgccagccttttccctacctacccaatgttccaccagcttcagcacctggacgaatggacagctcaacccgggccgactgccggcagcactcgcagcagaactgacgctctgagctctaaccaaagctctctcgtgcttgagcggggcagcctgacttacgagaacaccatttcctacgagaccactgccgctgggtgcatattcaattcaagcctccttaagctgtcggatttcccccacccatccaccctcccccccttctccaccctccacacaaaaacaaaaaagggaaaaagcccaataccatcagggcgtttgttgatcaacttacacttcgcttttgaatatttagatactgctagcggaacaatatcagcggaggcttaggtccgcattaagtacctttgttcatcgactcctgcaagccatgtttattagaatctacatttctctcgcgccccaataactagaggtgtgttttgcgggcagggggctttcagcaccttttgatctctcaaggccaccgcgactgattgacggttcccagtactttcctatgctatcccccatactccaacacccatcccagttaatcgcttcgcaatttgcaaccaaaaatacataaagaaacgcgacaaagcaatgggtttgaggaaataagccaattaagctaaagctgaaatgcctctctctctctctctctctctctcccccccttctccctctttctcttcccccttgactccctccctctccctctctccttccctctcaagtagaaagggggaaacaccaaggagagagaaaaaatcgggaggagggtggtagtcgactcttacagtcaatggaaaaagagtatacacatctttactgaataatactctcgttctcagacaaaaagaaacacatttttcgatgtaaacatagtctgcctctgccatacatcctacatcctttacgtttgctgagatttgtcttgctgtatggcaaagtaactgtcacaaatccatctcgattgaagtgcttaccctctaaatccaggtttcaagcggaactccaactgtgtgtagaagccagggagtcatctgatgtgcagtgaggtaggctctgggcagtgtgagctgcttcttctctccgagtgccgggttacagtgttaacaagccttgggaagggacctcggcgcctcgcgctggctgtgccccagtgccttcgcgtggtggcggcttgctcatgcttccgaggagtcccaggcgatagccttcagctgatgcgagcttccagaaaggagtggggaagggaaaaaatcatctaatgcaatcaaatcgatctgatctacaccatctgtcgcctgccactatacacaaacgttaaaataggaaaacggaaaacactgacagccgagagggttggtctgcaaagagttcatttttagcagagcataattcgatatggtcggcgtacagttacaaaagctgctgttaaccatccagtagtggatcccaaacatgctaatggtggattaattgaggaagatctgacgtgcaagcttcatagtctcttattcatgacttcccaatgggaaaggaccaatgccttgtgggactatggtaacatacagtcaaaaagctgctaagaaaatggctgtgtgttcacagcacctctctctgataacaaacatatgtcgactaaaatggtttagtagaatgggagggggtgttggagaataaaattttctttccccgtgtaagcaatccccattttcttttcttaaagaaaagcaaaaacagatatgatctctttaccatagtggggggaaaaggatgttttaaaaggtttttatcaagatcaaactctgccatataaaagaaacggaacactcctgtgcagcaattctttaaaaaaaaaatctattctcatttttttccttactgtgatcaaagtagatccatagcatgtgcagtatacagaaactcagtccagttaatcccaccaggattgattcaaggttgtttaatgccaggtacccttttgacttcttaaaaccaggatgccttttggggaaggcattttgtatcatttaaaattgacataatgaacattaagtatgattgcagtgaggagatgagaagagttttcctttctaattctgtaattactctctctagccaaaaccccttttggtctgtttccagtcttcccagatcagttgatggggaaatatagggatgggggagggagtggaaataccgagaaggagggaaagagagtgtggattatcgatagccaataaattctattccacttgtaatagaaaaatatatagcaataaaagagataactcactaattgttgatcgtgattttaagtttaaaccagttttaaaaaataatgtttgatacatggaaagaagacatattgcaaacaatgggatgactgccccccacccatttatagttataggtttaaaaaatattgaaatagggtttattatctagatatgtgactatcttttattaaatatatctcaaaattccatatttcctctgatttttgtcatccatttgaacactgaaaactatggtcactttgattctgctgtcttttctttggtaacatacattacataaattctgtagtaaacaattagtgttcaggaaaattctaaagatgaatgtgtctcctaaaactttgataatctctttaaggaaaaaaaaacctaacagttatgaattaaattagtctaaaaatatagcttgaagacaaatcaaacaatttacctgatcttttgtttcaatatacattaattaagcactctttccaacctacacaacattccagggtcatagtcagatattcaagtctaatagttcagcagcctttgttgtcattcgtgtcaagctattgccccctgcaggttaggctgaaagtgcaggcagaatttggccaagtcctcaggaaattgatggtacacaagttactcagtctctcccaatatttaactagagtcaactttttaagtttgctttcattatggtttaaactatttatttacagataggtagtacattaagaaaaatgctctttaaagatgtgacttcagtttttcttctgagaatttagctgcattgagtaaaccatccactttgttgtgatacaaggagcattttgacacatttagtatagttttcttcatcttcccttatccttattccataagatccagcaaaattaaaaaaaaaacatatgtaacaggattggaattatgaattctcataataaatatatagccctgggcaatttgatatcagtatgcttttggtagactcaatgaagtgtgtgcaaat

SEQ ID NO: 1879651 - DNA, 4001 bp, Homo sapiens
aagatacttacacacgtttatagcagcaaaattcacaattgcaaaattgtggaaccaacccaaatgcccatcaatcaacaagtgaataaagaaactgtggtatgtaagtatgtatgtatatgtgtgtgtatatatatatatatgatgaaatacaatgcagccataaaaaggaatgaattaacagcatctgcagtgacctggatgagactggagactattattctaagtgaagtaacttgggaatggaaaacaaaacatcatatgttctcactgatatgtgggagctaagctatgaggatgcaaaggcatagaatgatacaatggactctgaggacttggggggaagagtgggaggggggcgagggattaaaagactacaaatatggtacagtgtatactgcttgggtgataggtacaccaaaatctcacaaatcaccactaaataacttattcatgtaaccaaataccacctgtaccccaataactgatggaaaaattaaaaataataaaaataaaaaggtttattggcaaaaaaagaatgattcctaactaaagacaaaacaaagttcattaggaatattatttttatatatttacttttattaatataaaaacctttataatctattttatagtggataataaatacactctcgagaatactgaagcaaaatctggtactcactaaataggggaaattaaaatatttaatgggctttgtgtgatcaaattcctcttggaatttaaaatgcagatcagggaaagatatgacacttaaagttctaaattaaataactgaataagaaaattcatgaaaaccaatttaacaataatataaatggtttcacaaactgaaatcttccataagacaaatcatgatcccatatttattgactactcaccatacttcgtggtatgttcaactttcattgaatctattaactttaaaagaaatgatagcagttgtttagcgcccaggcccttcttgacaaatactgaacttgcttctctgaagagtgcattaaggagcatctgactagaagtcaagatgtcatgtattcttaggaaataaagattgtggtctccagttccgtagatactaacattgggacagcttcaggaaggaaatgctgttaaggcttttaactacagaccctacagaatcttagtaacaactcatgcctcaatgggaaaatgaattcagagttccaacttgaattgctagcaatatgttttgccccattctcccccagccccctgcctgtcagggagggagaagagattcctgtacctcaaagccatttgtggtagctccaacaatctggggaaagggccccaaaagtaggatagtaccacgtaaggcaaacagtaagccagttagacatgttgaggtaatctcagcactttgccggacctttttcccggggaagtctcacaatgcaacactcaagtatactgtagtttattttgtctgtaagggcaaatcttatgcattctaaacattctcaacaaccatcttagaaatgagcctctggaacacagtcatatgtaagacgtaactgccatactcaaaagacattttttcaactaatactgaggtaagtgacaagttgattgacaataaaggaaaactgccagagttcgcatttaataaattattttaaaatgagaatccattctacaatcaactttcagagagttaaacgatctctgggttaatgaccatatcacctccctcaaaattttacagataaactaaggcagacagcagttaagagatttcccaaaagtcagaggacttaacagctaggtctgcagagtcctatccaatgtttttcctaatactgcatacaatttttgacagactactcacaaccaaactatatctttcagaattctacctttcagagcattttagcgattaggtctggcacaacttacaactgtaactagacggttttctgtgtggacaggacagaaaactgactaattacagctgtacttagtgccaactcccaggcacgcctccaagcaccacaaacttcttgcccccccacaaacttctcaagatgttttacagctttgttatctttttccatgtttccacattgtacatttataccaaaaagtaaatgacttggaagaaaaatgttgctcctcttgaaaagaagtatgtacattttaacaagaagtaacaccttcagctctaaagagcatcagaaatttcagcatcggagggttaagaattggctctgaactagatgttctatatttaaaatgtgggaatataataatccttaactagtgaatatggaaataaatggttgtgctgttcctatatttattctgtattatgcatttaagctaagttaaagtagaaaaatgtgtttaatgaaatatttccaatttatgtagaattgtgtaaagaaaactaaaaaaaaaaacatgtataacagcagtaaggcagtagttctgggggaagaatggaaatctaagacagcaatggcccagaaaggtgtacatattattttttcatatttcagggtgtcaataaacaacattgcctatttcgctacccctctccccaagcccatgaaatcttggttaacatgccattccggctgccttgaaacctggggcgctgacctagggaggagaggttactctggctccttgcagaacaaagctggccaggaaataaaggaaactcaggcatagggcagccaggcaaaattttaatagaaattcagaggaagtcacactaaaacgcaccaaacttaagcctttcaacaggtagttcatttttcctaaaaacaaacaaattcggcaaccagatatctcaggaagaacctgtgtttggccctgagcaccgcaaaagggtagaaattctgagatattgtagctatagagagagagacggcatttaaaggaactatgaaggttcatccaggtaaatcatctccccggctttctatccctgttagaaggaatgtgctagatgttttacactgactactacatccctcctcaaaagagacctttggatttttatagcatgatgatgatgatgataatctggctaacacctacagtgattaattactacacatcaggcactattgtaagcactctaggtaagtagagtagttagtttaatcctcctaacaatctcctaagtaacattattatccctagttgacacatattggaaactgaagcacagtaaggttaggtcattgctcaaagtcacagagttactaagtgtcagggccaggattcagactcatgcaatccctttgtattctatatacaaatttctattctccaaagcagacattgacttctctctccaataagccagctcttccttcttcattcctctttcagtaaatggcctctacccagtgactgaggtgagaaaccagaatagcacttcatctagtgcctagtcaattctccctcttgaccacttactggttcacctctgcatctgctgctctatgaccttgggtactcgacttcctctttctaagcctcagtttctcatctatacaactgagttcataagagtagctgtagttgttgcgaatatcaacattaaacgagataattcatgtaaaatgcatagcacagtgcctggcagattgcaggaaaatcaattattattagatattatcatcatcaccttgaatctggtccttccccctaatcttacacctaagcatccttagaccttcaactcctctcttacttgcaatactaacaacctcctacttgatcacactgtctggtctattttctgtttaatctaaatatgctaccactaaaaatgttactcatatcccttggaatgacaaatgtcactccaattcatagggaagaagatcccaactgcttattatcaaagtatgcaatacctgctacaatttagcttttccaaactcccaacacataacacgttgtaccaccctgcaattccttcaaagggtatacactttctc

SEQ ID NO: 1879652 - DNA, 4001 bp, Homo sapiens
tgtcattagaatgatgttatgcacaagtgggagagagaaatggtagaagatgccaaattacatatagttgaggtgaaatgggaagtaaacaaatatagacagtgctgcaggctactatgtactatttctaaaatcttagcttttaaaaagaagaaaagaagtggggtaagtaacttgaggataaagcaagtatagagaagtttttctcaaatttcttttgttttctatttgagaagagagaaaactgaaccttgttacatgtgaaatggagccagatggtgagagaggagggggatatcacaggggaagagatgtcccaagcaaggcaggaggctcacgtgagacaactcagggcagaatcctacgcattcataggctataaacaaggaagtggagggaataatcacatggactcaagcttctcaatgaaaaacagaagtcagttcatctgttgagagtggaatcgtggaaaggagcagttgaggaaagaggtaaacatttaggctaaacatgagggagtggagtagaagaaatgctgggtcagagttgagggactgaggcacttggaggcccctgagtatgtgtattaatgtgtccatatgatgatgtgattttatttttcagcaacactgatattgaaaggacagttgccttggagataagagaatgagaaactagaatggtaagaagtgatagacagagtgggatattagatatcgaatgtggtaaaatattttaaggttatgatgaggtcaagagccgggtcccagcaatgggtttctgtaatgggagttaaaggcaaatgggatttaaaagatcaaggaaaagaaaggataatttatttgaccattaaaaaaaaatgaacattgaagccatccaggtactccaaacatagacacttgagaaagcattttattttgctatataattattatcattacaaatggtaaacttaaaactgctgtgatcaaatttaatgacagatgtcctatataaaaatgcagaggcaaaccacttaagaaaaaccatgatatgcataggcttttacttgcaaagtcagatgagtaaacatgaggcaattaatgggccatgactgtaagtctaaccacgcagttcatgcacatagaaagtgggtaaagttttaaagtggaaattgaattgggaaaatcaatctactatatgactgtcatgagtgttctgatagttatatagttatgtatatattattttcttcgtatttagcatgttacatagcaagaggcagaattatatgagcaaatcctcacccagagaagcagaaagctaaaattatctggtgtttctatcccactttgaccagaacatctaacaaaagttgtaaagaacacatatttgtaagtgtgttattgtcaatggcatgggtgctgaggtcctactttatgtctttttttcactcacactacaacagtaggaaggtgagctaacctagatgatgatactgtacgtttgatggacaaaatagttttgccttttctaaaacatgctctgtttatagcatacaaaagatagagaagcattattcttgtttaaaccagagtctttttcattgaaatctcatcacatgatataaattgaataaataaaccagaagatgctgacgaattggaaaacttaaagaacaatagtactattttgaacacatctttcaaagatggaatatctgttgattgtgacagcaaaaagcggggccacagttgcattcattgttcagtgagcttgtccacacagttcaacccaccgacagcaatgaatgttgattgtgaccttttaaaaaataatctctgcacagggaagagaaagtcctggtgtgtccacctttggtttcctgtcttcagcgaattctgagcaccatggagtagatgatggttagccatagggtacaatcaacggtcgatggttttgattttaattccaaactcaccgacagcgttgaatgttcactgaagcaacctcaaaactcagaattctactcactttacagtatctgtaagtatctgaaggggatgggagacagaaacaacagtacctttagtcatatattttatgcatttttatgccatttcaaaagactacaaaagaagacaaataagaagcatgattcttccaacaaagagtttggcaaacctccacatcacattgtatgagagaaaaggatcggtttcattaagcaaaaacatggccgatattgggctagttccagagatggaattatctcactgttaaagacagggacaatttgttattcaaagtactttgtggtataaaatccaaacaatatcttataatttaaatattgttacgcttatagtaagcaagcattatgtatatagcttatacagaaattaaacagaattaccttagatttcctcaaattggcattgatgatatcatttatatttacattatatatttactatattttattctaaaataaggttttaaaattagtataacttcctaagaacaatcttatttagaaaatgctgaacaaattataagtgaagaaaccagctcaatacatttttcttagtttatggcacaaagagttcatgaatacagtgaaaggtaaatacaatctatgtatgctacaaaaccgttcatttcctattattttaaataacatctaacatctaacatctctttatgggtagatgggtgagggattcttttcatagtcttattttctaagactgttttatcattaatgcttattttaaaattattatgaactctactgaatttatttttagagccattttcaataattttctaccatcaattaaaacaaaagtcaccttggatgtatctaaaccagaatagaaagtcattatttcacacatttaagttgcatctaatatggttatagagtaattatctgtaggagggacaacccacaataatttggaatgctactttgaaggtgataatggtctattcaagtcaaggcaattactctcgaaatgttagtgaaatatgtatcccaaatttttacacattcttacatttcagtcacttagaattattttaaagccaataattgtttaaccttttagacaaactatttacatgaaaacttcaacagattttttttgagagaaacagggactagagatcaactggaagtaaattttaaagtgacaaataggcacagaatatgaaacagtgatgtatctgaattttgcattgtttaattcttttgaaagaagcaaatttctcccacagaataaaaccctagaagaatgctttatcagtaggcatttctgtgttgctgctggaaagaatattatcatgagactgaggattcatttgtttgcattatcaattacgactgaaagcatatcactcctgttctgttgcctgcctattgtggtattagtgtcaggtcaatatacaactgttttcaatcatgcctattcatctcttgctacatctgctaacgtttgtataatagggatgttgtgataaaagactccatgctctgtattttcccttaacacaaaatgcatttggcctaccagtaagcaaagctctaggtcagttacaaataattaaaaggcataactatgttatcttttgttttccaaaatattctcctagaagtctttggaagaatacaattaacttaatcctaaagttgttacattcttagaataaaaatcttaactataattgatttaacattaaaattcttaaaaatcttataatgattcacttgaaacaatagaagttacattaaatgtcttgttatttacacataaaatagcaatgataaataaagtgattaattattttttctttccttgggctaatcatagtcatagtttgttaaagataaaacctcatatcttaacagtttaaatcctccacaatggaaaataggatctctgtgttcttgcttccaattaatctaatgtcagagaagatagtaaactttaggctctatattctaaattatttcgagc

SEQ ID NO: 1879653 - DNA, 4001 bp, Homo sapiens
cctaaaatattctgataagatctgttgagatgagatttctacaccaaatgaggcatgtgcatctgtatgatgtggtgcgggagttgcaaagtcccttgagacctgcctttgaatgggtaagacgtcttggtttcaaaggtaatgaaagggttaaaaattgaggctgtctagggtaagagaaaggggatattgttgtctttaatctttccgcagtatgtgtaagacttccatcccggatctgcacatagcagtggaataggctcggcatgcattgcgtgcaagctccttgattgtagaaggggaaaaaaatctggctggagtccagacaggctggagctctgttgatcattatgtctagccttcaggtgtctcagcacacagtgggcggcggtgggggaggtgtagataacatgagagcagacaaagaaaaaaaatggtgtatttttataagattatgtgaaaatttgtatttattttcaagccctccttaagaaaatgaatcctaacgtcttggacttttataattagaacacaggctctgctctggcagctctctttaagccataattagttatgtctggagcctttgaataattcctttcaataattgatggagttaatattctcttttaaaaatgaggaggacaatgtttttcacaaactctttttgttggaggctttgtcattcaaaatcttcatcagtcataatcacactggtgtgatttgccttttaatttcttataagacttagcttataactttttaaggatgtggataattctaaaagtaaaggcataatgtattgctagattactgtagctgaatataaaaagaaagcagtaatgcaggaacattctatccatttgtttccaattattttataaatttaaaaactgcattgtatgttgcttctgtttgaactccatcaaaaaacctcactatgaatgtaaggaacttagatgctaatcatatcttttgcttgctagaaagaagaaatgccaaattattttattcttcaagcattcttctataaagaagcttccgcatgcttcctccccacccccacatcctcactccaccctattaggaatttcaaaaaaaaaaaaaatctttatacatggaaggctagatcctaagacagaaagctgtcttttccttctgtctttacactggccactttcagtcgccttcacttctgctgggactttatttcacattgtgtggactacaacaccgaaaccagttcagtctctatccttattataaaattaaaagtggtggttaaaaaaacatataaagccctggcttgaagccattgttcagaatttaagagctatttgcccccaagtgtctttgcagtctttcatagctaattataataactgtcagatgtctggaaagtctatggtgcccttgtcagtggagtcagcaaagtttgtcttttatttttcttggggacagagcaaatctgattagacataaagagcaaaaagaagtgaactaagtacatatgcgtgtgccttcattttttcttatgaacaaagcagcacactagagcgatgttccagcgcacagcctcctacagctactctttggaatgcctgacttttatttttaattctttatcctcaacagaataaagtatgcaacaattgtccctggaatattttcctgccagctgaataaccttcaatatacacatgaaagagtacccttaagaaatcttcaaatattggatgtttatgacataaaactattttaatcagtacacttgacggaaagaaaggtatacttacaatttcaaaacggttatttgctctagtttcttgtccccggaggcagagcagaggcttttgccagactgtccatgatgcaggtgcagaatccctgttttcatgccggagaggaaggtagaaagtgcttcataaagtcactcggaactcagccacttgtgctcagacatcccttgctcctgtggaagctgtactatctgcagttctgaattgaactaaattacagcccatgtgaaagacaggggcagtgagtcatgtgagagatacagagctatcctattggccacaaagacatagcttaggcattctgccttttccaccattggtgaatagttaaaactgaaagcatctagatcctcctcttgagcttatttgtcctctatgtgtggaagaatgactgtaggattttacagtgacagaattagttaagaaagggactgaagtcatccttcacagagactggtgggaggtgattggaagctcagcttttttaagatttcttttttctttttatccccctgccctgcagttttgtctataatttgcctgtttgcctgtcagaaaaaatgttttttgtatttttttctcccttcagttaaccttggaagtgacagaaagtaaattatcatcatattcctttgcagaactgtcatgttttgaagcacaaaatcaattattttcaatgacgcattttcaaattttatttttacatttacagagactttattgtagttctaaactaataaactaaattgtccattagtgacaccaacaacagaattaacttttgagtaattattacattttggagaaaggagggctagaaataactctgggaaataataaaaggcaacaatatcaaaacaaatcaaataaggggctttaactaagaagggataaagaagaaatatatttctccatcaaagtcactctttaatttaccactttatgtaaggcagaatgtccagaaactgccagtcagaaggtatttttagttttgctaggattctttaattcacccaattccttaaaaatacttaaatgtgtttgtaaagatttagaggctgtaaactaccttagaagtcatcaagtctcacattccctatgttaaaggtgaggaatgtagcctctgacagtagtgactctcttcataacactgatccaccgtgttatgcaaaataaatgaaggaaacattgaaataaatactagtttgctctgtcttacgtacctactaagagccagttaccttctcatttaattcaataattgtacaacccatagaataagtttgactactttcatttctcctcggcaaaaacagactcaaatgttttactaccatggtagtgcctggatttgaacccaagtggctgattccatacctactttttccaactaggtatgtgtccttccaaataatgatggttgtcacttataggttccttcctactgtatggcaagtaatgtgcaaaaccctttagagcccctcattcagttctcacaactgttaatgagtcaattattctattttgctgatttcattgatgaggaaatgaggtgtatactactcagtattatgtagatggtagctggtagcatgtgattcaaatcagctctgatctgttttacacactatatggattctcatcacagtgttaaataagacttgatttttccattttttttttcttgtctaatatattagaatattttggcataaatatggaatattaactgtggtcatgtcattatctgggtctgtttggttcagacccagatcataccattaagtgatccataggggactggaaataagcatcagaggagcagtcatggaaccatatttatcttggggccctacaagcagcctcacacagggtcttgcaatcataggagcttccacatcagttgaaggggcacatgctctcagaacatcagcctgggtattaatgagtcctactgctggttcaaaatctgaaacccactgtttagcagaataagtaccagatcatttcaaaaatagtgtcaaaaattccatttcagccagatatcaagagccaccaaggagtttcctgaattgtaaccctcctgcagcagctgtaatcatacaaatgggaaatttgcattggctcccgcaacccttgtggggtttgtttgtagatgggaggtgattactgaagtgcaacagcatcttcacctgcactttc

SEQ ID NO: 1879654 - DNA, 4001 bp, Homo sapiens
aagagagaaatccaaatgagagtaggatcacaaaagtgaatggggactggagtttaggaagaagtggtcagctgtgtcaggcatcaaggggagttcgagtaggacaactggcagaaaagtttgatttgtatttggcaatatggagctcactggtgatttggggaaaagcagtgtcattagaatgatgttatgcacaagtgggagagagaaatggtagaagatgccaaattacatatagttgaggtgaaatgggaagtaaacaaatatagacagtgctgcaggctactatgtactatttctaaaatcttagcttttaaaaagaagaaaagaagtggggtaagtaacttgaggataaagcaagtatagagaagtttttctcaaatttcttttgttttctatttgagaagagagaaaactgaaccttgttacatgtgaaatggagccagatggtgagagaggagggggatatcacaggggaagagatgtcccaagcaaggcaggaggctcacgtgagacaactcagggcagaatcctacgcattcataggctataaacaaggaagtggagggaataatcacatggactcaagcttctcaatgaaaaacagaagtcagttcatctgttgagagtggaatcgtggaaaggagcagttgaggaaagaggtaaacatttaggctaaacatgagggagtggagtagaagaaatgctgggtcagagttgagggactgaggcacttggaggcccctgagtatgtgtattaatgtgtccatatgatgatgtgattttatttttcagcaacactgatattgaaaggacagttgccttggagataagagaatgagaaactagaatggtaagaagtgatagacagagtgggatattagatatcgaatgtggtaaaatattttaaggttatgatgaggtcaagagccgggtcccagcaatgggtttctgtaatgggagttaaaggcaaatgggatttaaaagatcaaggaaaagaaaggataatttatttgaccattaaaaaaaaatgaacattgaagccatccaggtactccaaacatagacacttgagaaagcattttattttgctatataattattatcattacaaatggtaaacttaaaactgctgtgatcaaatttaatgacagatgtcctatataaaaatgcagaggcaaaccacttaagaaaaaccatgatatgcataggcttttacttgcaaagtcagatgagtaaacatgaggcaattaatgggccatgactgtaagtctaaccacgcagttcatgcacatagaaagtgggtaaagttttaaagtggaaattgaattgggaaaatcaatctactatatgactgtcatgagtgttctgatagttatatagttatgtatatattattttcttcgtatttagcatgttacatagcaagaggcagaattatatgagcaaatcctcacccagagaagcagaaagctaaaattatctggtgtttctatcccactttgaccagaacatctaacaaaagttgtaaagaacacatatttgtaagtgtgttattgtcaatggcatgggtgctgaggtcctactttatgtctttttttcactcacactacaacagtaggaaggtgagctaacctagatgatgatactgtacgtttgatggacaaaatagttttgccttttctaaaacatgctctgtttatagcatacaaaagatagagaagcattattcttgtttaaaccagagtctttttcattgaaatctcatcacatgatataaattgaataaataaaccagaagatgctgacgaattggaaaacttaaagaacaatagtactattttgaacacatctttcaaagatggaatatctgttgattgtgacagcaaaaagcggggccacagttgcattcattgttcagtgagcttgtccacacagttcaacccaccgacagcaatgaatgttgattgtgaccttttaaaaaataatctctgcacagggaagagaaagtcctggtgtgtccacctttggtttcctgtcttcagcgaattctgagcaccatggagtagatgatggttagccatagggtacaatcaacggtcgatggttttgattttaattccaaactcaccgacagcgttgaatgttcactgaagcaacctcaaaactcagaattctactcactttacagtatctgtaagtatctgaaggggatgggagacagaaacaacagtacctttagtcatatattttatgcatttttatgccatttcaaaagactacaaaagaagacaaataagaagcatgattcttccaacaaagagtttggcaaacctccacatcacattgtatgagagaaaaggatcggtttcattaagcaaaaacatggccgatattgggctagttccagagatggaattatctcactgttaaagacagggacaatttgttattcaaagtactttgtggtataaaatccaaacaatatcttataatttaaatattgttacgcttatagtaagcaagcattatgtatatagcttatacagaaattaaacagaattaccttagatttcctcaaattggcattgatgatatcatttatatttacattatatatttactatattttattctaaaataaggttttaaaattagtataacttcctaagaacaatcttatttagaaaatgctgaacaaattataagtgaagaaaccagctcaatacatttttcttagtttatggcacaaagagttcatgaatacagtgaaaggtaaatacaatctatgtatgctacaaaaccgttcatttcctattattttaaataacatctaacatctaacatctctttatgggtagatgggtgagggattcttttcatagtcttattttctaagactgttttatcattaatgcttattttaaaattattatgaactctactgaatttatttttagagccattttcaataattttctaccatcaattaaaacaaaagtcaccttggatgtatctaaaccagaatagaaagtcattatttcacacatttaagttgcatctaatatggttatagagtaattatctgtaggagggacaacccacaataatttggaatgctactttgaaggtgataatggtctattcaagtcaaggcaattactctcgaaatgttagtgaaatatgtatcccaaatttttacacattcttacatttcagtcacttagaattattttaaagccaataattgtttaaccttttagacaaactatttacatgaaaacttcaacagattttttttgagagaaacagggactagagatcaactggaagtaaattttaaagtgacaaataggcacagaatatgaaacagtgatgtatctgaattttgcattgtttaattcttttgaaagaagcaaatttctcccacagaataaaaccctagaagaatgctttatcagtaggcatttctgtgttgctgctggaaagaatattatcatgagactgaggattcatttgtttgcattatcaattacgactgaaagcatatcactcctgttctgttgcctgcctattgtggtattagtgtcaggtcaatatacaactgttttcaatcatgcctattcatctcttgctacatctgctaacgtttgtataatagggatgttgtgataaaagactccatgctctgtattttcccttaacacaaaatgcatttggcctaccagtaagcaaagctctaggtcagttacaaataattaaaaggcataactatgttatcttttgttttccaaaatattctcctagaagtctttggaagaatacaattaacttaatcctaaagttgttacattcttagaataaaaatcttaactataattgatttaacattaaaattcttaaaaatcttataatgattcacttgaaacaatagaagttacattaaatgtcttgttatttacacataaaatagcaatgataaataaagtgattaattattt

SEQ ID NO: 1879655 - DNA, 4001 bp, Homo sapiens
gctcagggttgtttagtgttttcaccaatcacctggcttatggaatagagaacatgttcattaagtttagatgacaacaaactagggggattatatgtggctaagataaaaatttgcagaagtggtaagaaagcaacagaatgaattccactcaaaaacagagtaattttttttacaaagaaacaaatgcagagaaacaagactgtgtgaaatcttaacatctaaactccaaaatgtgaagaagcaaaactaatcattctgtacaagtaggaatcatgagataatcctaccactgaacccagcaattaatagactttacataatctttattttcacaagctaataaaatatgaaaaatttgcaaagactacaaataaagccattaaaatgactatataattgggaacaaagagaaaattaatgaaactgagtaattagcctgttgcagaaaaggctgacagatgacagttgcattcttccaatattaaaagtgtcagtacagataaagtaacctaatataggcctttctcaaaaaagatttggactgcaaaatgaaaaatgtattagctacaaggaataatttccttatagacaaagggcatgaagcaatttgctgtggaaatgcatttacacatatttaaatgaggacagattcccaatgatctgaaagttaattttttattagatgctctagaattcttgactattagtatttaaagaagcctaagtataaaagtcaactcataaattacttcgacatacagcttctgaattgcaatctcaaaagacagaaataaccgagagttggctataaaaattataaatggaactaaaaatttaaacaataaaatgatcaaagaatggtttgatctacaattctaaacaacctgatcaaagtacaaaggataagcaaagtaatgtttttttgaagttcaaagttgaaaagtagaaagtcggaacacaagagataataaaaatctaacccttgactaggaaagtttactttatctattaaacacacttaagaacacccattcttatttctacagaaacccaaacctttcgggtgaccgtgatcttgttcgtctttttttgcgatcaccagatgaagaagatctagaacgacttctctttctgttcctctcaggagaagatgatgaacttgaataagatctttttcgtggggaagaagagcccctgtgggacctggagctggatcttcattgattgagaaacaaatcaaacatttcattaaaagaagaaataaggaagattatttagttatcagatagctccaaaaataaacaggatttataacaactatgaaaattttataaggaagaatacttactgcttattcaacagaagacttctggatcaaccatgaaaacattctacttaaacattttaattttgtctctttaaaattctatcatgtgtaattaaaaccctgcttactatatcaaaatagaatttaaactttttttaaggcttttcaaagtatacacaaatattatagtattataaaatcagcagataactgcattaacaggactttacgtttaggaactacatccttccatttgaggattaaaatatgtatcttatataccacttcctgaggaaaataaacataattccatgtggaattattcaactcattaaactgttatggaaaaaccaggtatatggcacagcaacaaaagactagtaactgtacttaactgctaaatattcaagaagaaataaaaactaactttaagatgatttatatttacaatactatttttatgaaaacccactacttatgaaatatgaagtgttgacattcacatgcttcaggtagaagtaaatgtgcaaatgtttaaatacaaattttttttcttcacttgtatattttggttgaaggaatttagctcaaacttcccaaaaaattcacctttgggcttaaaataaaaccagaaagcccaaaaggagaattctttggaaagttacaagcaatgaaaaaatgtttgggaagaatatgatgggtgttctgtaaaccttaattataatggttcccaaagggaataccagaacttaaggatttttacctataaagcgcttaaatattgttactaaataatggtaacaataaaaaataatttgctctctacttctatttttttttttttttttgagacaggatcttgctctgttccccaggctgtggtgcagtagcataagcatggctcactgcacccttaatctccagggctccagtgatccttccacctcagcctataagaacacaccaccatgcctggctggttgttttaatttttatttttagtagacgaggtctcactatattgcccaggctggtcttgaactcctgggctcaagcagcccgcccaccttggcctcccaaggtattgggattacaggcgtgagccactgagcctggccttgttatctatttcttattggcttataatgcaagtgtgcacaacattcttttctccttaacatgattatactgtggcagccctttaatgctaaatttgattcaaagcagcaaatacttttaccaaaacagccacagttagacttcaatatgaatttccacaaatatggaatttcattttcttatttattttttagatgcctttaggtcataataaattaacttaaaaacaaagagagcatattttgactaaacaaagaaaaatttcctgcaagagcatctttcaaattatgtttccctctacagatgtgactacatgcaacctgaaactttagaacactgtttactacttaagaccacatcctatctcaactaaccgactatacttcctgatttagttttgagtgttttgtgctctataaataatagcgtgtgtaaaattagaaaggaaaatgtatatacagtactctagtaactttatctgatataaatggcaaatttgtttctgaaaatattgaaacaactgccgtgcaaaacaggacctgttttgaggcagggttatttttcttccttttaataatgaagaaaatttttctttttatttacatatgtaattttatttgaactactattaattttttttttttttgagacactcctctgtcacccaggctggattacagtgctgtgatcaaggttcactacaaccttgaactcctggcctcaagtgatcctcccacctcagcttcccaaagtgctgggattataggcatgaatcactgtgcctggccatatataatcttaatatactagagatgtggcgataagacttggcttcatcttcctacttcataacatcttagtgccaaaataataaacgctgcatattgcaaaatagccacctgatttcaatcatgggaatgtcttggcacactgctggcaatggaaacatttcatggtgagaaaattaagctgaggcaagtgcattagttttctaatgctaaaataaaatcgacaagtagaagcaaaataaggggaaaaaaagcagcaacaccttctgcagcctttaaatatttttctctctgctttacagagagatgctacctcattcaccttgatttcgacccacgagatctcgaacgttctctggaactggaacgagatcttgactgcgaactggaagaacttcttgaacgggacctggaacaacatggaacgattttttttttccaggaccatttaattgagctttgtgatatgaacactgaaagaaagatatgtattagagttcattttcatataaaaagataactatacaagatatatactttcaaaacatagtattttaaattagataagatttagtaacaaaaggtaattaaaaaaatatcactttccaggtgattaaattaccctaaagccactcaactataaaacaaaacattatcactttattacaaaaacaatgaatactttgtttacaagtaactagaagctacccagaatacatccaagaaaacagaatgttgcgatttatacttaatttctctaaaat

SEQ ID NO: 1879656 - DNA, 4001 bp, Homo sapiens
tatgttagatatcctctgctcctccagtgaggctggggagtccatcccacccccaaaaaggaggtgacaccagtagtcactgtctttcccatgaaaactcccttccatttcacagtcttgttcactagcagatgagagagatcaatgccagtgcctacctgtttacttctttcttctgcctgcttctgctcagcttcagcttgctctgcccgatccagagcattctccttgtctaacttcagcatctgcatctttttcttgatggcctccatcatgagcagtggctgttggtaggctcacctgtgaacactggagaactggagactggggcaagaaagaaggggctgctgcctgagtgaccaggaggtccccagacttgagtctttatctgtgctcatagctccaccttttgttcctaatatggtctttccagctccctccaccccatcattgttctcctgggggaacacagggtgagacgctttgatgaactgacatcaccagcaaaaaaaatatctagcaacagctgaggctgattttagacaatggaaagtgggggagggaagaggttctccctgaccctgaaactttccactcattctgggcagctctatggatgttttaaaagaagaggaagaggggagggaagaacattgaaatagagaagtgtactttggcaattctaggttggcagtttgcatccagggggtcctggttgcctttcagcttcccgtttcactctcccccagactgtgttgaatgctggtcaaactccgttagttgagttttagcttttgattcctggtattcaaggagcttgggcacagggaagaggggaggtcactcatgatccttaacaattctcccagatccccagatcaaattgctgtgctattctgggagtctccgattggcagggagacgtttttcctccccaccaagagccacaagagtagagtaagaggtagggttggaatctccaaccctatccttgaaggctatcccagagcttcaagtggggtggggagagaaacaggggagggtcagaacaatccagacaggatcataccctttgttttcccacagtaatcttaaaatagaactgttgtacccacacagactttggtctgtgtggctctctcctcttcttccctttatcttctcccttcttaattctccccaacgctgccactcaccacatcatcgtaatcatcattatcagctctattctttccagtttagttccagaccatgtttattcttccattgggagccttgttactaacaggtggcaaggataccagtccactggcaccatacacctgaaaatatgccaagggagaggtgggcactgttcaaggtgaccagatatattggacaaatataaatggctctagttagtcatttatgtcaggatactgagagttaatgctaagccccagcaatgggggaacggagacacccaccaggccagtgggtagagcagagctggagtccactattgagagcttccagtcactagaggtagataggcagatagaccatcagctgactctcgacagagagaggagaaaccaagtctcctttctctggagattagccagggaaaggggttagggaacagggagaggaaggagtggaaaatggggggggggtgggcaagtgaataagggggagaaaaatacgaggacaagaaaaggcaaagaaatgtcccttctagtataaggggacaagaaatagaaagattctatcctcaaattccaactctctcccattcccacaccagccctcttaggttaagattgaaatgcacataggttgcagctactggacttttgggggggtcctggagagaagaggttcagtaaaagagacaggagccccagagattgaagtatgaaagagggtggtgctgaatcacctgctgctgtaagaatatgtttgacatttagttggttcctaattaaacaacccaatatcaaacatatcacacagaagcaggcaggagagctttgggggtcatctgccttccttccagttgcaaagaaagaatagagcagacaccaggcaccaatcatgtctaggtggagagccatctccttgaggaagggtactggctcctgctcttcacctcccaagacagccagctcttgcttattgtcctacgtgtcatccctgcctcagctcctcctctacaagctcctggcctttgctggatcacgttggcctaaaccaggaagaatacctggcagggctccacatccgggcaactatcgttccctagagctcccacacagagcttctcaccctgatgtcacggccccagcgcccagaggatcagccgtgtcagcagctcctcatcaaaattgccacctgctctcttcaatgccattccagctgccctgaggctttccggggtgggggcagaggacttgtacaccctgctttacctttccaacagaactcctaaccttcccagatcacccccacaagactactgaggtccgttcaggaggcaccatcctggcaccgtcctgctcttaagtgctgcagatgcttggcttcccctttctgccagcttaacccttctcaccttctccccatgtcctccaggcatcctccttaaagtcacccttggatgtccagaacagaagaataacttgtctccctggcaggctccatcgtgggctccagaagagaagacttatagttccccaccttgcctggcagaattgaaactaaggctttagactgagggtaagagaggaaacttctgccaggaagcagcctgcagtccacaggagtcctctcctcttctagggctttttaccagaactccaggctgcgttctccaagggtcttccctcacagggatccagccggattcccacatgggaaatttctcttttggagagaatcaggtctgttgaatgtcatgtggcaggcagatgcttctctccactgtggcagaaaagagcccaagttatagctgcattgggggctggggggcttgagtggaagtgtgggggtgggaggaggacactctgcttcagcccctaggcctgttccatgtgtccttgttcccattccagacacccaccccaaaccccagcatataccaactccacagtgtccttgatctagatcaatagcttgtcccaagccccagtcaattcctgttgtgtggctcttgcctttcaggggaagactaacaaatcggcatatacaggccccaaggtaggcatctgtgatgttgtcttatgtctttgttcctttttggctcctaaaggggatgtgtatgtaatttgtactttcttgctctcccttcttacccttaacccctcaagttctagttcccttctctgagaagcttacccacattcaagaatcagaagctggaggaagagaggctgggaaagagactagcaggaatgaaaggactttaatgtttggggcactagaggaacagagaggcagactgggaatatggatgcaggggagaagcagctgtcttggaaggagagtttgtatggcatacctaggcagaaacatcagatggcctttgatacaagccgtttagctctcctggaaatatctactatgtagccatttcaaacaggactgagcccctctgagccagaggagctggttatagcattcgccacagagggaagaggggctgaatgggtatgatggggtgatgttatgagagcagacagaatagatagagaggatcagaagagatgggctctgtagggggccaacctgccaatactggagccagcctggcactgacaagccctgggggaagaggccaaggtcagggatcaaggcagaggggatggggcattctgtgggttcagatgaacagaggaaagaagaatagcaaaatagaaggagttggtgagggagtctggttggaggtaaggggagcccatgtaatggaaaggaatgaaggaaaaaaactatcataggagcaagaaaacatcattatgggttac

SEQ ID NO: 1879657 - DNA, 4001 bp, Homo sapiens
gcacttagtacgtgtcagtgctaggaactgctagttgctacagtgaacaagactgacatggcccctgtttttaatgagataatagtctagctagtttatcttctagtaatattagggaggctttgagtgttgttgctgtttttcacagatgtggagaggggaatgttaattcttccttttaggaacacattccagattttcattttctttgagcaattttttttaatttggtgaatggaattttttctaaattatgctattaagaagtttaaacttttaagtagacttgaggagtaagagtatgttttaggaaaagaaagtagaggctagagactggaaagtcattggaaagctatttcaatattattataagttggatctgaggtaagactttaggaataatctaaatattgttgctgtggtgttcttacagagcttggtcagatgtaaactactaatatcttaatacttacattaagaattaatgtaaattctgtccagttcagattattttattttatttttgatacagtctcactctgtcacccaggctggagtgcagtgatgtgatcttggctcactacaacctccacctcccaggttcaagtgattctccctcctcagcctcctgagtagctgggactacaggcacgcgccactgacttggctaattcttgtatttttagtagagatgggctcttgccacgttgacgaggctggtctcgaactcctggccacaaaggatccatccacctctgcctcccagagtgctgagattacaggcatgagctaccatgcccagcctcagacttagtttaaaagaaaaagaattaaagtgattatacctgagacgagtttccacaaacatttgtttaaaatttcacactggaaagttttttttttttttggaaagttttataagccatgtcattgtctcctcttcttttttttttttttttttttttttgagatggagtttcactcttgtttcctaggctggagtgtagtggcacgatctcagctcactgcaatctccgcctcccaggttcaagtgattctcctgcctcagcctcctgagtagttgggattagaggcatgtgccaccacgcccggctaattttatatatatatattttttagtagagacggggtttctccatgttggtcaggctggtctcaaactcccgacctcaagtgatccgcccgcctcagcctcccaaagtgctgggattacaggcgtgagccactgtgcccggctactcttcttttcactatttagagagcaagatgtctagggaatttcactgaagtgattgaggtgggtggggattccttggtggaatagccctctggactctgaggtggatcatatgtatgtattagtaaatatagcaaactggtttaattgatacatcctgataattaaatggtacataggttgactggtcagtaagttaggttaaataaatatgagctttgtcagaaaaacacaagttttcattaggtatatttatgttttatttactcaatacatttacatggtagtgttacagattatcttctgtgtacctgccattgcgttggttgcgtggtgttagtcgatttctgatattgaagtagcacagtcatacagaatattggcctaaagaaatgacagacaaactcagctatattgtctgtcaattcataggtcattttcctgtataccatttctgaatgatgactttaatcctcttccattattggatctttttggtgttacaaaacttgaatttaagaaaattgatattaattcttaatcatttgttaattttataaaacaggctgaaaatctttttttctgctggaatcaaatgagagtccaagtgaccacaattttctgtctttctttattatacctttatattgtagcaagttggtaaccatcaaaagtaacagcatctccactggaaattggtacacagtccacatggagttgctgttacacttgataacaccattaaacatataaggagattccttttgctcatcatgggagctgtacgatatctctaagtatacttgtttcacagaagaaagtctcgatttattcatgttctaaataagtttagggactggtagatttgaaacgctgatgttttattttgatttgaattaatagtgtcatttgcattttagatcatatttgtattttatcaagaaataattccatttctgactttactgtcattggtcattttttgaatctgtgagataatgccattagaatttgggttgaaatctgttactagtcaataaaaacagaagaaataatttttagcataaaaaagataaaatgtagaaacactggctacctgggaaggaaaagaagttggttaaatttctttcatcatttcaaacagttataatcactttcatgctattaatgctatagttaacatagtgaaacttagcccctaacttctggaaattatgagaaatttagtaaaaatagccaaggaatttccaatataatttgagtgttaactttagctacctcaaattttttctcagttaacaataataaaccttttgttcaaaaaatttatgttcattaaataaagaaaaatttcttcaaaatggttttctgtcagctttaaaacataaatctaggattaaactaaaaatagaatttccccttccaaatttcacattgttctagaattaaatttagtaaacaaatgtgaaacatttagcctcttacctcattcttcttccagtaagttacagaagaaaagttgtcttaataatcttcaatatttttgcttataaaggcaaaacacagaagacagtgggatgacagcagtcgtttctttgttgctttagtaatcttaatgctgcttaatgtccataacacgctaaataagcctcattccggttgatatcgaagttcagaatgattggctgatgtcatagttgctcatgctacctagtggattttcactgattgaaacctaagaagggacacgtaatgcatgtgttgagataaggcctttgagtaaagtacaaggttttatgatggatttattgctttatgaagtaaagcattaagatggaagcatatagattacatactggtaagtggtttcacccacttttatcagcagtcgtttatactgatctttgggttataggttaactatgagtttgtgttaagtatacaatgttaaagaaatgaaggtagaattcttaaatttcagacaaattaggaattttcctgcatttttttctgaagaatattaaatatcacaaggaaatagttagaaaattgtttaaaaatttttttaggaaacagaaaattatttaagaaatcttttaagtattatcttggtttcattataaaaaaattccacttctaagtatttacccaaaggaaataggactaatacctcttgtgtgaggatatgtatataagatgtccaatacagttgtttataaaggaacataatgatatacaaaagaagatgtaatttaattagttatagaagaatgaatatgtacctgttaaaaatgtcagcttagctcttaatggttgcctagttccttgtgtatgaaaatcaaatgaacataacttatccagtgtttggattttgttagatgtttgtcacatctctataatgagtgtcttttgagcacttgttcacagttaactttatatacttttttcaaattatctttttagattttgtttgaacattaagtttatctttgtttttatcatcattatacctagctcaagtttgtgggttatatgtctgtttatttttattgcaatttttgttttcaaagctctctgtcacacttttttttttttttttgagttggagtcttgctcttgttccccaggctggagtgcaatggtgggatcttggctaactgcaacctctgcctcccagcttcaagcgattctccttcttcagcctcccaagtagctgggattacaggcttgcgccactatgcct

SEQ ID NO: 1879658 - DNA, 4001 bp, Homo sapiens
tcacacagaacctgccttatagtactagtacagaagcagagccagtgggacaggtcttctgacaggtcttaggtcagaacacaagtctctagcagactaaaacatggttgtatttagtcctcttcttttgggatagctgggggatatcccaacttttaactggtttatcaacaaactcacacaagccaccttgtacaaacattatgtaaagtgttcatcttggaggatagagcaacattctatagctgtttttttactgagtttgggatctgcctatattcatcttatgatgttttcaagctaaaactcttctggcaagtctacatgaaatgcaacaggggcccttgagcacccattcacctattaccttagaacacagtcagaataattttctcaaacccttggtccagaatgggctctcccatgattaaaggtaagaggacttcacctcgatgctcttgataggcttccagaaaaggcattcacccttaccctagctcaactgtttgtcaggcccaacgattgttcccaaaccttacatgttagagctgcagaaaaagtgcatttgtacttttcctgcacaattagcttatttttatctcatggacattttgattgtattcatgaaaagttcttatataaaacagctataagaaagattaaaataaaaattaagtcattatctttcttttgcctcattttaaatttacaccgtactgttgaatttttatttactttaagccatcaagttttttttttttttgtaaccagatcagaaacaaatatttaaccctattttctggcatgcaaccttaattcttaagactgctaaagttagaacaaacttaaaaatagtccagccccatcactagcaatttatagatcaaaaactgaagcccaggaaggaagagtatcttcatcaagatcacaacgctaggcagtagcagaactagaactccagaacaggtcttctcaatccaaagcctgtgatgatgtccagctaccaacagagcaccatacactataaaatcaaagccaatttcttgttcttctaagctcctcccattcccaaccaaattcttggtcattttttcattatgccgtctctaaatcgtggacatttaacaaaaccacctccaagctaagacaaatagatctcaaaatagaatatgaaaacagcataaaatcacaaaaatataactaagtttgcttgtttgttgaaggtaaaatttcctcttcatattcttagagggagagaccataatgtacttccctagcatagcatgattaaagagacattactaacagtaaatcaaatgtaaattacgttacatttcacataaatctgatagttttccttttttagacaaaaatacaatatgattgacacaaaaggacaaatactatgattccacttatatgaggtatctaaaatagtcaaattcatagagacaaaggaaaatgctggttaccaggggctgaaagaaggtggggcatggggagttactgtttaacaggtacagagtttcagttcaggaagatgaaaacaagttctggaaatggatggtggtgatggctgtgcaacagtgtgaatgtacttaatgccactgaactgtacacttaagatggcaaattttgttatatatgctttatcacaattttaaaaatagaaaaaatatactataattagaaatttgtatttctgtggataaaaggaagaatggataaaagcggcacaaaagttgtcttaaaagcaacataaaagacacattaacttgaaacagttcctactctggtaataaaatccactcacatgtacctccaaatagtccaaaacagagtattccttcccatccccacggtgagacataacagcattcaaaacccactctatacttggagatgtgccgtagaccaaagtgtgccggccatgctgggtggagaaggtggtgaagggtgaagagctcttacctcccactgccctctctacccggcacagcccccagagcacagattccagaaggatttcggtgttgggccagggactgcaagtgtgacagagcctctggtggtcctgctaggtaaaagcatgaaaacatttctgtgaggtcagaagacactggagactgcagaagggaacttttctgtctttttgccatgaaaaagcactagtataagcagaaaatagacagctggatttaaatgtaaaacaaagcaaagaccttttcaccctgcttcacgaattttagagcaatttatagttcaacttcatttcaggtcttcaaaatgaatatgggcaaagtaatgctgtaaaagaccacccactacgttgaatacctttgttggtgctgccttaggatttttttttttctgtgcagtataatcctgagtatcataacatttacaaagcattttcaaatatgttatttctatctgatgagaaccacagaatatcacagcaggaaggaataatttagtccatctttagataacagatgagtgatttaagactgaaagaatacacaagattccatagctggttggaagcagagacaagaccagaacccagcattccaaacaactctccaacctcgtaagattctgagaggtctcaggacctttatcctacatgagcaagaataaacagaacaggtgatttcttgtgttttgttgtatctactggaaatctctcttacatataaataagcatcttagtaaaaatgtctggataacctaaggagaattttgggcgtagggagaggtaaaagataagaggagacagataaaccaggttgttcataatttaatattcctgctgtcacagattttatagcttagtgaatgctggtacactgagatacttctatcccagcagtgtattaatatttattatttgattatttctggtaccttgtgattctcactagatttcaggaaaacactagcactgggcatacaaaggcttttacatgtgactcaatcattccccttatatacccccgtacccatttcaaaacgactttcattctagtttagagctagctagctttgctttctctaccaagtgtaaataaatattcatgttattacatatactgttatctgtcacagggttttatctttaatttggtgtatctttcaattttcactgcataaataaatgcagtaaaataaatgaaatgaatgtttggacatcctaggtttcttgttgtcttaattttgtataaaactaaatactctgtatccaaagtgtaggaatgttatgtgacccaacagttttcaataattttcttggtggaaggcactttaagtcatgtacaaatggtacttcttattggcaaaaaatagatcactcactagtgattttgagcttatttgtgcactgaagttgcttattttcaatatttgtgttgactttaaaaaaaaacaaaaaaaaaacagactcactctgtcgcccaggctggaattcagtggtgcgatctcggctcactgcaacctctgcctcccaggttcaagcgattctcctgcctcagcctcccgagtagctaggattacaggcatccaccaccatgcctggctaatttttgtatttttagtaaagacggggtttcaccatgttggccaagctggtctcaaactcctgacctcaagtgatctgcttacctcggcctcccaaagtgctgggattacagacatgagccactgtgctcagcctgtgttgatctttaatatagattgagcatttcaaatctgaaaatccaaaatctaaaatgctccaaaatcaaaagctttttgggtaacaacataacactcaaaggaagcacacactggggcattttggatttcagatttttggatttggaatcccgaaccaataagtatataatgcaaatatttcaaaacctcacaaaaatctgaactctcaaacacttctggtcccaagagatttggataagggctattcaacctgtattaggtcctactcagttgtccccaaatgt

SEQ ID NO: 1879659 - DNA, 4001 bp, Homo sapiens
aaaatgggctcactcagcctcaaatctacccagccatcaccctaaggcctgtcacctactcagcattttccactttctggagcttctgatgaagaaattccaatgtaccagtgggaggaggaaggcccagagactttaggcaacttctccaaggccacacagttagaacagaagctgagcttgttctgagacctacagagagccccacctcattccaaggcaagcctcatctctgttcctcttatcccattgaccttttcaaccataggacaggctgttactccattcgaccccaggggccttgactggaccttacacagctggtcatggaccagatgaacccaggagccagggaagccagcacacactggacacctactacatgccggcatgttcacacaacctcatttcatcaacagagccctgaagcaagcttgggatcatcatctcccattgagacgaggaacctgcggtgcagagaggtgaagtcacctgcctggggtcacttagttcataagtggcctcattcgtttaacaaatatttatagagggactgttttgtgccaggcagtggggacctgacacagagccgggattgggacctatgccttctgactcctgagctcatgctatttctcttgtgccagcagccttggcggagaagctgtgtgggggcctctgtccttgtccccagagggagtagggatgactcagttcctgccttccccctacacacaggtcaactcccccctccacaacaccacacatggagccagaaagcagggtggcccgcggcattgtctgcccacacaaaggacaacggcccctttcagcccagatgtggccctgtggcctaggctgcagctgtacccggctccccatcgccacatcccctcccctgagctggggctgcttaccgagccggttggcaggattccgcttgaacagggcccgcaagaggctctgggcttcagtgctcagaaactggggcatgcctagcttcgccctgaaacagcccccgggactcatcaaggctgagccctgccccagaggccccatctcccccggcccctgtccagatctagttcccagctcagtctagacaagccatccactaattcacttcccaaaggcttcagggatcctacccacaggcccccagggatgaaagaggggctctggaaggtataatgtttaacccagaggagagtctcattagagagggtagctgaggcagggacagggtaataatattctgacccccaaactggggctggggcttggaggagtccattgttatcagggcagggctggggcttacttcagaatcagtgtcatggtctccttccggtccttcccctggaagggcagggagcccgtcagcatctcaaactgcagaggacaaggatctattcaggctctgatccctgtctccgacacacctcccgcctcctcccagtcagacccctctgccccagtcccaggattcttgctgatacatccaagtcagcctggagcaagaattatgcccgtccctcttgcctctgccaaccagaccaccaggagcagcggtgggggcgcgaggctggggagaaggccagcactgggttaggcgcgtcccaggtggggtcaagcctgggatccttccaaggaagaaaactgcaggtgcatatagggtgaggccagcttggctgtgagaggagacggggagagccctagaaatgatcaaccccctcactgtacagatagggagactgaggccagaggcttgggctggatcctttacccctgtctgggcactcaccatcaacaccccataggaccaccagtccgcactatgggagtggccctggcggttgacgacctcaggggccatgtactccactgtcccgcagaaagaataggccttcttctcgtggtcaatggcctctttgctcaggccaaagtctacagcaaggagggcaggaggacacaccttaggacccctgccttccttgctgccaccctttgcacacccaacccccgtgcccagaggccagaaggcatcacccccatgacactcaggaggaagctaaggcccagagaggtcaggtgacttgctcaacgttacacaatgaggggctgggattccagctgagggtgttccaagtctgaggcctgagtttttgaccacttccaagtaactggcacggcttctcgggaagaatgagcccccagcactcagccgagacctatcatgaccttgtcctgtcctcccctgggtcccgagggggcaggcgccctccactcaccagtgagtttgatgtggccctcctcatccagaaggatgctgtaatagagaaatagtggtcagggcccctcagctgtggccgtgtgggtgatggtgttaccacagggctgtgggagttgggttcagcccagaggaggtgctccacccaattctctctgatgactgggcgggtgttgcagggtggtagcagtaccacgcaggggtgttgcctatcttttttgctaatccttgaagcaactgtgtgaggcaagtactattagggccccgttttgctaatgggaaaactaaggctcagggcagttaagtagctctacagtcattgagctagtaagtctagctagtaggtggagacaggatttgaatacagggctgcctaacactaaagccagatcttattccaactcaccacctgcccctggctccttagttatcatttgagggtagttagatattagggaaaattctatagggctttatcaaggaaagacctctaaaggtggcatctcaaatgtcacactagattagcaaaaaaagacgggcaacattacctgcatgcaaagtacctggcccttggtaatggtagcattagtgactgggcagctggcactaccacccaccccactcacccatccctcagattgcccaagagagggagacgtttctggagaaagccatgcccacccacctcaggatggccctgtcctagaagaggcctcccctggggaggctggggtggggctggaggcttcactcacttctcaggcttgaggtctctgtaaatgatacccaggctgtgcaggtgatccaggcccagagccagctcagccaggtaaaacttcacatcctcctccgtgaacatcacctgcaaaagacaggaggggccttcagcagggacctcctcttccttaagagctggggcactgggcagtcagcagcttcctggtcctgaagagccaccctgggaggacccttggaaaccccaggccatatagccttctcatcatacaaaggatttgaagtatgaaatgactaatacgcaagccactcattgtggcaccattcagaaatagaaggggtgggaaacaggcctagggtccaagagtagaaggctggaatcagccctctcccctgcataatggagtgctttgcagccatgaactggaacaaggagtttctccgtgttctgacatggagtgagctccaagatatactatcttgaaaaaagcaaggtacagaacagtgtatacagaatagtactttttacataaggaaatgggggtaggaatgaacatatatcggatttgtttgcaaaagaaacatgggaaagttaaacaagaaaccaataaaaatgtttacctatagatgggaatagagggggctggggtgggaggaagacttcttcatgaatatttttcttttgaatcatgtatattacctattcaaacattaaaatcacaatttaagccgggcacggtggctcacacctataatcccagccagcagtttgggaggctgaggcaggcggatcacccgaggtcaggagttcgagaccagcctggccaacatggagaaaccctgtctctaccaaaaatacaaaaattaaccaggcgtggtggcgtgcacctgtcatcccagctactcgggaggctgaggcaggagaattgcttgaacccgggaggcggaggttgcagtgagctgagaccccaccagt

SEQ ID NO: 1879660 - DNA, 4001 bp, Homo sapiens
gaaacaaaaagaccgtttaacatgaagaaagaaattgaaattaaatatacattaaatgaaagcaaattttgaaatgtaatcatttctagagtaaaaaaaaaaaaaaaacccagaaaatttgagaaaaacattaccaaagtaccttgttagctatttttcctcttcagtaattgtatcaattagaaaaaatatatttcttgaaaaaatgagctcctctaagttactttttttagttttcttatgtaaaagaaactatatagatttttaacatctcatttgttctactaaaaataattaatatggaactctccaagtcacaatagaaaatgaaaggataactttactatatcatctaagtgaaagtagctaaatttctccttgctgtttatattttaactaataatcatgaatatatgagaatacttaatgttttctttatacacattttggggtgatcagaagggtaatttttaaagtaagttgttttgacaaaagaaaacttagggaatcttttataataaaatattttgctaaagagaacttgagtcaatttttgaattgttgcaaaatgtataacttagaaaagaatttgttcaggaaccactgtaactttaaaggaggacaaaagagattatgtttatttttcacaaaccctgtagaagagatgttttcattatatagaattgtttcggaatagaaattaatgggggttaagaaaattagggatgaggcaataacatttttccagaactttctttaaggggccgacctctaaagttcagcacagatcacattgcaatccagacttgctctattattttctctattaggatttcattcagcttgagggttttcttccctcccaccttcctccccctctcccaccctctttcacctccaggacagctggaaactgaccaaagaaaacttctgccttcgtttacaaattccttttttatcagtgggtttctagacaaagtgccttattttaaatgctcagagaagtggaagcattgtaagctataggcaagagggctcagctgagcagcaattattaaccactctttgatttaaaaaaaatgtaaaacagatatttacaggggtatctaaagatagaggtttttattccctgatttactcagttgctgactcaataagttgtgggtcggtgctcttctctgggcaaatcccatctgcattgtctggtaggcaagacttggcaggttcttcttttattgttaggtactattattcctgttgtttatattacagaaggaaatcttcagaaaagcactatccatatagcatttaaaaaccagcaagtattctttactttggggaaaaatgacttcagtcctgggatgttaaaagttatacatacagccttcatccatataagtttttaaatctttgaattattattaaacaattcaaaagtagcctcattaaactattcttaagtgtctggaatgagttttttcatatttcattttgaagtgggaaaacctttaagaaaacacttgaattatcaatcttcagaaataaaaaaaaaaaaaacagtaaatcgctatataccacacacttttgctcttttaaaattaaatacatctctacccatcacacatgtacctctgtttcccttgcatgttaacacaaatcatgggctccccacctaggttcccttggtcacagaccaggtgagcagtcaagaaggccttacccgctggtcttcccttcggcagtcttttctcagcagtgtccccgagggcttcttggtccctagtgtgcaaaacctgtgaagaaaaacactggatatgagattcaaaaaaggagcaaacaaatgtcttctccttggaaacagcccattttgtccccagcggtccatggcgttgctctcccttgcccagtctaaccaatgtgcagactactgtacaacggcattgtcctgaacaggtagtctgaacactggggcgacggagcaggatctccagaagcttccttctatgtacttaaaatcctctcccggtcctcaggaaaagcctcccttcctgcaccaggggttgcattcagctttcccccctgaattctgctgcgctgactgagacacactcaagggctgtgatttccagtcttgacgtggcacatttgctgcagactggggaactggcaatgaatttaggaccaggaaaagggggagggctgggctggagagtccatatatgggatgatgtcaccctggggaggtttgggtatgcgctgtgccgctggagagaccgctagaatcgcctgctctcagacatgggtctgtgcataaaatggtaccagatgttttagtgtaacgttaagcagtcatttcatcttcaggccagatttttttcctcaactgggcaggaagtgggccccagtatggaaaagctgtaaaaaaaaaagagtcaagatgtacagttcggctgtggccaactgaaagtgagttagtgtagaagtacaaatttactgtctgacccaggctagagaagtaatttgaagatagagggtagatgaaatagtaaacagaaagttgaacactggaaggcagagctcatttggaaacctttttgagctttcctgtggcactttattttctggtatttcactcgtcaaaaagggcagataagtttctgtctgtctgtctgtctgtctgtctctctctctctctctctctccccctcttcccctctccctccctctctctccctccctccctccttccctcccgctctctctctctttctctccttctctctctccctccttctcctgtctgttgaatctgtcagcagcttgcaggctgctctagacttgaacagtaattatagcaacttcctgaaagtgaagcccccatgaaaagtctggagaaatgttctttgtcatggcctctacatgagtaattagttccacatgtggccttcctagtttccctcagctattttggctgggtctctgaatgctgtgctatagtttgacctaaagaaacgttacagtttttgtttgaagcatccactacgaaacaacgactcaggtcttctaacaaatcgcctctggtagatccatgctgttaggtatagcattgtttttcacttgtaattcctgattctgttttgatacttttgttttgttttcatggtattctgtggcttagttttatctctggttaactaaatctgttgaaatttgccaagtaccgcttgaccaaaggttataagatatcagcccactggcatctacttttctttccctgttgtggctgttttcaattatatatactcttgaatattctgaatatgtagttctctcactttccctccataggattctgatcaaagctagagtcgcctcaaacaagagcttgattaattgcccttctgaagatcaaaatgtgagaaaatttctaggtagcttccaaatttaatttgaccaaccagactaagaaacttagccttctttaaagaaagtacagccaaagcaattcatttccactggccttctgaaatactttttagaagtagaaaaatatatctcttttttatacgctgcattgtatatttcaaaaagcttcaagtgagtactgtcctaaagcatttgcttttcataaaatggcctcttttgaatcattaaatagcacactactgaagagttcaaaagttatgacaagcccttgttatcttgtgaggaagattaaataagataaacatgaattatctggcatcttaggatggaacagaggttagcactgggtacaccattcatagaaatatttatatcatcaataggagtcagaggaatgactttatatctctgtacttttgcttccatatttgtgtctttaggacctattcaatagtgcttgcacaagcccataagactcacctcccttttttccctgtcactgcttgcatattactggaaatgatctaagtgtgactaaatacaatctaatacttgtattatatgtggataccaac

SEQ ID NO: 1879661 - DNA, 4001 bp, Homo sapiens
gcagcatgggggtggtttcagctggccctgcgggggactgccccatctccccagggaggaaagagggtctggagatagccccgggtgggggaggtcaacctgcagatcccggcttggggacagctccagatgacacctcgtgagccgcctggggtggaggggcccccagtgcagggctgcgtggccccaagcacctgccttccctatcccatggtcttgcagctgggcaccggccccgcccgcctcagccccagagatgggccctggagggagagtgtggtctgcatcccacggctggcccctggaggaggagggccagggctggccccgggaacctcccagaggtctctgcgtcctgctgcctggccgctgagacgctgtgacattgtccctgctgggcatttgtgctcctccgtgccctgggctcaggcactttggggggcccagctgcttctgtctcagcctccccaggtggcgagggggctggggctgtggggtggggctccgggtatctgtgactgtgaccccaggggccaggctgatagcacggggtccacagcatctgcccggggactacagctcgagggccccaggaggccgggtgggcacaggccatggcgagggtggggcacaagagccccagaccccggcggctttgcactgatgggctgcggatgggcacaggccatagtgaggggggcatgagagccccagaccgggcggctttgcactgatgagctgcagggcaggcagctctctcctctaacggtgatcaggcagcggatggacggttttaccagacagtattagacagagggccaggtctaaccatgtctggtaagacgcccatcggccggcggtggtgtgggtggcctccgggtcctgggctggtgtctgcggggcctgtgaagggaaggccccgggggcggctcctgccacctcctgcagctgccctgatccctcctgggtctgcagaacgagcccccgaggcacttccctgacagcccccatcccagcacctggtcccagcccagcctggctgtgtgggggtacccgggagccacctggtcacccaggccctgctcttggcaaaggttccctgcagcccctcgctggcttcctgaagctcggtcgggttaatgagtaacagtgaagggcagcctctccccggtggctgccccctccccaggctggggccttgtgtgggggtgcggtcccaggcgccctggttgcagatggaaaagatgaaacaatgggtcatcctggcctggtgggttttggacaaagttcctgttcttgttgactgggggaaggaatgagaccccttgtccctcagagggcaagcgcagagcgtccccgctcccctgcatggtggggctcgggaatctgaacccaccttgtccttcctgcgcccccagcagaccctccacggagcccggaccacgtgagagaggccactgttgctcttccctctccagccctggcatcccagccctatggcctttcctggagccaggtcaccctaaaacccagcctgggaggttgggtgggggaggcacagcggctccgggagggggagcaggatgccctccaggccacctgtggaggcaccaaggggtcctcaaggtgtcagacccagcctgggcgtgagtgaccccgggggcacccccggcagaggccggcccctcccctgggggctggacttcggagctgacacaggccctctgccgcccgctcagccctccgccctcacccgtctgctggccccgctcggccctccgccctcacccgtctgctggccccgctcggccctccgccctcacccgtctgctggccccgctcggccctccgccccagcccatccctggagtaggagctccggatgtgcctcggtggtgtccccggcgagcggcgggtcacctttgaacatcgttaccagacagtgttagagtcaagctgggaaatccagcactgtccggtaagatgctcacaggggcccgggagggacgtggggtcccgccaggcaggcaggggctgctgtggaagcccagggaagaaccggagcggtgagcagccaggggtggtgccgggaccggacagggctggcggagaggggcttgggggccctgagactgcacacaggcccaccctccctgcttcctccagggcaaggggaccctggggctgctgacccgggaccaaggcgggggcactggtctgctcggtggccggcccaccctgtccggcaggagggaagatggctgtggccaagctgggtggggcggcttcctctgggttccacgtggctcccggttgggccttgccctcctgagccctctgttgggtcctgctcggcccgcacctgctgggtgtgacagcagctcccgcccaggcgctgtgggcagggcccggacacctgagcgtcctaatccccagatcactgtggggcgccctgggtgcagctgcaggaggccttgcattccggggtctctgagatgctggtggggggcgccccagcccccttccgaaggtcacgtccccccgtcactctccccagagccatctggcccggacggggtggggtccggtgagcgggctgtgtgggaggggagtgtggggctcggcgggaggccctgggggccgggacggggtcggccggtcgctgcgtgcagggctccgccgtcatcattaccaggcagtattagagacctgactccatccaatgctgcccagtaagatggccacggctgcccgagctgggtccgggggccgcccggctgagggttgcatgggactcgctgggaagctcagtagctggggggcctcgtcctcctggggcactgaggacagcatcgccggagggcaggggcccgggtgagccccacccgccagccctgccgagtccagcagccaccagctttgggtcctggggtgggcacctggggggccgaagtgtcctggccagacggccgaggactaggtcggagtggggctgacacgggccctctgcccgccccgctcggccctctgcccccacccctctgcgggggaccttccctctgggtggtcccataggaaggcctggacagcagccccagccccccgggccccacgtgctgccttgtctgaggcaggggacaagggcctctgtctccaggatggtgttccaggagctgcttccctgcccagccccttctcttctcaaaggcccggtgtctgcgaggctctcgagacagaacggtccccgccacctggagacccctctcccatgctgccccgctcactgcacagcgtctgagggcagggggtgcaggcgggggtgggggtgggggtgtgggtgggggtgcgggcggggcaggctcctgaccctgcccagccgtccctgcggtttgtgtgtctgctggtctggggtctgacccaggcacagaggcagaccggccacaaacacagacacaggcagtcaagcctcagacgccgcgagggctgagccgcctctgcaggggggcaggaggaagtgggcagccctgtggcccctccttgctcagggccctgcctggagcccagagaccctaggcttctactccaggcacactcaggacccgagggaggttcagccctcaggccagaccaaggctccccgcccgctggacacgccgtccttcctgtcctccttcccaccctttctctgcaaccacctggtgccaactgggcccagagagctggccagagccactcttcaagttttctggcaccttccacccacagaggctgtaggtggggcgcaggccctgtgccgattcccctgtctgcccgccgaccacaacaaaggtcgtgtccgcccgcccccgcctgctgccgggtccacccggttccagtctcctcctccaaaggccacgtctccgaggtcctgacccagcttccctcacgcctggaccctctccggagaccccacaccaggtcccctgccctggccccagcctgtcaggctccagggcacccgg

SEQ ID NO: 1879662 - DNA, 4001 bp, Homo sapiens
cctctaacggtgatcaggcagcggatggacggttttaccagacagtattagacagagggccaggtctaaccatgtctggtaagacgcccatcggccggcggtggtgtgggtggcctccgggtcctgggctggtgtctgcggggcctgtgaagggaaggccccgggggcggctcctgccacctcctgcagctgccctgatccctcctgggtctgcagaacgagcccccgaggcacttccctgacagcccccatcccagcacctggtcccagcccagcctggctgtgtgggggtacccgggagccacctggtcacccaggccctgctcttggcaaaggttccctgcagcccctcgctggcttcctgaagctcggtcgggttaatgagtaacagtgaagggcagcctctccccggtggctgccccctccccaggctggggccttgtgtgggggtgcggtcccaggcgccctggttgcagatggaaaagatgaaacaatgggtcatcctggcctggtgggttttggacaaagttcctgttcttgttgactgggggaaggaatgagaccccttgtccctcagagggcaagcgcagagcgtccccgctcccctgcatggtggggctcgggaatctgaacccaccttgtccttcctgcgcccccagcagaccctccacggagcccggaccacgtgagagaggccactgttgctcttccctctccagccctggcatcccagccctatggcctttcctggagccaggtcaccctaaaacccagcctgggaggttgggtgggggaggcacagcggctccgggagggggagcaggatgccctccaggccacctgtggaggcaccaaggggtcctcaaggtgtcagacccagcctgggcgtgagtgaccccgggggcacccccggcagaggccggcccctcccctgggggctggacttcggagctgacacaggccctctgccgcccgctcagccctccgccctcacccgtctgctggccccgctcggccctccgccctcacccgtctgctggccccgctcggccctccgccctcacccgtctgctggccccgctcggccctccgccccagcccatccctggagtaggagctccggatgtgcctcggtggtgtccccggcgagcggcgggtcacctttgaacatcgttaccagacagtgttagagtcaagctgggaaatccagcactgtccggtaagatgctcacaggggcccgggagggacgtggggtcccgccaggcaggcaggggctgctgtggaagcccagggaagaaccggagcggtgagcagccaggggtggtgccgggaccggacagggctggcggagaggggcttgggggccctgagactgcacacaggcccaccctccctgcttcctccagggcaaggggaccctggggctgctgacccgggaccaaggcgggggcactggtctgctcggtggccggcccaccctgtccggcaggagggaagatggctgtggccaagctgggtggggcggcttcctctgggttccacgtggctcccggttgggccttgccctcctgagccctctgttgggtcctgctcggcccgcacctgctgggtgtgacagcagctcccgcccaggcgctgtgggcagggcccggacacctgagcgtcctaatccccagatcactgtggggcgccctgggtgcagctgcaggaggccttgcattccggggtctctgagatgctggtggggggcgccccagcccccttccgaaggtcacgtccccccgtcactctccccagagccatctggcccggacggggtggggtccggtgagcgggctgtgtgggaggggagtgtggggctcggcgggaggccctgggggccgggacggggtcggccggtcgctgcgtgcagggctccgccgtcatcattaccaggcagtattagagacctgactccatccaatgctgcccagtaagatggccacggctgcccgagctgggtccgggggccgcccggctgagggttgcatgggactcgctgggaagctcagtagctggggggcctcgtcctcctggggcactgaggacagcatcgccggagggcaggggcccgggtgagccccacccgccagccctgccgagtccagcagccaccagctttgggtcctggggtgggcacctggggggccgaagtgtcctggccagacggccgaggactaggtcggagtggggctgacacgggccctctgcccgccccgctcggccctctgcccccacccctctgcgggggaccttccctctgggtggtcccataggaaggcctggacagcagccccagccccccgggccccacgtgctgccttgtctgaggcaggggacaagggcctctgtctccaggatggtgttccaggagctgcttccctgcccagccccttctcttctcaaaggcccggtgtctgcgaggctctcgagacagaacggtccccgccacctggagacccctctcccatgctgccccgctcactgcacagcgtctgagggcagggggtgcaggcgggggtgggggtgggggtgtgggtgggggtgcgggcggggcaggctcctgaccctgcccagccgtccctgcggtttgtgtgtctgctggtctggggtctgacccaggcacagaggcagaccggccacaaacacagacacaggcagtcaagcctcagacgccgcgagggctgagccgcctctgcaggggggcaggaggaagtgggcagccctgtggcccctccttgctcagggccctgcctggagcccagagaccctaggcttctactccaggcacactcaggacccgagggaggttcagccctcaggccagaccaaggctccccgcccgctggacacgccgtccttcctgtcctccttcccaccctttctctgcaaccacctggtgccaactgggcccagagagctggccagagccactcttcaagttttctggcaccttccacccacagaggctgtaggtggggcgcaggccctgtgccgattcccctgtctgcccgccgaccacaacaaaggtcgtgtccgcccgcccccgcctgctgccgggtccacccggttccagtctcctcctccaaaggccacgtctccgaggtcctgacccagcttccctcacgcctggaccctctccggagaccccacaccaggtcccctgccctggccccagcctgtcaggctccagggcacccggctttccctttccatcacctcacaggccttcgccaccaatgccatcaaatcccatcaaatcagtgcttcaggaacacaatttcacctgttttctgagctaaaggaaactaagacttcccgttcagagcagagttgaatttcagctccattcctggctgccaggtcacgtggggagggcagcaggtgcccggcactcgtcccttgcagctggggccaaacacagttcccagcccacccggcggacgggccggcctcccactgccaggttcagggcccggggccagtgtccccaggcccttggccacccagggccagccttctcaggaaccccacagggccagagctggcctggccaccccaggctcatcagtcattgcgttctcacccgggaggctgaggggcacacggcagaggctgggacccagggacagacccgtgtggcaggcaggtgggagaagcctccttcctaagttccagggcaggattcccaggcgcctcctgagtgcagaagctgtaaagccaacgagcagctagcaggagaggccgaccctggctccagggctgggtggggagatggtggcctgggccggcaggctcagctgggggaccaaggatttcgcagggccttgtgcctggcacaggggtgaggggcaaggagtcgggtgggcaggcggccgagtcttaccgtggccacaggtcaagaaatgaaaagcgaaaacggaccttccctgttttccgagagccccacgcggcgctttct

SEQ ID NO: 1879663 - DNA, 4001 bp, Homo sapiens
agaaccttttgtagtcacagcattgtgccctggctagtgtttgacagtctaccctctggtcaccattgttggccattttggttcctgcctccacctgggccaggtggcacataaatacacaagcacttatctcctataaaaagattccaggtcatagggctcaaaccaagctgcaaataaaagtgccacatcgtgtctgtcgtgtgctttttgttctgatctcagggcttgtttcagaccttgaatgggaggtgtttgctggttaactaggagtttgctggacaaacagcaccccacagttggatttgctacgcaatttttatgagtaaacatgtttttaaaaaatgcctgtggcttggcttcttcatccttttgttgcctgtgggtcttggaatgaaggggtgggggtgacagaaactaggttttaaatctgtattaacttgacacagaaaaatattttggagaaaggtttattccttttagttcctgctggcaatctgggaccctcaggggtcaaaaaccagggaagggttgggggaaggtgaagagacctatccccctcagaggtcactggctggggggcagggcttggccattcaagtgatcggtatccatctgcaaagctggaatctcctttagagtgagctcctaagaaaaacaccactcagccaaggagagctattgtattttgctgcctggggcacattctggaggtgaaaaccggtttttctgaagacttgtcagggccaggctttgttcagaatctgccaatttagccagactggctccttaaaggagacccctttacctgaggcaggggccaattataaaaaaggcttgtggatggcattcccttcataactgggttggacttccttcagacttaggaactttctcttgttccacaccttctccttccttaaaaaggagaaacatggagtaacacacacacacacacacacacacacacacacacacacgcacacccaatcacactgaattgtaaagagaatgaaatcagtgctaaatctatcaaagcgtatcatagaccctgacagctgagaggtattatttgcttttttcctcccagatttctaccgagcctggtgttttaagctatgtcttggggagaagagacccatagaaaggcaattacaattggtgaatgattaatgttggatctgacatttttatgtgtcaaatatgtttaactgcattaacctttgcagaatctacacccatactatgagatatatcttgtatagcatcggaaatatctgcaatctgccttcacttaaattttatttacatttactttattacaatataaataggtttaaaaaatctttaatagagtgtttttaccccattctgcaagttctgcttgctctgtggggagtctaagggcagcagggttccttgctgattgcaaatagtgtcccagccacctgcctggggaccctaaagagagaggaagccagtgtcaatttttcaagttcatgtctcagttttagcctaaaggggaggtggcttagaaggccgggagttggcatccgatggtataaaacatagaggcagagaggcttttcagtagacaagcaacttttagtttttacaagttacagaaaacgcaaattttcatagcatcaattttagaaaagaaagattaaggttcccatctgcggtgctttttccaatctgcccatcacccgtccctctgaagaagcacgcacactccagatgtctccttcattgatcacatttctctctggctgtctctattcctaagtcagagttactcttgctgctgctgctgctgctgctgctgctgctgctgctgctacggtggtggcggcggcggtggtggcggtggctgccgaggcctcatggttgtcagctccatgcctcctgaacttcactccactgaaatctggttgggtatgagacagactccggtggaatgaaggacaagagaagcacatggattgtctgaggatctttttctcagagggtggggatgcatgtcaacctcagcctgtagacactgcattacctggccaaaggcctttggcatcccggaatcacacatttgggagatgtcaaggacctgaatactcctacccctcccataggatcacatcctccaaggaggctgcagagagctagttcaacacgtccttgcacctgctgcacagacagacagtgctgagttggggaggtgggtctgtggggccagggactcttgactgtttctcgttttcaaaacagccacccagataagtccatgtggaacctcctctgtgtttacctagttgggatgtcggtcaccctctccctttgtctaggtcccactgtgtgtgccataactgagctcggtgtggttggtcctttctagaggaaacaaagaaaaagcaggtgttctgcaattgctttagaaaaatccagctactctgagcttgcttaccaaggccttggaatgcaggggcatgggcattcctctccacaaggcactgtccaaagagcacgaagagcactttgcaaccccgtttgccaatgtgaaatccagaagagataggtgaggagctcaggaaaaaccacaactcctggctggagccaggcccattcatgggggtgggtggacagaggagggtaagactccttgttctcactcctaaagacttatctaggaaggacagcctccaatggccccacatcctccccaagatgtgcctggaaaatgattcaactatttctttgttggtcatgaggatggaggatttagggaggaagaaagcaagctaacctggctttcatagactgagtcaaataggaaggacgcaaagtatctaagagttttctgctctgtcttaaaagaaatgcccatcaaccctttgcgtgctgttgctgctctggcctcttccttgttgtgttcagacatgcccatggctcagtgcaagccccataaaaggctgttctcagcaccaacatgcaggctggatgggttggggcagatgcaccttgttgtttgaaatactttcttcctggggcttgttctgacccgaagcagggaggcagtttctcgtatgtggctcctccccacgcatctagccttctgggcattgggtctctctgaaaaaggcccttaagcaagggcttgaggtttctagctagtgctgagaaggagtcacactctccttggtctgaatgtaaagactctttgccagggtgaacacggggcttgttggcaggcagagatctgggtagtgaggggaagaagactggttcatcttctcctgctctgccttcttgataaacactcacagttctcaataatgagaggaaaatgcaccctgcttgtgaattatctggaccagatcctcctcctgcaccgcctttgacccattcccagtcaaagggaagaaagaggccagtctgttggctgtaataaataaatgatggcctgggatggtaggaggaaatgatgccaggaaggcaagattctttgccttctctttagatttctgcttaactccaagagcaaaaggggcagtcaattcttctccctccagaccctcggcaccccgctcttcccctcccaacatgtacagtccactagattattaaagtcctcactctggagtgtgcagagagcctcaccctcatgtggggtccgtaccctccaagatgggtacttgagagatgacagtgtctgcaaaaagcaaatgggaggtggcattaatgtcagagagccccagaaaggtgagttctttccttatcactctccccttgctttacagacctgtagctgctacaggcagagacaaaaaaccatgagtcacaacctgtatcaggagacttgacctgctctggactccttgttcaagattcttctgcccactatgcctttgccaactgaatcccccagtggccttcaccatggttacatgggtctagagccaagcacatgcacgatcagagaacaaaccatgcatgggctcgct

SEQ ID NO: 1879664 - DNA, 4001 bp, Homo sapiens
cattttttttgaaaattgagtaaaaaatgtttaacaaaaaaggtgttaactttatgttttaaggaaaaatattgaaaatgttatcctggagtgcctcaccttaggatgactctgctgccgtcctagctttccctttggagtctgaaggacgggtgtagtctccttaatgttctggctaggtcattgtctcattctgggagctgtcaagcactctcctgagccttgcagggtccagtagaataattccatacgtgaactctcataggcagcatttgcaacaggtggtacaaggcatttaagattgggtagaacgatgtcgatattctgtgagtaatttttatattgtcttcctgtttatattctacattttgtaagtattgtttaggactttatttgctagtaatgggacttttatttaaggcaaaaatctgcatcgtgcaatgtatcttgcagaagcagagatgaattttagcagatgacatattgccataagacaagattgtttaaatgagagaaatttaactttaatcatatttgtgctttgtagttttgccccatcattcagttttttaattaaagaaactataatgtcaggtttggttaaaatatcattgtcagaaaatttgaaactcactgggatcttagctttaagactgagactttcattttaaaaataaaatagctgaatgaaaaatagtttgctttagttaagaatacatacataaagtgtttaattgttaaatgtgaaaaaagttttgagtagccttgtgttacattttttaagcttgaccagaatctaagaaagatgaaaattaatttcaaatactgaagctaaaacatgttaatgaactaaataaaagttgacacatttctaattttatccatcttcccaccttttacccttaagtatttaaagtattcatagacaaaagccatcccttatcatttcactccagttaacagtgcataaactgaagtttggatattttctcaaaagatgtgtcaaaatatacatttcaagtgcattaaccactttccttatgcttctgaagataaatgaattgcctgaacatctcaagatcttgaaagtttatagtgatggaagcataggttgcaagtgaatgtgttggccttgtaaattctactcctagaactgtagcataagcaccttcttaattaaagaatgacgcagtcataaatttatgtataccatgacgcgtggaagtatcaaaaatttcaactttccatatgtcaaaagaggagaaactattattttaatatagttgaacactagttggaaatagtagtcttttcactgtgttttgcccagacccagactggcagagttaacccagactggcagagttaactcaaagcacttgatcctttggaatactctttttctcccttttcttttctctgtctttccaccctatccccttccaaaaaaaaaaaaaaaaaaaaaaaatcatgacatagaaaaccatacttagtttatggacaagaattcttagaataatttattctttgttaagcatcagactgaagttatattgttttgttatattgagtttttatatcaatatagggtgctgcaaagctgtgtacaataaaggtcaagggtagtgatttgctgacaacaattaggaaaagagaactatagaatgcacaggaacattttcagaaatgggttttattatatttcataggcaccactcactttacttttggtgggttttaatacttgaatcaaaataaaataatacatgagttaagtattaaaccaacagattaaaaccccaggcccccgagcccctcattttggttgtagctcttggtgtagatgctatggtgtgagggctgctttctttcaatggctggttgtcattcaggctgggttgtcatgtgactgcctgtctgtgcctgctgtacaggtgagcggatgttctgcacagcaagtgtagacaggcagacacatgacaactctgtccagccaggcccttggttccttcaggtttcctttgctcatagacagatacaatcagcctgttttccagatttggtgattttggagagtaaggggaaagggagaaaaatacacaatataattaaacattaaaacattatggaactaaaaacaagttagacttttgactttattcagaaagtacatttatacatttgttccaaatgtgctaacatggataatttgcgtaacagaaaactcacattaaaattttaaggaaaaaaagagattaaacacaaggtttattcttaagtccaattcatattattactggcccacatgtagtcagagttcagcgtaattgaaccagatgtttttcctctttgcaaaaaactgcatattttaatactgaagttaaagataaaaactatgtttatgcatgtttcttttagtagataagtaccataaccttgtccatgaaaaagaaaattatcatttacatggaaacagcagcccttttcaaaataattaatgagcctaatttatttggcaacccaagttgctgactttggtatttgatgctctgataataggatcctacaagggaatatgtttttaccaattatatgtgaaacaacaggaacctatttaaatgtctcattttccttttaaatgcaaagtttataactgtggatgtgaaatcaaattaaaggcagttgtgagcttaagttatccacctcttaattaactatagggccatgctgtgaatcaaaagggtacaaactggaaggctgttactcacagtgatgctcagaatgtgttttggatatagttagtgcaatatagttacaaaatagtacttaagaaaaggcagaaaaggcaaattcatttcatatccaaaaaattaaaaccagatcctttgaaaatttttcttataatttatatgagctaatagtgttaaatatgcagatataaaatttaattctggtgagttgagagtaattctattttaatatcaattatcaattcacatctttagaagtattaagcaaattcccctccccttttaaaaacaaaaatatccaaatagtcaaaattccagtaagtaggacttcttaaaaaacacagcaccaaaaaaacacagtattgtccaaggattgtataattagacattttctcaaagaactttaagaaaaacaaacagtttgtgatttatctttaattgtaaaattctgagaaaatagcaaatagaaacttaatggaaagcaaaatagttttagatactgagaaaattacaattttctacaaatctggacttttatgcagtgattaggtaaggtaatgttttaacaaaagctaataagtgccattttctgtgtatttatgtaatttcaagaaaacaaatttccgattctgtttcggccatcactttcgagtaaaggaactttttttttttcttgacagaatcaaaaacatgagtaaacttggctgttatttaaataattacaaggttagagtatgccaaaaaccagtgccttaaaatactattgtgttattgttgctgcattcagtgcaacagaaagtaattatagagtgattcacttacaaagagtatattggtggaaattaaaaattactataattctttataacttttcctctctctcccataaataatttgatccagttaactctgctcaattaaaggaatgatgcatgcaacctgaaaaaataaaaagaaatatttgtgagtttgtatgttatgctttaatataaaacagttttattaaggcaagatataaaaattttttgagccagaaaaaccacaacagtttttcaggggaaaaaaaaaatcttgctgaaaacaattgttctattcataaggcttttggacaatttatgtttctgatagatttttaaaacacacttacagtaactatgtgacatatgcacacttcattgttatgttgaacctgcccctaaacttgttaaaaagatgaaagactgaaaaccatattgacctttttttaatctc

SEQ ID NO: 1879665 - DNA, 4001 bp, Homo sapiens
gtaatcccagcactttgggaggccaaggcggcaggattgcttgaagccagctgttcaagattacagtgagaccccatctctacagaaaaatttaaaaattagctggtgtggtagtgtgggcctgtagtcccagcgacttgggaggctaaggcgagaggatcgctcaagtccaggagtttgaggttatagtgagctatgatcatgccaatgcactccagcctggatgacagagcaagacactgtctcttcagaacgaaacaaaacagaacacattgtcaagcacttagtacgtgtcagtgctaggaactgctagttgctacagtgaacaagactgacatggcccctgtttttaatgagataatagtctagctagtttatcttctagtaatattagggaggctttgagtgttgttgctgtttttcacagatgtggagaggggaatgttaattcttccttttaggaacacattccagattttcattttctttgagcaattttttttaatttggtgaatggaattttttctaaattatgctattaagaagtttaaacttttaagtagacttgaggagtaagagtatgttttaggaaaagaaagtagaggctagagactggaaagtcattggaaagctatttcaatattattataagttggatctgaggtaagactttaggaataatctaaatattgttgctgtggtgttcttacagagcttggtcagatgtaaactactaatatcttaatacttacattaagaattaatgtaaattctgtccagttcagattattttattttatttttgatacagtctcactctgtcacccaggctggagtgcagtgatgtgatcttggctcactacaacctccacctcccaggttcaagtgattctccctcctcagcctcctgagtagctgggactacaggcacgcgccactgacttggctaattcttgtatttttagtagagatgggctcttgccacgttgacgaggctggtctcgaactcctggccacaaaggatccatccacctctgcctcccagagtgctgagattacaggcatgagctaccatgcccagcctcagacttagtttaaaagaaaaagaattaaagtgattatacctgagacgagtttccacaaacatttgtttaaaatttcacactggaaagttttttttttttttggaaagttttataagccatgtcattgtctcctcttcttttttttttttttttttttttttgagatggagtttcactcttgtttcctaggctggagtgtagtggcacgatctcagctcactgcaatctccgcctcccaggttcaagtgattctcctgcctcagcctcctgagtagttgggattagaggcatgtgccaccacgcccggctaattttatatatatatattttttagtagagacggggtttctccatgttggtcaggctggtctcaaactcccgacctcaagtgatccgcccgcctcagcctcccaaagtgctgggattacaggcgtgagccactgtgcccggctactcttcttttcactatttagagagcaagatgtctagggaatttcactgaagtgattgaggtgggtggggattccttggtggaatagccctctggactctgaggtggatcatatgtatgtattagtaaatatagcaaactggtttaattgatacatcctgataattaaatggtacataggttgactggtcagtaagttaggttaaataaatatgagctttgtcagaaaaacacaagttttcattaggtatatttatgttttatttactcaatacatttacatggtagtgttacagattatcttctgtgtacctgccattgcgttggttgcgtggtgttagtcgatttctgatattgaagtagcacagtcatacagaatattggcctaaagaaatgacagacaaactcagctatattgtctgtcaattcataggtcattttcctgtataccatttctgaatgatgactttaatcctcttccattattggatctttttggtgttacaaaacttgaatttaagaaaattgatattaattcttaatcatttgttaattttataaaacaggctgaaaatctttttttctgctggaatcaaatgagagtccaagtgaccacaattttctgtctttctttattatacctttatattgtagcaagttggtaaccatcaaaagtaacagcatctccactggaaattggtacacagtccacatggagttgctgttacacttgataacaccattaaacatataaggagattccttttgctcatcatgggagctgtacgatatctctaagtatacttgtttcacagaagaaagtctcgatttattcatgttctaaataagtttagggactggtagatttgaaacgctgatgttttattttgatttgaattaatagtgtcatttgcattttagatcatatttgtattttatcaagaaataattccatttctgactttactgtcattggtcattttttgaatctgtgagataatgccattagaatttgggttgaaatctgttactagtcaataaaaacagaagaaataatttttagcataaaaaagataaaatgtagaaacactggctacctgggaaggaaaagaagttggttaaatttctttcatcatttcaaacagttataatcactttcatgctattaatgctatagttaacatagtgaaacttagcccctaacttctggaaattatgagaaatttagtaaaaatagccaaggaatttccaatataatttgagtgttaactttagctacctcaaattttttctcagttaacaataataaaccttttgttcaaaaaatttatgttcattaaataaagaaaaatttcttcaaaatggttttctgtcagctttaaaacataaatctaggattaaactaaaaatagaatttccccttccaaatttcacattgttctagaattaaatttagtaaacaaatgtgaaacatttagcctcttacctcattcttcttccagtaagttacagaagaaaagttgtcttaataatcttcaatatttttgcttataaaggcaaaacacagaagacagtgggatgacagcagtcgtttctttgttgctttagtaatcttaatgctgcttaatgtccataacacgctaaataagcctcattccggttgatatcgaagttcagaatgattggctgatgtcatagttgctcatgctacctagtggattttcactgattgaaacctaagaagggacacgtaatgcatgtgttgagataaggcctttgagtaaagtacaaggttttatgatggatttattgctttatgaagtaaagcattaagatggaagcatatagattacatactggtaagtggtttcacccacttttatcagcagtcgtttatactgatctttgggttataggttaactatgagtttgtgttaagtatacaatgttaaagaaatgaaggtagaattcttaaatttcagacaaattaggaattttcctgcatttttttctgaagaatattaaatatcacaaggaaatagttagaaaattgtttaaaaatttttttaggaaacagaaaattatttaagaaatcttttaagtattatcttggtttcattataaaaaaattccacttctaagtatttacccaaaggaaataggactaatacctcttgtgtgaggatatgtatataagatgtccaatacagttgtttataaaggaacataatgatatacaaaagaagatgtaatttaattagttatagaagaatgaatatgtacctgttaaaaatgtcagcttagctcttaatggttgcctagttccttgtgtatgaaaatcaaatgaacataacttatccagtgtttggattttgttagatgtttgtcacatctctataatgagtgtcttttgagcacttgttcacagttaactttatatacttttttcaaattatctttttaga

SEQ ID NO: 1879666 - DNA, 4001 bp, Homo sapiens
attttgtacttctttaatcatggctatggacagtgacagggcaaaagcagtcattgactagtggtgacataatttaaaattactttttctgggaataaaaaagctgtctttaacaataaaaattaactccagtaatttcaacttaataaagttttaatttttcccactttcttatcttaaaaggtgtgatgatggaacattttcacccctaacttaagtaagaaccagttcagactgacacctaatggaaactattataggaaaataattctgcaaaggaaagaaagcaatgagataagtatttaaacaacaacaacaaaaatactttcagttaactatgagtagaggtttcctttagatttcatcactagcatttgcaattattccattctcaacattattcttcctctatgaagcaactgcaataaatttgcacaaaactgaatagaatagcttatttttcaaaagttcttcctcatctcctcaacaaatgccagagtgttacatcttctgtttctcacaaactctgtcaccaggacttcagctctctttcttcctttcaaatcctaaacacttattatttagccaaccagcatgaggccaactttccagagaccacctaggaactagagtatgtagcttctacttttctaatttcccaaggaaacaatgccaccagtagacatattgcattttgttaaatacataacaagcataatatttaaaagccctaaatcaccaactggtagatccctagagaaaaaaggtaattcatggaataatgaaggaaagaacaggagttacatattctcttgctggtgatagaatgtcgaatgcaaagacagcatctgtgttttctttcctacttcaactcattcttaaaatggactcgcccccgggagcttctgagaagggctccacccgttccctgcagacgacaatgttctttgagcgcaaaagctgtgagtatagataccctgggagtaattgtgggatcagacacaatggggtgggattaggggtaggcagagggtgtgtgtggagtacccttcactgggaatcctaaatattagaagaaaggcgaaaccctaggtggggaagcatgagagtgtgcctgcttccttcaagacacctcggtgtcagcctctccagggttcagactgctcttgtgggcaagagcccagtggggcacacgcacttcgtgcctgagaaaggcccatcctccagggggagaaggtatctgagatgtagctcagcttagagcggtcccagagcgacaagagggagagcttcacaggcctctaagtttatttgatttttctcctgcagtttccatttctcaggaattcagtcttcgtgcgtagcccgtgcacaaccaacgaccaccacgcagggaggaaacctggtcttagtgtttggccgcgctagtggaatcttctgggcgcctggtacgttcttgtccccagcactctgtccttccacctttgaagcgccttgataggacggtcccagatgcctcacaagaaggaaaggcaaggtgcaaagctggcaaagctgtgtggtccgacgctggcgagagctgagacctggagccccagcccacgccttccactctgggtcatccttcccagcttcatcttgggcatgccaactcctgccacgtccgattgtccccaggagtgcccaggcatgcttgaggggtgtggtggcggtggcttcctcttcgctaggaggtgacaaatccgtgttgttttatcgtccattaatatttgaaacaaacaaacaaacaaacaaacaaaaactctaagtagaaggagggagaggctctctcttgctcccacgccttcgcagctgacctgagaggggggacgtgccttgcgtttgttggtgtttgagactcgtcctaaaggcagaggcagggaagacagcgctgaagaggcgtcccaaagagattggacgtctgaacagtcactgcctgccccaacctctttcaggaaggttccaggtctgtgccacactgcaaccaatccggttcccatcctgtttctccaccccttctcggagaatccgaaaagaaaatatgcgttcctgagagacccgccacacttccgatctggaagttccgcggggacccagcccccgggcccccgccccctccccatctcggccgccaagtctggttgcggagcagcgcggccggccgggggtggggctccggcaccgccccgggctcgggattcgcgaagtcacgcgcttccgcaggcttgcgggggcaccttcgcccacggacacgccctttctgcggaggcagcccccagcgaccctctgcccagcttcggcgcctcactcgcgacgctcccaaactgctcaaggcctttcagtcgttcccaactttagaaaatcgccccgtccgcgtctctccctccagccgcaccccaccgtggagaggagaggagcggactgggaacgccgaaccgccccgcaggctcggggaaacggacccccttccgctccccgcccatccccttcacctcgccccccgccccctgcgcgaacccattttccagtcctggtcaccagaggcgcagcgcacagcctttccggtggaaccagtgcgaaaacacccgaggaaatgaaaagaacaagaaagtgctaccttggcaaccacgggcgtttagtggccagctggtgggctggggagggcggccgctgcccccctgccgctggtactctcctcgactacgcgtattcttaagcaataacaacgtaatccgtattatccacccaagaatacccgtcaccgaagagagtcagaggaccaagctgccgctgccgctgctaccgctgccgctgctaccgctgccgctgctactgccgccgccgccgccaccagaactcttgctgctcgctgagcccgcccctgcctggggatgggctgagcttgaccgggaccataaatccataactcgatttccctaaagaaggatccaaagctgtgctcggctgcttcctgcccaaatccaaatggccgctctatttccaattctgaaagacaaatcacaaaatcaaatacttaacacagaagagtgctgtctttccagtgaggagggaagatgtggcaaggctttttgggcacaagtgggagtgacaagtaaccttcagtttacctggtgctctcccagtgctttcctctgcacttctctgcttggtacccagtctggtctcggccagtccactctaggtggtatgattgagtgccatggcggccagagaaccctgtaagagacgtgaatagttacccacacaaatacaaatatatttgcctagacggctttgggaagaagtgaggcttaaataaagataggtcatgcatgggtgaaattttcagtagtgtgttttggaaatgcacttttctcaagcccaagatcatggaaaataaacactcattcaatttactacttgaaatcaaatacttatagatgtacaaaaataggcgtctttcctttgaaggccttatagctatacaacataatgatttttaaagaaaaaaaaaagcttgaaggcacacagtaattaaacccattttccatagtgtcaaaactcactgagttgacaagctggtagactttctatgatttaagcatcattttatatcactacaatgtttaatttcatagcacacttttaaaatatatactataaatgcattgctgtacagctgttgtggacacctctacagaaaaacctttgaagctctgtgttcataaatattattttaagaagaaaaagccaataaaaactcatttgcaaagtgactgtaattttggcattcagagagagaatctctgtgattctttgatgatcaatatggctcttactggaaaagctttgtcttaagatcctgcagtggatattctgataatgggggtttattgttcactaaataaaatggacaagtgcaacgtcactacccaagacatggtgtagcttccttagaaagt

SEQ ID NO: 1879667 - DNA, 4001 bp, Homo sapiens
ggcttagaaatggcttcctaggtggctgatttgccatcatttattgcaagccactggcttaaaagagttctactgagggtagttcatagtcatgcacctcctgtgcaaaaagcctgatcaaggggccacagcccgccttcctgaagatcctacaagcttgatcccctatcaaatcaaatctggctaatctctgaatagctttacaaaactggctcactgggccaggcgaggtggttcacgcctgtaatcccagcactttgggaggctgaggtgggtggatcacggggtcagcagttcgagacaagcctggccaacatgatgaaaccccgtctctactacaaaatacagaaattagctgggcgtggaggtgccacgcctgtaatcccagctactcggaaggctgaggcagaattgcttgaacccgggaggcggaggttgcagtgagcggggacagtgccattgcactccagcctgggtgacagggtgagactccgtctaaaacaaacaaacaaacaaaaaaaaaaaacaaaaaaaaactggctcatcttgttttgaagtgttgacataaactaatagtcaaaagcaccactcaatcttttataatgcaagtgaaatcagtgctgtgccccttcaaggaaccatgtgacagtatgtttagttgagcaccagttccttgcaggaacagttgctggcagaagggctgtgtctacagcccatgtggaactaaggagttttcccattcagtagggagcatccctcagccttgatcttcaacatttcttctcttccctaatcttttctctcattttatttcttggctcatagaatttcattcttctcttaatgggcttcatttttaatgtctggctggctgtaacctacttcaaattctttatgaagtaggcaagatctgcacagccaattaatttttcaggacccacttcttatcatcacagaattatgaatgggaaataatagatgaaaaacacagacatgataaactgaacatagtatttattaaggtcaggatgcatgaatagactcttctcaacagaaagataattcaacagcaatcaatttacagaatttagaacagcactacatttcagcaaaatgcaactagagaacatcagataaattatagtaatttgtttttaaaaatccattaaactatctcttacctctgcaataatgtatcatacatgcagttacagaagttagtagggaaaagcatgatcttccttccctattctctgcccatccatcttccaggaaaccacaggctgctgctgcccagagttggcatgaggcttcgaggctgctgcttttccccctacatcataaccgatttcaaatggtgctagacaaaaacagactctgaacaccaggagaaatcggtcagcctgtgtaagagatgggccagtggtgctcccagggtctgcacctcgacagtccaggtggcaagtctgatttcgggtgccccgcaatcaacgccgaatactccagggcatcctctaagagcagactgatggtgtcgatgtggacaaaatggtcctccaggtgtactgccctctcccctgccccatgacaatcgacacccaatacattgttatccaacagaatatgacaatcgccacactcaaaggccctacgaacacattcatgctggtgatggctgctaggagtcaacagaaatagcatcacaacctctgcccctgctcaagccactgtgtttattttaaacacaacccccttctctactgtcacctctcccaaaacccaacaaactcaagagtgtattttgctcttcaagttcttccctggacttctcgaacagactcaagtggcaagaggagaggagccagttccatgagcagcagttcctctgcagtccacccttggctgtgctgcaattcttactcctaaaacactgatttcaaatggtgctagatacaaagatggaaaaatctaagccaccatgtgaaaccagcttccagaagaagaggatctcaatgaagaaagaagggagattcaatcggaagacccagcctctgccctgaggagaaatatcttcttgtagttctacttgtgatatgacacagtgctccatgggaaaggcacagaggaggttacacagggctgcacaaggcaacatgaaaggcacagctgatgcttcaaatagatgagagcaatacaaaactcattaattctaggttaattctatttaacttcacaccagtcactacaaattattatatatgatgaaataaaagctaaaattattactaaaatacattaatatttacatttgtactgccctgcatttgtatagtatttcacagtacacaaagtgtttccagatatattctcttacttcatcaggacacaagcaccctatctgcctgtggaatgaagctccagctgctacacaaaggcgagtctcacctgggccaggacaactcttttatgtgtcttaacttgagaaaagcatgcattcctccttcccaccccatatgtaagtatcagaacattcaaatatgaccccatgaacctgcaatcttatttaaccccgatgtgacttcaaaaactggtaccctataattgtattaagcagataatcctctaacgtaagaattgagttttattttcaaagtctgcttgaaaataagatttgcacactgtattccaaattagatttcccatctccttactgcatcatcttttttggtggtttgaagctaagaaaatatgtgtatttcctctgataccataaccaagagaaaagagacagagtagacactgtatattttagcttcctttcaggcctctagatacagccttataatttttatggttcctggcactaacagtatgtgttgctagaaggagaagaaatagaatttgaacatcaaaagttgcggtgtttaattctcacaacagtcgtatggggcaggtattattccaatttttgcgaagaaattcatccttaatgaggctaaataacttgtctgcagtcacacaaccaatcaatgcagatcccaggtctaactccaaagactgtgtttctgcccttgtatccactgcagcctgctccataacttgactatcatctcattttgttcttgaacttcattaagaacaaaacagggtgggtggggcaggaaattcctaggcgatacttctgcactgaatgggatcatactgactacataacacgttatacttagggggagacaggagcatcatctgggttctgcgaaagccgggtggtctggggcagcttgctttgttctcctgctcctctagcgcctttgccgtctttccccagcatgtggctgtgggaaagacactgaagatgaacctgcaacaagcgattctgacaccagcgctaggctctacagcccacgggggacttgctagcctcagtcacaggtgggagagctggggcagatctgcacacaagggctctcagtgatgacacctgtagccaacacctggggcttgttaaccaggtaacagccagggttgtaaggtcaggagtgagtgtttaaggacagttactactgggagtccaaatcctgtcaaatgaggggatttgatgagattctcacttttctgcttttcattttagccactcttccttatcaacttttagttaccagtaccccctccctatgagctatcacacaggtgtcccgcagtgatcagaaagcaccttcctccatggcgaggtcctgcctgcctaagctgttgtctcttctggaatactctccttcaccctcccttggctaccacccctcagccccgcccccacccaccaccactccagggaacctgtcatcctccccgcagctcaggaaagcctccctgagtccagcccttgctagaaggttaagtggtcctcgccagcctcaagttctttccttcaaaaaccacttatctcacttggtcatcagtgtgattatttaatgtctctcctgctacccgtaagggaccattcg

SEQ ID NO: 1879668 - DNA, 4001 bp, Homo sapiens
aatcctgtttgaggcaccgcagttacattttgcttctcacgacttagcagtgtggcactatttaagcattcaatgagagtgctataaacttcttttatagaaaagacgtctcaaatcattgtttttgtgctttaatgctgcactcaatttcacacttactcgtttgaggactggaatcagggcctcctgagagcaaaaatctgtcgtctgtatttgcaacacctaggctggagctttgagcgtggtgggcggatcaaaaactgtttaattggtaggtagtacaacagaccccaaaaatgtctgacctataggtatttaatactattgtagcctatctcagtgggaagtgaacaaaacaatataacttagggtcttaactaacaccaccacttagggtcttcccaccacatcctggggattagaacatgggttcttccatcaacagcctgaaatagcactgcagctgcagtgagggggtgcaacatatgtactggcaagtcttcccagcaaatgctacttccgccccccactctcagcccactgggcagggcagccatctagaggaagactgtggcagggggttgggcttagaaatggcttcctaggtggctgatttgccatcatttattgcaagccactggcttaaaagagttctactgagggtagttcatagtcatgcacctcctgtgcaaaaagcctgatcaaggggccacagcccgccttcctgaagatcctacaagcttgatcccctatcaaatcaaatctggctaatctctgaatagctttacaaaactggctcactgggccaggcgaggtggttcacgcctgtaatcccagcactttgggaggctgaggtgggtggatcacggggtcagcagttcgagacaagcctggccaacatgatgaaaccccgtctctactacaaaatacagaaattagctgggcgtggaggtgccacgcctgtaatcccagctactcggaaggctgaggcagaattgcttgaacccgggaggcggaggttgcagtgagcggggacagtgccattgcactccagcctgggtgacagggtgagactccgtctaaaacaaacaaacaaacaaaaaaaaaaaacaaaaaaaaactggctcatcttgttttgaagtgttgacataaactaatagtcaaaagcaccactcaatcttttataatgcaagtgaaatcagtgctgtgccccttcaaggaaccatgtgacagtatgtttagttgagcaccagttccttgcaggaacagttgctggcagaagggctgtgtctacagcccatgtggaactaaggagttttcccattcagtagggagcatccctcagccttgatcttcaacatttcttctcttccctaatcttttctctcattttatttcttggctcatagaatttcattcttctcttaatgggcttcatttttaatgtctggctggctgtaacctacttcaaattctttatgaagtaggcaagatctgcacagccaattaatttttcaggacccacttcttatcatcacagaattatgaatgggaaataatagatgaaaaacacagacatgataaactgaacatagtatttattaaggtcaggatgcatgaatagactcttctcaacagaaagataattcaacagcaatcaatttacagaatttagaacagcactacatttcagcaaaatgcaactagagaacatcagataaattatagtaatttgtttttaaaaatccattaaactatctcttacctctgcaataatgtatcatacatgcagttacagaagttagtagggaaaagcatgatcttccttccctattctctgcccatccatcttccaggaaaccacaggctgctgctgcccagagttggcatgaggcttcgaggctgctgcttttccccctacatcataaccgatttcaaatggtgctagacaaaaacagactctgaacaccaggagaaatcggtcagcctgtgtaagagatgggccagtggtgctcccagggtctgcacctcgacagtccaggtggcaagtctgatttcgggtgccccgcaatcaacgccgaatactccagggcatcctctaagagcagactgatggtgtcgatgtggacaaaatggtcctccaggtgtactgccctctcccctgccccatgacaatcgacacccaatacattgttatccaacagaatatgacaatcgccacactcaaaggccctacgaacacattcatgctggtgatggctgctaggagtcaacagaaatagcatcacaacctctgcccctgctcaagccactgtgtttattttaaacacaacccccttctctactgtcacctctcccaaaacccaacaaactcaagagtgtattttgctcttcaagttcttccctggacttctcgaacagactcaagtggcaagaggagaggagccagttccatgagcagcagttcctctgcagtccacccttggctgtgctgcaattcttactcctaaaacactgatttcaaatggtgctagatacaaagatggaaaaatctaagccaccatgtgaaaccagcttccagaagaagaggatctcaatgaagaaagaagggagattcaatcggaagacccagcctctgccctgaggagaaatatcttcttgtagttctacttgtgatatgacacagtgctccatgggaaaggcacagaggaggttacacagggctgcacaaggcaacatgaaaggcacagctgatgcttcaaatagatgagagcaatacaaaactcattaattctaggttaattctatttaacttcacaccagtcactacaaattattatatatgatgaaataaaagctaaaattattactaaaatacattaatatttacatttgtactgccctgcatttgtatagtatttcacagtacacaaagtgtttccagatatattctcttacttcatcaggacacaagcaccctatctgcctgtggaatgaagctccagctgctacacaaaggcgagtctcacctgggccaggacaactcttttatgtgtcttaacttgagaaaagcatgcattcctccttcccaccccatatgtaagtatcagaacattcaaatatgaccccatgaacctgcaatcttatttaaccccgatgtgacttcaaaaactggtaccctataattgtattaagcagataatcctctaacgtaagaattgagttttattttcaaagtctgcttgaaaataagatttgcacactgtattccaaattagatttcccatctccttactgcatcatcttttttggtggtttgaagctaagaaaatatgtgtatttcctctgataccataaccaagagaaaagagacagagtagacactgtatattttagcttcctttcaggcctctagatacagccttataatttttatggttcctggcactaacagtatgtgttgctagaaggagaagaaatagaatttgaacatcaaaagttgcggtgtttaattctcacaacagtcgtatggggcaggtattattccaatttttgcgaagaaattcatccttaatgaggctaaataacttgtctgcagtcacacaaccaatcaatgcagatcccaggtctaactccaaagactgtgtttctgcccttgtatccactgcagcctgctccataacttgactatcatctcattttgttcttgaacttcattaagaacaaaacagggtgggtggggcaggaaattcctaggcgatacttctgcactgaatgggatcatactgactacataacacgttatacttagggggagacaggagcatcatctgggttctgcgaaagccgggtggtctggggcagcttgctttgttctcctgctcctctagcgcctttgccgtctttccccagcatgtggctgtgggaaagacactgaagatgaacctgcaacaagcgattctgacaccagcgctaggctctacagcccacgggggacttgc

SEQ ID NO: 1879669 - DNA, 4001 bp, Homo sapiens
ggaattacagacatgagccaccacatgcccctgccttttttttttttttttaattaaagaagaggtcttgctgtgctgcccaggctgaagtgcagtggcatgatcctacctcactgtaacctcaaactcctgggttcctcccacattggcctcccaaagtgttgggattacaggcatgagccactgcgctgagccaaggtacttcttttaatgtgttcctttaacaccctgtacacattcccacgtggtggtacaacctttaagtatttgtatccccaactaaattgtgaattccttgaaaataaggactgttttattcatgcttgtatccccaatacatagcacagaactttaccctcagaggatgctcagtgtttgatgaataaataatgattgacagagaatttggattcagagctcatagtacagagttctctgcagcctcacatgacccccaacaaacatgaatgctactgctcttaacactactactggggagagaaagagtcctctgattactatcgtaaaaagagaaggtcacttaacacaaatatgggacagagaaatgacggggagaaggagtatgcaacttggcaatgatacctaatctctccctttaagggcacaaattccacttctcacacagacacacagacagcaggcatggagttcactttagcacctctactcttcataaggcatttcagacatttttttttcccttctaaaatttctgagctaatagggatcctggagaacatactgtctagtacactttcctcatttgacctttgagaaaaacagggtccagagagattagggtaacatctcaccccagtagctgaatctggggaaaagttccagtttccagactttaaatccagtgctctataatgatctggctgcctctctgccctcatcaagctctgcccatccaaaaacctaaggggcactgtcttgctggatgggcatcctcagcagctcacagacctggccctgctgaggctgtgcgatgatgatctgcccaggctggatggtggtcgtggagctggtggtctgctggccttgctgctggccctggacttggacagcggtgggttgctgagccagcgtgaaatagtactggactggctcggcaggagttacagactggcgcacctcctcctgttgggtggaaagagaggcaggtaagaggaaaagaaccaactcagcagccgccacagtgaatttccactcttcccccaaacaggctatgtgcagttgcctgctgaatgctgagctctccacatttgaagccaaaggaaagtggaattcaaagagaccagttatgctaaatcaaactaaaaataacagatcctataggcttcacaaaacatacagccaatttctgaagtacgaaataatcacccattgcatgataagttgcaaacgggcaaataagtaccgtaactaaaaaccacacaccagcagtgcttgtcagtaaatgctgtcaaggcctgtgatctgagaacagtgctaattgcaagtgttgggaagatgctacccaaacatcatgcctctcaggcctggtcccaatctcccaaataggcagcactcttctcgttttagccccaccacttcaagggggacagaacaggttaatgggaaacagggcttttcctgagctgaaatttcaggatcgagagcactggtaggcaagtacccagcttttcacagcttgttgaaagctctgtggtcactgagggcatgtctatccagtgtcacatctggttctggttgtacttagccacagaagcgcaacccagggggcctgatggacagctctccgctggggtactgccttggctgattagggaggtcgcattctgtccgatctgcggagtggagactgttccttcttcagctgatgttttccatggcagaaggagtaaacaaccctctcccagccaccttgagctcacagctgagagtgtaggatgtttacacacactacagcatggttatagcccacagggtccagggttgatcagcccctgaccactgacacagaacggcgtctgatccggagtgacctgtgtgacacatggtgcccctgcctgggacaacaaaaacaataaaaacacagaaccacttgggctggctgagtaaaaatattagctaaatttactcatgtccttattcagggcaaagtttgccacgttccagaaaagaggaaaagacacttcttagatgtacacagaccctgtggattgcctccaactccccaaagtaacatttacaaagctggtattgaccccatccccacactatgttaggtgccctcaactgtgcttccaaagtactgtcctcacagtatacatttttgcacttgcatgtcaaattaactgtctgttctactaaaatgttaagcaccatgagggcaaagcctagctctctcttgctctctgctatcccccgcgttcccaggtaggcactcagtaagtgcgtgatgaatgatgaatggatttagacaggcagacagttagaggcaggaaagtagttctctgaatccaacttgctgatatgacaaattctcttaaacccaacagctgttaccaatagaaaaaagtagtctctaaactctcttttggtacctctaagactctgtggccacagtgtgaggaagcagctagtgtcccctgtggaacagagctgagtatcctttgtttgcctgatgtctgggggctaggatactaaaactaggactgccagtatctacccctgagaaacatgggtctctgcatgacatggttacttgacagccatctacccagcttagggagatacctgtaacattctgggtttctaagttaatatatgaactgactttttaggttgatatagtctgtgcttcagacacaaatagttttaaccctcaatatgattatgctaaggcagaaggaaaaggagattcccttttattttcatctaggtctcaatttccacaacaatttcaaccccaacttatcatcattataaataaatgtcagcctggaaactaggtattggctgtggcaaagctaaaatactgataccttttgcagccaagaaacagaagccaactgctctttgcaaagctattgaagtaggttcaaggtacttgtgttccactgagatctcccttattattttacaaaaagcacaaatcactgaaatccagacctaacttggaaaagctcttgggtaatgagagggtatacaggaatgagagcctcagaaccagctgtgtaggaagctaggcagcagggagacacctgcattttctagccgtgacctgtgattgtttagtctccagttatccccaactacagctgatctagtattgaatatgatctttttgtcagacaaaaagcaaaccctttaaaaaccccttccagaacccaaaatatctcttgccaaaagctgtgagagcaggacaagagctcctcctatgctgcttactacatcctcttaaactgtttatgaactagacagtatctaggacactgagaatcaagtggaggcacctaggtttgtgttgttaggacaaggcacaactgttctcaaatcactggaatggaagaaggcatatctaaggctcttctgcattatgaagactcattctgccaatggaggtcaagccagcaaggaaatgattatgcttggtttaaagaaatgggtgaaaagataatgacatttcaatgggcaggaactttcaactcaatagctttagtggggcagaagtcaggcctcaactacctcctaccttcaaataatctttacttgcttctctgaagaacaagcgaaactctcaagtatctttgagaagtcagggccttggactcacaattcagtatttctgactagttccttttcccagcagtgggaggttgccccaagtggcagaacaatgctttaatgactggatcaatccagaatggggcacttgctcaactttagcagtggcctccccaactacaggg

SEQ ID NO: 1879670 - DNA, 4001 bp, Homo sapiens
taaggcagaaggaaaaggagattcccttttattttcatctaggtctcaatttccacaacaatttcaaccccaacttatcatcattataaataaatgtcagcctggaaactaggtattggctgtggcaaagctaaaatactgataccttttgcagccaagaaacagaagccaactgctctttgcaaagctattgaagtaggttcaaggtacttgtgttccactgagatctcccttattattttacaaaaagcacaaatcactgaaatccagacctaacttggaaaagctcttgggtaatgagagggtatacaggaatgagagcctcagaaccagctgtgtaggaagctaggcagcagggagacacctgcattttctagccgtgacctgtgattgtttagtctccagttatccccaactacagctgatctagtattgaatatgatctttttgtcagacaaaaagcaaaccctttaaaaaccccttccagaacccaaaatatctcttgccaaaagctgtgagagcaggacaagagctcctcctatgctgcttactacatcctcttaaactgtttatgaactagacagtatctaggacactgagaatcaagtggaggcacctaggtttgtgttgttaggacaaggcacaactgttctcaaatcactggaatggaagaaggcatatctaaggctcttctgcattatgaagactcattctgccaatggaggtcaagccagcaaggaaatgattatgcttggtttaaagaaatgggtgaaaagataatgacatttcaatgggcaggaactttcaactcaatagctttagtggggcagaagtcaggcctcaactacctcctaccttcaaataatctttacttgcttctctgaagaacaagcgaaactctcaagtatctttgagaagtcagggccttggactcacaattcagtatttctgactagttccttttcccagcagtgggaggttgccccaagtggcagaacaatgctttaatgactggatcaatccagaatggggcacttgctcaactttagcagtggcctccccaactacagggcttgctcttggaatctttccagaagctgagactgacgaacagtgccagagaagagcagcatcacatcctagggccatctctacagtgttgtgcaaccagccctgactggaaaaaagtacattcgctttagtagcaagagtgaactgctgcctccttcagaaagggtgggttttggagagtaggcgttttaaaggactttaggaggtgccagccaatttgaagcctgggaaaacttcatgtctacagaggattaaaaatgctatcttagaatttcaggccagctttcagcaatctcaacctttcaaaggccaggcagcagctgtcccgaatacgatgccaatcaatgcctcgaacacctacaaagaactaaatccaagcaacaagaagctgtttcagctagacacactttaaaatcagatggatcatagcattttgagtctggctaagatggaataaggagctgtatgacaccccgagagacccagaagcactgaggaatttggaggaactgacaggatgtgacccttctctccagccagtgtattcagcaggcagcccacagaaaacaaggagttagcacaatgagagtgagcaaggcctgatttcatcacagagctcacaatcttgttttaaagggggcttctgatagacaaaaggagaaaacaatttcaacaaggaaagcaggtgtatgatactctttgttctgaaggaagataaatggcctgagttcttgttgtgacttctgagagaggagggaaggacccccaagaggaggaattgagcctgtgggcacaaacctgcaatgtttcaaagccggtgcgtagctggggacgaccgtggcagcctgccgctgtaaacatccgactgaaagctcctctgaacaccttacagcttccagtcaaggatgtttacagtagcaaagactgcccagaaagaacggagacgcagtgaggcacaccctactctagtaaggaggtgacagagggcttgctaatccaaaggccctcatgcagggtcagaattacaaatgttcattaggatgcccacttctcctagactttctctgactggttattaatacaggctgggatggggagaatggctgtcactgaatgactgcttctaaggataatatactatgaaataattcattaaaaataaagttttatataacaaagcaagcagaacaaggcacagctttgctcctgtgagattctgccacaatttcccaagtggcacctagtgaatcatgcaatctgcatgcttaaaacaatgagctctaaaggacagaggtctattacaatcacaattaagagctatatgcacccaaggtgctgaaaaaacaactagtgtgacctttggagaggggcaggcagaagagacgggaaggcagacgttcatattctttcttgtgattgcttgcaaaacagctcaagtggtggttctcaaatctgactgcacattaaaagcatccagggagttttaaaaggtactgatgcctgggctccatcatgagattctgattcagctgatgtgggttagagcctgggcgctgatatttttaaaaccccaacaggtgattctagtgtgcagtcagggtactatataaagatataatgaaccacaatatagaggaagagaaaacatagtccattcactccaaatgccactgtgcacatagagaagctgtttcttaaaaatctaaaatctataactttctgggaatattctcctatcccagatgaagagctctgatagacttcctaagataacttgaaatgagcttaactttaccatttgtaactaaagtctttcattttcattttgtctattttcactgaaataccacttcggaggcactgagttaaaagtatccagaaatgagtaacagaaggagatgttaagaatgaatctggtctagaaacgagaagcaaaaggaatagcaaatgacttgtgctgagagagaaggagcgtatctgacaccagtatacaaagcgctcttcagtcagcagcaactgcaatcccttcacagctcacctgacgctttggaggtttcagttcatctcttggaacaatatcgatgagaaaatcaaactgatcaaattttgtaattgccatggcgatatcatttctctgtaacaaagaagagcggtgtgaaaaattagcctggggagaaactagttcacttggctttataccctccaagtaaggtaagacgacttttaagccaaactaaacacctacgggcaagtctacagctgaaataagcacagccaaactcatatactttaaatgatcagacctggtgggcaaccatcaacaaaaaagaaagagatacatgtaactcacactgtaaaatggggtatctgagcctccaaccactgctactcctgcttgatcctctccccgcgattttcaaattacaaacctagtaatctcaattagcaggtttctggtcattctgtgggttagcaaagttaggtttataatctttttaaggccctaaataatattttccctttggttcacaagtattgaattaggtaaaatcctaattcaataactttttgcaacattttcaagtcactggatctatatacactaagttctcacaagctatgatttttatttgggaattctaaattgcaatacttaaaccatgggtttatcattgcagttctgaattcccaaataaaaaacatagcttgtgagaattctgatattcatagtttgtgctatgaacagcagcaagagaggtaagagaacacaggagtcagaaggctaatgatactgaaaccaagacctgctctaatgggggtttctctccaagtgtgatacttcctttctttgaataataaaattaaaagatttttactaaaacccaacatattatgtatagttaagatttgtgtactttactaaagattta

SEQ ID NO: 1879671 - DNA, 4001 bp, Homo sapiens
aacgaaaagagaattgtacaacctcctatacttcagagtttttaatttctagggtaaacactattttaaaggattctaagggtgtaaggaatagtctttgcactaagaagcaagatccctgggttctccttctccagaactgctggtgtattgctggtcaatctatttaacttctttgggtttcagatcctaatccataaaataagggagataaaatactgtttgaaggcaggaagttagacaagatgacctcaagttctcttctagctctaagatttaggatgtgtacaccaacttgaggtgggttttaagaagtcaagatatgatcctggcaccaagatacccatgagggtcatctggcttcattaagagaagaatgttgatctcttacaagcacatttctaaccctgattgatcatttcacaaatgcatgcttctgaacgtgacaaagattggaagagagatcttgaaggttttacaacagtcaccatcattcctggaaacacttaaaattcatgttctactaacagtaatcagcagcacacttttatatgaaagtctgctttcactttcagcaatatatgatattgtttacttaatgcaaaagagcaaatagtcacacacaaaaaaaaaacagaaacaaaaaacaagaaaactcaacttctttcttcaagattagaactctaaaggccatccctgatcttcaacagttccatggaagatctaattgtgcgtcatttgatgaaaagcattcttcaaggtttatatgccacagatctagactctgaacagggtttaattctgctaagataaccatgtactgattatcaacctgcaatccttgggacagcatttttaaaagtctgctcctaacattctggatccccttattactaattgctgtattaacaatgaactacctttagttcaagagagtgaaatagaaacagtcccaggacctgttatatgcaaactgcaaaacaaataattttaaagtagacttaagacagttgaaaagtgacaacctccaaaagtgaagtagtgcctattccaattctatcaaaacgtatctataaaccagctttgagcaactggaacaaaaacatccttcaagagacaaaggatgaaatccagatacgttattttggattgctgggataaattttaactgttccagatggtggcccctataaattctttactttttcctagaagtaaaaatctcatactgtttggtctgaacagaaaaaagtatttcagacttttcaaaagacatttttcacatgagaaacaaaatgtttaaactgaagaatgattaactacgtaatgttaactgaaaaaaggtacccaataccctgtaacaaccatttttaaaaagatgtcacttgcccacatagttcctctgactagtcctagaatgcctctcagtcccgtttgtttttgcttttagacttttgagcctgtgacttttcctctctgtgtatactgctgtatttctctttaagggtcccatgattcctaagtctatgttctatatcatgtttactattaatagaaaggctgctggggagaaaagtacccgccatctcctcgaaaacacaaagagtggagggctgagatcggcctgaggacttcaaaaggttttgcttgcctttgttctcactacactctctcctactatactattatgtcctgtgggttaaatttcacctgcgcttctggctaaaatgtggataccacagccaaaaacacttgcaagcatcaattcctacttggcggctcttgctactaagtggcaagcatctaatgccaccctcacctgatgcttggccgtctccataccctccagaactgtcgtcttgaagtcctcctgcttgccctgtggaaggaaagaggagaactcagggaccttactccataaattaggataatatctggacataaaggcctaatagttggcgactcatgaattcaccaccaactagtaaacccatattcagagagctccttcttctggaatcaaggcccagggaattacatcatagtcttccaaattctggtcaggaagtttcaactttacatgttgattcttgttgaaaggcagtggaacaaagtacatagtatttctaatcactaaatccttgctgtcagtcttatttaatattaatagtctggatgggggaaaatggattccgagtgtcttttactaacggctgctagactgaaaatggagctgacatagactctagaatctggcattgcaattcagcatcaacttaatatccgtttaactttctaattttaatgaaaaattatctccttctcttcaaagcaaggagtataattaaaagactcagtctccaaagaagtttcatttactatacacagtagacactagtacagttaaatatgccagtgcttcctaaataaaactaaagaacacacaataagacactgtgtgtgtgtgtgtgccaagtactgtagataaacacacacttgtggtaacacagagaaaggcaggcaagatcttgaatcttctacttcatgctacataataagctttgttaagaaattttcctcactgattaatatgtagaagtaacttcaagaaaagaatcaaagcttgaaaattcaatctgataaagaatagattgtcttctgaactcttccaaaatctatcatcaagacagatgctatgatgctcttaagcttctagtcacctggtacactataggaaaatgagtgtgatctttggaagacataaaataccacctcccaatgatctagataaactcagacaagcttcattaaagtttattttaaaatacgtaccccaataagaaagcagattgattattccaccatttgagttagaagggaacaacaaagagaataaaaagatacttagatataagaaattatttctgacaatgatattagaatgtgttgctagaagatacatgctctgttatgaaggtagaatagaatctcattctaaacttattttactaagctctcgtctgaagggtcctttaggttcaagaaggttatgcttctcagacaaggcccaaggtatacctatttacagcccttggaaaaaggcatacaatcatgaagagacgatcgggttactaaatccaatctgcaaacttatcttgaaaatataggtcctacattttaaactctactataaacttaaaatcagatatattcactcttagtaaattctggctttattcataaaaaatattttgtagagccgggtgcagtggctcaggcctgtaatcccatcactttgggaggctgaggcaggcagatcacttgaggtcaggagttcaagaccagcctagccaacttggtgaaaccttatttctactaaaaacacaaaagttagccaggtgtggtggtgctcgcctgtaatcccagctactcgggaggctgaggcaggagaatcacttgaacctggggggcagaggctgcagtgagtcaagatcacaccatcgcactccagcctgggcgacagagcaagactccatctcaaaataataataataggccgggcgcggtggctcacgcctgtaatcccagcactttgggaggccgaggcgggcggatcacgaggtcaggagatcgagaccatcccggctaaaacggtgaaaccccgtctctactaaaaatacaaaaaattagccgggagtagtggcgggcgcctgtagtcccagctacttcggaggctgaggcaggagaatggcgtgaacccgggaggcggagcttgcagtgagccgagatcccgccactgcactccagcctgggcgacagagcgagactccgtctcaaaaaaaaaaaaaaaaaaaaaaaaaaaaaataatatatttcatagatttttaaaaaatgttgccattgtttcgtttggttccaaataaaaccaagctggatcagaaaactgaattttatttgggcaagaaagggagcagggagggactcagaacaatgaaacaaat

SEQ ID NO: 1879672 - DNA, 4001 bp, Homo sapiens
tgaagttaatatttatgaaaaaatatataaaaggcaaataccacaaagatttcagaactgctaaattaatgcagggttatgctttgccattggtgagtactgtcttttaaagagttttattttttactgatgtatactgcacaaaagcaaagtagggctgggcacagtggctcacgtctgtaatcccagcacttttggaggccgaggcaggcagatcacttgaggtcaagagtttgagaccagcctggccaacatggtgaaaccccatctctactaaaaatgtaaaaattagccgggcatggtggtgagcacctgtaatcccagctactcaggaggccgaggcaggagaatcacttgaacccaggaggcagaggttgcagtgagctgagatcagccccctgccctccagcctgggtgacagaatgagactctgtctcaaaaaaaaagaaaaaaaagcaagtagaaatacctattattctttataaagttctattttcaacccccagtcagcataattcaagccaggaatttaaagacagaatgtgcatgccaatttctttaagcattgaaaatcaacattcttcaaacagcttaaagcaacatttgcagggctaaaaattgggtttgataggatttttaaagagatattactcaagacctaaatataatcttttgtagagattagagaagaataatacagaagcctcagattcaaataacatttactgaggtccttttcttttccttttttttttttttgagacagagtctcactctgtcacccaggctggagtgcagtggtgcaatctcagcttactgcaacttctgcctcctgggttcaggcgattctcctgcctcagcctcccgagtagctgggattacaggcatgcgccaccatgcctggctaatttttcgtatttttagtagagacagggtttcaccatgttggccaggctggtcttgaactcctgacctactgaggtcctgttctgttctagtgctcttatattcaaaaagcaacaggcaatggcgatggcagagaggaggaaaaatgatgtaggaaatgaagtgacctatccaagccccaaagctaaggaagcggaggaagtatccagagtcagacttctgcctcctggtccagttctcgttttaggacattatgatcccttgccttctctaaggcttaatgagccagatctgctgagagaaagaatcataccatagcctgtgaagtctgcatctgttgaatggtatgatgaagctggtgctaatggtatctcttgtgaactgaaggagacttttgttggatatttttgctgtttcatctggctgacagcctacaaaagaaaggaaaattagatgaatatcaaaaaggagaaaggtaacaagaaaatactttaaaactggtgtattgttaccaaaacaatggtgcagtccaatgatgtcttttgagaatataaggttggagggtggcaagaagttaggatgatttatgcctcgttcctcattcttccctatttaactttacaactaaaatgctttgatgaagggcagatcaaggaagggaggaaagataaaagctgaagatactctgtcagtgtgatctgtacatgaagctgggggtgggaggcaaaacaaaaattatcttgcaatttctactcattctgatgaaatcagcaagaagcccctttatctatggactttgaagtgacttatctgtgttgtgcacattgaaaaacaatctacgctggggatgtttagagcatcaacactgtccatttcttctggacacactagagtcaaagatgcatttggtaggttaattaagcaaaatgaggggcagacaaagaaaaccaacacctactgaaagcctactaaatgccagctacatcagtgacatttaattcacataaaggaagcatagctcctttattgagtccctactatgttccaggcacctacgatacccagtgcctggaacatagtagggactcaataaagtgcttgatgaatgaatgaacaagaaagaaagaacaaagaaaagcaaaactgaagacatgagtaactcagggtagaaagtgaacttgcaattcagtgaaggtacagggacctctactgtgtgagtttgggaaaaattaacttgtaattctggatttttgctgacagtacctccaatgaatattaatattaaaaaactaaggggccaggcatggtggctcacgcctgtaaacccagcactttgggaggctgagatgggcagatcacctgacatcaggagttcgagaccagcctggctaacatggtgaaaccccatctctactgaaaaaaatacaaaaattagccaggcgtggtgatgcatgcctgtaatcccagctacttgggaggctgaggcaggagaattgcttgaacccaggaggcagaggttgcagtgagctgagaccgtgccattgcactccagcctgggcaacaagaatgaaactccgtctccaaaaataaatacatacatacatacatacactaagaaaaaccaaaaggactccttgcttatttaacaggcagttaagaaatataggtagtaacctgacctgccttctggatctgcagttggccagggaacccatccccagctggaagagtctggtagtgaagcaccaggttgcccctggagtctagaaataggaccaaggtaactgctccagaactgtaacacctcaagattctgtcagtggaaagctgtgcctcaatacagggcattgtgcagtgtgcagtaacaacaaaacaataccatccattgtgcatatgcactgtgctttctagttttcaaaacacttttacatccataaattcattcaatcacatgaacaaccccgacagttaaatattactttttttctttttgcagaaaaccaagcataaatgtcaagtgacatatttgaaatcacactgctaattagagaaagaggtagaaccggaagtcaatagttgaagaatgctacaagcttaaagtgtttatcaaacagctgataggcaatgattctatggagtttttttgttttttcctgcagtttttctatcaccatcttcttttttttttttttttggacagggtctcactctgtcacctaggctgtaatagttgtgtgatctcggctcactgaagccttgatgtcctgggctcaggtgattctcccacctcagcctcctgaatacctgggattacaggcgcacaccaccacgcctggctaattttttgtatttttagtaaagatggagttttgctatgttgcccaggctggtctcgaactcctggactcaagcaatccacccacctcagcatctcagagtgctgggattacaggcatgagccactgtgccccgccactatcagcatcatttaatattgactaaaaagagactttttcaattacatatttatcagtgatttttaaaggaagaaagtagaaaaggacaaataaggggttactataagaaaacaacattgagaggacttagatatccaattattctaaggaccacatttactagcctcattgaaggtaggtgtgccaacaggctaagtcctggtcaatgggatgtaaacagaagtgaatgtacaatttttaggtcattctcctaaggagaaagatcctgtctttcccttctcactgcttggaatacagatgtgttggtaataactgaagcagccctcttaaactaaagaatggatgccaccatttgagggtggtagagtaatcaaataagaatggtatagtaatcagataagaggtgcttgggtctctgacactttggagacaccatatcattccccaactgaccacacacagccacacacagactcttatgctaaagagaacttcttgcagcaattgagcctgtgtcttaactcacacagtacttacctccaacttacattttatatcacctcaagaaagaacatggattcccaacaaagctgggtgcaagccgcagagttcttttat

SEQ ID NO: 1879673 - DNA, 4001 bp, Homo sapiens
taagttggaggtaagtactgtgtgagttaagacacaggctcaattgctgcaagaagttctctttagcataagagtctgtgtgtggctgtgtgtggtcagttggggaatgatatggtgtctccaaagtgtcagagacccaagcacctcttatctgattactataccattcttatttgattactctaccaccctcaaatggtggcatccattctttagtttaagagggctgcttcagttattaccaacacatctgtattccaagcagtgagaagggaaagacaggatctttctccttaggagaatgacctaaaaattgtacattcacttctgtttacatcccattgaccaggacttagcctgttggcacacctaccttcaatgaggctagtaaatgtggtccttagaataattggatatctaagtcctctcaatgttgttttcttatagtaaccccttatttgtccttttctactttcttcctttaaaaatcactgataaatatgtaattgaaaaagtctctttttagtcaatattaaatgatgctgatagtggcggggcacagtggctcatgcctgtaatcccagcactctgagatgctgaggtgggtggattgcttgagtccaggagttcgagaccagcctgggcaacatagcaaaactccatctttactaaaaatacaaaaaattagccaggcgtggtggtgtgcgcctgtaatcccaggtattcaggaggctgaggtgggagaatcacctgagcccaggacatcaaggcttcagtgagccgagatcacacaactattacagcctaggtgacagagtgagaccctgtccaaaaaaaaaaaaaaaagaagatggtgatagaaaaactgcaggaaaaaacaaaaaaactccatagaatcattgcctatcagctgtttgataaacactttaagcttgtagcattcttcaactattgacttccggttctacctctttctctaattagcagtgtgatttcaaatatgtcacttgacatttatgcttggttttctgcaaaaagaaaaaaagtaatatttaactgtcggggttgttcatgtgattgaatgaatttatggatgtaaaagtgttttgaaaactagaaagcacagtgcatatgcacaatggatggtattgttttgttgttactgcacactgcacaatgccctgtattgaggcacagctttccactgacagaatcttgaggtgttacagttctggagcagttaccttggtcctatttctagactccaggggcaacctggtgcttcactaccagactcttccagctggggatgggttccctggccaactgcagatccagaaggcaggtcaggttactacctatatttcttaactgcctgttaaataagcaaggagtccttttggtttttcttagtgtatgtatgtatgtatgtatttatttttggagacggagtttcattcttgttgcccaggctggagtgcaatggcacggtctcagctcactgcaacctctgcctcctgggttcaagcaattctcctgcctcagcctcccaagtagctgggattacaggcatgcatcaccacgcctggctaatttttgtatttttttcagtagagatggggtttcaccatgttagccaggctggtctcgaactcctgatgtcaggtgatctgcccatctcagcctcccaaagtgctgggtttacaggcgtgagccaccatgcctggccccttagttttttaatattaatattcattggaggtactgtcagcaaaaatccagaattacaagttaatttttcccaaactcacacagtagaggtccctgtaccttcactgaattgcaagttcactttctaccctgagttactcatgtcttcagttttgcttttctttgttctttctttcttgttcattcattcatcaagcactttattgagtccctactatgttccaggcactgggtatcgtaggtgcctggaacatagtagggactcaataaaggagctatgcttcctttatgtgaattaaatgtcactgatgtagctggcatttagtaggctttcagtaggtgttggttttctttgtctgcccctcattttgcttaattaacctaccaaatgcatctttgactctagtgtgtccagaagaaatggacagtgttgatgctctaaacatccccagcgtagattgtttttcaatgtgcacaacacagataagtcacttcaaagtccatagataaaggggcttcttgctgatttcatcagaatgagtagaaattgcaagataatttttgttttgcctcccacccccagcttcatgtacagatcacactgacagagtatcttcagcttttatctttcctcccttccttgatctgcccttcatcaaagcattttagttgtaaagttaaatagggaagaatgaggaacgaggcataaatcatcctaacttcttgccaccctccaaccttatattctcaaaagacatcattggactgcaccattgttttggtaacaatacaccagttttaaagtattttcttgttacctttctcctttttgatattcatctaattttcctttcttttgtaggctgtcagccagatgaaacagcaaaaatatccaacaaaagtctccttcagttcacaagagataccattagcaccagcttcatcataccattcaacagatgcagacttcacaggctatggtatgattctttctctcagcagatctggctcattaagccttagagaaggcaagggatcataatgtcctaaaacgagaactggaccaggaggcagaagtctgactctggatacttcctccgcttccttagctttggggcttggataggtcacttcatttcctacatcatttttcctcctctctgccatcgccattgcctgttgctttttgaatataagagcactagaacagaacaggacctcagtaggtcaggagttcaagaccagcctggccaacatggtgaaaccctgtctctactaaaaatacgaaaaattagccaggcatggtggcgcatgcctgtaatcccagctactcgggaggctgaggcaggagaatcgcctgaacccaggaggcagaagttgcagtaagctgagattgcaccactgcactccagcctgggtgacagagtgagactctgtctcaaaaaaaaaaaaaaggaaaagaaaaggacctcagtaaatgttatttgaatctgaggcttctgtattattcttctctaatctctacaaaagattatatttaggtcttgagtaatatctctttaaaaatcctatcaaacccaatttttagccctgcaaatgttgctttaagctgtttgaagaatgttgattttcaatgcttaaagaaattggcatgcacattctgtctttaaattcctggcttgaattatgctgactgggggttgaaaatagaactttataaagaataataggtatttctacttgcttttttttctttttttttgagacagagtctcattctgtcacccaggctggagggcagggggctgatctcagctcactgcaacctctgcctcctgggttcaagtgattctcctgcctcggcctcctgagtagctgggattacaggtgctcaccaccatgcccggctaatttttacatttttagtagagatggggtttcaccatgttggccaggctggtctcaaactcttgacctcaagtgatctgcctgcctcggcctccaaaagtgctgggattacagacgtgagccactgtgcccagccctactttgcttttgtgcagtatacatcagtaaaaaataaaactctttaaaagacagtactcaccaatggcaaagcataaccctgcattaatttagcagttctgaaatctttgtggtatttgccttttatatattttttcataaatattaacttcataaagttcatcaagcaggtactattttaaagcattgtagatgtactaaaacatttgatgcatgtggtcaga

SEQ ID NO: 1879674 - DNA, 4001 bp, Homo sapiens
cctctgctaatggagctgggagagaagtgattgcatcaacttttgggtaggatgtgtttagaggcactgatccatgtggagatgcctttgggaacagcaagaaatagatgcggcaaaagctcggagattggcctggctgtggtgttgctcactgtgaatccaggtacaaggtcatatcagtaggggatcttaaatgggaggcatttgacctcatgcttattgcagccgttgggatggtcttccacaatttttaatcagagaaactgtgattgtacatagcagcactggagtcctattctgatcctttgtcttctcgactgatggaaatgtggctcatgtgtcctgtggagtcagtcagcatggtggctaagggcaccggctccagtgccagactgcatgggatcaaccaatgtcgatttcctagctgcagaagcttgggcaagttacttcacccctttgtttctcagtttcttcatctataaaatagccatcataacagcatatatcccatagggctattagaggattcagtggactaacataagtgaagaacctgagacagtctctagaacatagtaaatgctcattaaatgttttctagaataataatttttatacactatgacccaggttagggagtgaagagattttagcagcctcagacacttgggcatgtgttctaatttcactttctaaccccctctaatgaggttttatattgtattttaaaataatttttttctttttcatggcagacttattgtatttgctgacttctattttaaaaagaatcatctaccatggacttttggcatctatattttaaagtttcagttaccttttgtaactactgtcttttttttttaccctcctatctgtctggattttaattctacccattgatatcttttcttttgggtgatgaaagcacagacactggattttagactagaatatggcctccaagtcttagtttgtgggtagccttcagaaagttacttatccccctttggcactgatatttctctttaaaattgatgtattactgctaaccttatttaattactaggaagactaaaaaagatatcagcgcaacatatgtcctgcacagggccttccacttagcacaacctctctcccttcctctatcagctgctgtaatgatgaccaaatcaggaaattctggtcctaaccccactgtatatcttaggaggttcaatcagctgaagttggtgctggtgtgtctaccctagcaggttgctgagcaacccacagtgagttgtagcagccctgaaaacagtttgcatcaacaaggcttcaatgatcacagacaaacacaagcatttactaaagctgaagggacagcaaattgctagagtgctttcccaacccctttgcatttatgatttcttttctgagaatgatatatgatccaattacagagttcacgaaagcattagggagttcatgaaaagcaaaggcttatactaaacatactaaacagcttgtcctttgaccatcactgatggtggaaccagcttcagctattttgctatcacgtaagtaatttgggactctcaaatgataagttaaggaaggatacttgggattctttaaacaaatgtctcgttagagtacctcagagagatattgggcctctacccgtagctgtgaggaataactcagttattttaataactttagaaatgatgatggaagagtagtgctttggctacatgtaaattagttcagcctgccctgtagaggttgttcaaccttttctctctcgagaaagcttttttccattccaactttcctcacatgccagaaatctctggtgcagtcaattacagacattgtcttcattcagaaatggatttggtttccattaacgatgttctcctgagatccatcgaatagtgtcccacaaaacacctggcactatatgagtcctataatgccttcccttatatgactcgtatagtgtctggccctttagggaaattcgattccatctagtgtaaatttctttgttgttgttgtttacaggtgtggaaactgaggcccagcaaagtaaagggtaattcccaaagccatggagttttggcaatgctgggactacagcccaggtcttctgatctagtgaaggcatcatcacatattctgggtggttaatgattagaaaatggcaagggaatataaatcatgctgctataaagacacatgcacacgtatgtttattgtggcactattcacaatagcaaagacttggaatcaacccaaatgtctaacaatgatagactggattaagaaaatgtggcacatatacaccatggaatactatgcagccataaaaaataatgagttcatgtcctttgtagggacgtggatgaagctggaaaccatcattctcagcaaactatcgcgaggacaaaaaatcaaacaccacatgttctcactcataggtgggaattgaacaatgagaacacttgaacacaggaaggggaacatcacacaccggggcctgttgtggggtgggggaggggggagggatagcattaggagatatacctaatgttaatgacgagttaatggatgcagcacaccaacatggcacatgtatacatatgtaacaaacctgcacgttgtgcacattgtaccctagaacttaaagtataagaaagaaaatggcaaacttcttaagaaacaatgtaaattatataatcctcagaaaaatattgctaacttaattatttagaaaaatttgcaggacaacagtaaatgtaatattcttgaaataaatagttacaaaagaaaatgcaaaaagaaaatataagaacttaacatttggcatctagacaaaaaataactttgttcgcccaatcctttgcactctttggcttaaaaactttcatggtttcaaggtggcccactgcctatggaagtagcccacacacttcagcctggtacttaaggcccttcctatctggtcctggtctcctttccagccttgccttccattatcacatttacctgtaaccccaagtagacaaactgccccatttgtcttgtcagtaaatgcctagtggactttactacctttccacttttgcttttgttgttccctttgcatgaaatacacatcctcatcttcttgaaggccaaactcaagtctcctcccccaccccgaagcatcactgatcatcaatccaaatatgagatttttcaccctcaaattcccatgaaatcccatcttagttgcttgtaaggaacttacacatactaatttgtgtcagtaataataagagtaccagcaactgccatttgctgagcatttactaagtattaggtaccatattagtcatttcaaatatgttacctcattagttgtacaaacaataatttatgtagtagatattttatctcatgaatcataaattcttaaaggacaagggcccagggaaatactcaggatcttgtgacaaaatttacgcatgataaaaatatacagaatgaaaagctaaaggtgagaataaatgtggctttcttcattttcacctgtgcccatacaactgttgcttttcccattttctaactttctttcagagattctagccaaatgaggggtataatgggcttgattctgacgtacagcaaactacatcagttctgcatttctacctggtcacaaccacctgcagctgaatagttgtgctctccctacactggtcttgggctggagtctcaagttcccggccagtggacttcacatatataagttacctgcttggctgcaaaaggcaactgaggttttgtgtcagagccaaatacttctgcaggagaattcaagatggtcaaataagtggaaggaagtttgtggaatgaaactgttatgtcattgcacattttcagagtctatcagtgtctgtgggcaattaattctcttggatatgacacttaaatatgtaaaagcatccccacagttgtttctggcatttgtt

SEQ ID NO: 1879675 - DNA, 4001 bp, Homo sapiens
ttccctattggactctcattcccatgagagtaaagactcgcctattttttcctcttttgtatctattcagcatttaccatggttcccggcacataggaaaaacacaaaaaatatttgttaaatgaattaaatggcctcttactaataattaattgcagatcagcaaagttctgagtttaaatttttgcactgctactactagaaaactaacctctgcaagttactaaagcctctgagtataatttttcttaaaactacagcagagttgattgaaggattaaatgttggtatatatgtgaaatagtcctcctcagtaaatattagtttctttatttccttcctctgagccaggcctcttttaaagtcaccatgtagctttctctagaacaggcattaccaaaaacgataaacttaattcaaaatatgagagttttcaggctgcagtgagtattaattatgtttttcagtttggaaataaaacttagccagaagagatgcttcctctccagctctgctgaggtgttttagagtcagcttcctctactcttgataatttcaagacttcatagaaatgaaaataaagtccttctttcaaaaaggctaggaacttctcctgtagggtctgcacagagagtttgttgtttggggtaattatatggaaagaacggtggctaaccagactctttgattccttctttccttccttcctccctccaactgcctagattaggcagcagtctcactccagcacgatatgtggtgacattcagtcatggggaaatttgctgaaacatccctggcaagcttcagagattcatggaatagcaaagacatacatactaaaaatctccaatggaagactcagctatgctgttgaacataactgatcttcagaaagaagtgagaacaagcctatcattgttctcagtgttttgcatatattatctcagttcatttttataacatctctattaggtgtgctgttattttccccatattatatttgaagaactgacacctagatgagttaagtaacttgccaaagatcttgtggtggtgagtggagtagcaggattagaacccaggtgatctaactccatgatcttttttaaaccactacataatacaatgtaaatgaaaacttaactaatgtgggcagcaatataagttttaccatattttatgatttaacaggaatagggaacaaacatagcctatgaagagcattcgctttctgttgagataatcaagataggcaggccagtaaataggtttaaataatctagttatgccaaccaaatttctgttagaagcttggtgtgaacaaattttcaaaaaatggctattcatgaacaaataggaaatagaatgggaaaacaagtcagtggaaatctccagtgtgtataccagtgctcaaagggctcaactggagatgttgggacaacatctccatgtttagtaacaatcattgaggaataacttaacactcaatgattcttccagtgctatccacatttctgaacacatagaagtcaatgaatattcattaattatattattgagcaaaagtctattactcctagacattgttaaaggcttagcccaacttcatgtgtagaacaatggttctgtgtggtttaacagaaagaccagaagctttgcatttgaataggcatgtgctaggacctggttatgacgtttcttttctatgtgatattaagttaccaagtctctctgattctcttactcatctataaaatgacgattataattctagtcttatataatcattgtgatagttaaaagagacaatgtgaagaggtgacttgaaagtacctagcataatacctggcacataggaggtatcctctcttgcgttgatcccttttcagaagaatcagtctctgaggaggaaattaactatggcttttaactttgatggcaaagacatagattgtttagctacccctttgccatcaaagttaaaagccagagttaataacaacatttcctaaaaagcacttggaacttccagaataaaactcaccatacagctattggtattttaaaaatttatttcattcctgtggtaggcattgctgcacaactcattgtacaatgatacattttcaaatgtttatcattacctgtgcaatacaaatgctgcaagaccatttttctctttcaagcaatgaagaaaatataattttcttttttatttagcagacatatttttaggtgcagagtatgagagggatgatctataggttttctacttaaatagacctaggttcaagtcccagatctatcactctctagctgcttaaccttgggaaatttagttaatctcttaatgccttggtttcttcttctgtagaatggatatataatgtttatctcacatagtcagttcgatataaatgttttgcataagtattacatataaacatgtttgatcatctatagttactattttttaattatttgagtatgcctaattgggaggacaggtatttcataaatgataccaaaggtatgacttatgtgtgcttatgtcggttaatccctataaccattcagctctttcttgtacccatatattatttaaagaacaaaaagctagcttttattcaatgaacattcaaagaaggcccatcaagaagttagcataacattaagtgctaggattacaaaaaaataaaatatagccttatcctgaagagtttagtgtaggagagagacgtacacaaatactttttaaaaatgtggtattaaagtggtagagaccactataaaattctacagaggtgcaaaggaagcatggggactgctgagtcaaatctcatcatgaaaaatctgtcttcagtatctccccttgacttctggccttctcagatttgatagtaggtcagatagagagttcaagaaagaagagagttaggaagacactcagcgagtaggtaggggatagatctcttgctgaatttgagaaagtagattgtctttccccaatttagaagtcaggaaacactaaactagccctcagttgaaaagaaaaaagccccacacaactttcagaataggcagcgccctattttagagataagaaacatcagacacctaaagcctatagggagcaaataaaacctagagggttcctctgggcaatccagagacttggtaatgacagctttctagtatcctggcacatttaaaccttggatttcaccagaaacactgataaatcccccccccaccaccattgttgatgaaaaatataatgaggagggtaacatttattgagcttctactctaaaccaaacaccatactaggtgttttcacatgcattatctcatttaataatctcaacaagttgtatgataggttttgatatatttgggatatttgtctcatccaaatctcatgttgaaatgtaatccccagtgttggaggtggggccaggtaggaggtgtttgggtcatgaagatggatccctcatgccttggtgttgtccttaaaataatgagtgagttctcatgagagctggttgtttaaaattgtgtggcacttcaccccaccttttactcccactcttgccatgtgatgtgctttttcctgcttcacttttagctatgagtaaaagctccctaaggcctccccagaagctgagcagatgccagtgccatgcttcttttacagcgtacagaactattagtcaattaaatctctttgttttataaattaagcagtctcaggtatttctttatagcaatgcaagaatggcctaacatagacaattggtactgatgagtagagcgttgctcctgaaatgcctgacatgtggaagcatctgatacttgaaaatgtggaattgactttggaactgggtaatgggaagaggttggaagaatttggagggctcagaagacaagatgatgaggaaaagtttggaacttctaagagctgttaaatcattgtgaccaaaatgctgatagtgaca

SEQ ID NO: 1879676 - DNA, 4001 bp, Homo sapiens
ccaaattcttccaacctcttcccattacccagttccaaagtcaattccacattttcaagtatcagatgcttccacatgtcaggcatttcaggagcaacgctctactcatcagtaccaattgtctatgttaggccattcttgcattgctataaagaaatacctgagactgcttaatttataaaacaaagagatttaattgactaatagttctgtacgctgtaaaagaagcatggcactggcatctgctcagcttctggggaggccttagggagcttttactcatagctaaaagtgaagcaggaaaaagcacatcacatggcaagagtgggagtaaaaggtggggtgaagtgccacacaattttaaacaaccagctctcatgagaactcactcattattttaaggacaacaccaaggcatgagggatccatcttcatgacccaaacacctcctacctggccccacctccaacactggggattacatttcaacatgagatttggatgagacaaatatcccaaatatatcaaaacctatcatacaacttgttgagattattaaatgagataatgcatgtgaaaacacctagtatggtgtttggtttagagtagaagctcaataaatgttaccctcctcattatatttttcatcaacaatggtggtgggggggggatttatcagtgtttctggtgaaatccaaggtttaaatgtgccaggatactagaaagctgtcattaccaagtctctggattgcccagaggaaccctctaggttttatttgctccctataggctttaggtgtctgatgtttcttatctctaaaatagggcgctgcctattctgaaagttgtgtggggcttttttcttttcaactgagggctagtttagtgtttcctgacttctaaattggggaaagacaatctactttctcaaattcagcaagagatctatcccctacctactcgctgagtgtcttcctaactctcttctttcttgaactctctatctgacctactatcaaatctgagaaggccagaagtcaaggggagatactgaagacagatttttcatgatgagatttgactcagcagtccccatgcttcctttgcacctctgtagaattttatagtggtctctaccactttaataccacatttttaaaaagtatttgtgtacgtctctctcctacactaaactcttcaggataaggctatattttatttttttgtaatcctagcacttaatgttatgctaacttcttgatgggccttctttgaatgttcattgaataaaagctagctttttgttctttaaataatatatgggtacaagaaagagctgaatggttatagggattaaccgacataagcacacataagtcatacctttggtatcatttatgaaatacctgtcctcccaattaggcatactcaaataattaaaaaatagtaactatagatgatcaaacatgtttatatgtaatacttatgcaaaacatttatatcgaactgactatgtgagataaacattatatatccattctacagaagaagaaaccaaggcattaagagattaactaaatttcccaaggttaagcagctagagagtgatagatctgggacttgaacctaggtctatttaagtagaaaacctatagatcatccctctcatactctgcacctaaaaatatgtctgctaaataaaaaagaaaattatattttcttcattgcttgaaagagaaaaatggtcttgcagcatttgtattgcacaggtaatgataaacatttgaaaatgtatcattgtacaatgagttgtgcagcaatgcctaccacaggaatgaaataaatttttaaaataccaatagctgtatggtgagttttattctggaagttccaagtgctttttaggaaatgttgttattaactctggcttttaactttgatggcaaaggggtagctaaacaatctatgtctttgccatcaaagttaaaagccatagttaatttcctcctcagagactgattcttctgaaaagggatcaacgcaagagaggatacctcctatgtgccaggtattatgctaggtactttcaagtcacctcttcacattgtctcttttaactatcacaatgattatataagactagaattataatcgtcattttatagatgagtaagagaatcagagagacttggtaacttaatatcacatagaaaagaaacgtcataaccaggtcctagcacatgcctattcaaatgcaaagcttctggtctttctgttaaaccacacagaaccattgttctacacatgaagttgggctaagcctttaacaatgtctaggagtaatagacttttgctcaataatataattaatgaatattcattgacttctatgtgttcagaaatgtggatagcactggaagaatcattgagtgttaagttattcctcaatgattgttactaaacatggagatgttgtcccaacatctccagttgagccctttgagcactggtatacacactggagatttccactgacttgttttcccattctatttcctatttgttcatgaatagccattttttgaaaatttgttcacaccaagcttctaacagaaatttggttggcataactagattatttaaacctatttactggcctgcctatcttgattatctcaacagaaagcgaatgctcttcataggctatgtttgttccctattcctgttaaatcataaaatatggtaaaacttatattgctgcccacattagttaagttttcatttacattgtattatgtagtggtttaaaaaagatcatggagttagatcacctgggttctaatcctgctactccactcaccaccacaagatctttggcaagttacttaactcatctaggtgtcagttcttcaaatataatatggggaaaataacagcacacctaatagagatgttataaaaatgaactgagataatatatgcaaaacactgagaacaatgataggcttgttctcacttctttctgaagatcagttatgttcaacagcatagctgagtcttccattggagatttttagtatgtatgtctttgctattccatgaatctctgaagcttgccagggatgtttcagcaaatttccccatgactgaatgtcaccacatatcgtgctggagtgagactgctgcctaatctaggcagttggagggaggaaggaaggaaagaaggaatcaaagagtctggttagccaccgttctttccatataattaccccaaacaacaaactctctgtgcagaccctacaggagaagttcctagcctttttgaaagaaggactttattttcatttctatgaagtcttgaaattatcaagagtagaggaagctgactctaaaacacctcagcagagctggagaggaagcatctcttctggctaagttttatttccaaactgaaaaacataattaatactcactgcagcctgaaaactctcatattttgaattaagtttatcgtttttggtaatgcctgttctagagaaagctacatggtgactttaaaagaggcctggctcagaggaaggaaataaagaaactaatatttactgaggaggactatttcacatatataccaacatttaatccttcaatcaactctgctgtagttttaagaaaaattatactcagaggctttagtaacttgcagaggttagttttctagtagtagcagtgcaaaaatttaaactcagaactttgctgatctgcaattaattattagtaagaggccatttaattcatttaacaaatattttttgtgtttttcctatgtgccgggaaccatggtaaatgctgaatagatacaaaagaggaaaaaataggcgagtctttactctcatgggaatgagagtccaatagggaaactaatacacgcaattgcattccataaatataagttataacctcctgggacaaaaaccaaagtttaaatgagtgaatcaaggatt

SEQ ID NO: 1879677 - DNA, 4001 bp, Homo sapiens
tactgtaagtgtgttttaaaaatctatcagaaacataaattgtccaaaagccttatgaatagaacaattgttttcagcaagattttttttttcccctgaaaaactgttgtggtttttctggctcaaaaaatttttatatcttgccttaataaaactgttttatattaaagcataacatacaaactcacaaatatttctttttattttttcaggttgcatgcatcattcctttaattgagcagagttaactggatcaaattatttatgggagagagaggaaaagttataaagaattatagtaatttttaatttccaccaatatactctttgtaagtgaatcactctataattactttctgttgcactgaatgcagcaacaataacacaatagtattttaaggcactggtttttggcatactctaaccttgtaattatttaaataacagccaagtttactcatgtttttgattctgtcaagaaaaaaaaaaagttcctttactcgaaagtgatggccgaaacagaatcggaaatttgttttcttgaaattacataaatacacagaaaatggcacttattagcttttgttaaaacattaccttacctaatcactgcataaaagtccagatttgtagaaaattgtaattttctcagtatctaaaactattttgctttccattaagtttctatttgctattttctcagaattttacaattaaagataaatcacaaactgtttgtttttcttaaagttctttgagaaaatgtctaattatacaatccttggacaatactgtgtttttttggtgctgtgttttttaagaagtcctacttactggaattttgactatttggatatttttgtttttaaaaggggaggggaatttgcttaatacttctaaagatgtgaattgataattgatattaaaatagaattactctcaactcaccagaattaaattttatatctgcatatttaacactattagctcatataaattataagaaaaattttcaaaggatctggttttaattttttggatatgaaatgaatttgccttttctgccttttcttaagtactattttgtaactatattgcactaactatatccaaaacacattctgagcatcactgtgagtaacagccttccagtttgtacccttttgattcacagcatggccctatagttaattaagaggtggataacttaagctcacaactgcctttaatttgatttcacatccacagttataaactttgcatttaaaaggaaaatgagacatttaaataggttcctgttgtttcacatataattggtaaaaacatattcccttgtaggatcctattatcagagcatcaaataccaaagtcagcaacttgggttgccaaataaattaggctcattaattattttgaaaagggctgctgtttccatgtaaatgataattttctttttcatggacaaggttatggtacttatctactaaaagaaacatgcataaacatagtttttatctttaacttcagtattaaaatatgcagttttttgcaaagaggaaaaacatctggttcaattacgctgaactctgactacatgtgggccagtaataatatgaattggacttaagaataaaccttgtgtttaatctctttttttccttaaaattttaatgtgagttttctgttacgcaaattatccatgttagcacatttggaacaaatgtataaatgtactttctgaataaagtcaaaagtctaacttgtttttagttccataatgttttaatgtttaattatattgtgtatttttctccctttccccttactctccaaaatcaccaaatctggaaaacaggctgattgtatctgtctatgagcaaaggaaacctgaaggaaccaagggcctggctggacagagttgtcatgtgtctgcctgtctacacttgctgtgcagaacatccgctcacctgtacagcaggcacagacaggcagtcacatgacaacccagcctgaatgacaaccagccattgaaagaaagcagccctcacaccatagcatctacaccaagagctacaaccaaaatgaggggctcgggggcctggggttttaatctgttggtttaatacttaactcatgtattattttattttgattcaagtattaaaacccaccaaaagtaaagtgagtggtgcctatgaaatataataaaacccatttctgaaaatgttcctgtgcattctatagttctcttttcctaattgttgtcagcaaatcactacccttgacctttattgtacacagctttgcagcaccctatattgatataaaaactcaatataacaaaacaatataacttcagtctgatgcttaacaaagaataaattattctaagaattcttgtccataaactaagtatggttttctatgtcatgattttttttttttttttttttttttggaaggggatagggtggaaagacagagaaaagaaaagggagaaaaagagtattccaaaggatcaagtgctttgagttaactctgccagtctgggttaactctgccagtctgggtctgggcaaaacacagtgaaaagactactatttccaactagtgttcaactatattaaaataatagtttctcctcttttgacatatggaaagttgaaatttttgatacttccacgcgtcatggtatacataaatttatgactgcgtcattctttaattaagaaggtgcttatgctacagttctaggagtagaatttacaaggccaacacattcacttgcaacctatgcttccatcactataaactttcaagatcttgagatgttcaggcaattcatttatcttcagaagcataaggaaagtggttaatgcacttgaaatgtatattttgacacatcttttgagaaaatatccaaacttcagtttatgcactgttaactggagtgaaatgataagggatggcttttgtctatgaatactttaaatacttaagggtaaaaggtgggaagatggataaaattagaaatgtgtcaacttttatttagttcattaacatgttttagcttcagtatttgaaattaattttcatctttcttagattctggtcaagcttaaaaaatgtaacacaaggctactcaaaacttttttcacatttaacaattaaacactttatgtatgtattcttaactaaagcaaactatttttcattcagctattttatttttaaaatgaaagtctcagtcttaaagctaagatcccagtgagtttcaaattttctgacaatgatattttaaccaaacctgacattatagtttctttaattaaaaaactgaatgatggggcaaaactacaaagcacaaatatgattaaagttaaatttctctcatttaaacaatcttgtcttatggcaatatgtcatctgctaaaattcatctctgcttctgcaagatacattgcacgatgcagatttttgccttaaataaaagtcccattactagcaaataaagtcctaaacaatacttacaaaatgtagaatataaacaggaagacaatataaaaattactcacagaatatcgacatcgttctacccaatcttaaatgccttgtaccacctgttgcaaatgctgcctatgagagttcacgtatggaattattctactggaccctgcaaggctcaggagagtgcttgacagctcccagaatgagacaatgacctagccagaacattaaggagactacacccgtccttcagactccaaagggaaagctaggacggcagcagagtcatcctaaggtgaggcactccaggataacattttcaatatttttccttaaaacataaagttaacaccttttttgttaaacattttttactcaattttcaaaaaaaatgcttgaaagaatgttttgtatgtattttaaagtcattaaatgaggcacatttaaaaatttttctcttctgggaaagggtaatataaaggataatattgctc

SEQ ID NO: 1879678 - DNA, 4001 bp, Homo sapiens
cctgttcccaccccagttcatcgtcacctcttttacaccaaaacgtctgcagagtggtgtggtcacgattcttttgtgccattttggggtggagagggtggacgtgataaagccaataattcaggacttattccttcttgcgttgtgtttttttgcccttgcaccagagtatgaaatagcttccaggagctccacctataagcttagaagtgtctgtatgattgtaatcacatggtgacaacactcagaatctaaattggacttctgttgtattctcaccactcaatttgttttttagcagtttaatgggtacattttagagtcttccattttgtgtggaattagatcctccccttcaaatgctgtaattaacatcactttaaaaaaacctgaataaaatattgaaacctcaaaaaacaaaaacaaaaacaaaactacctcaaaataataaaggccatatatgaaaaggccacagttaacaacatactcagtggtgaaaaactgaaagctttccttctaagatcaggaacaaggcaaggatatctattctcatcacttctattcaagatggtatccaggccaatgttaatgctatcatatctccttaaaggatataaaatcaagctataaccccatcagcttgggtacatgttctcaagaccttctgaggctgtgtcatgggtcatggtcttcacatttggtgcagaataaatctcttcaaatactttgcagtttggcttttttccctcgacatcttcatctgtatcctttgtaacatcctttataataaactggcaaatgtgtttccctgagttctgtaagccactccagaactcagttgaacccaaagagggggtcatgggaaccacaacttgaagccagttggtaagaaattctggagaccggggcttgtgactggtcaaggggtgggaggcagtcctggggactgagtcctcaacctgtggaatctgacactatctctaggcacctagtgtcagaactgattaggaggatacccagttggtgtctgctgcagaactgctcacataatgttggggagaaatccccacgtatttggtcacagaagtcttctgttgttgtagtggtatgagagcagaggaaaaacacagtttgaaagtttttcctaaaatggcatccaaattggaaaggaagaggtaaagttatctgttcacagacaacaagattttatatgtaaaaaaatcctaaagattccacccaatctgttattcagcaaagttgcaggatacaaaatcgtcacacaaaaatcaggttaggtctgacagagacagacaataaatgaataagttttccaatattaaaacctaaggagtattatgaagaaaaaaaacaggtccaggaacaaggttataatttggaataagatggttagggaaagccttctagagaaggccctttgaataaagacaaaggaagtgaagaagtgagtcttgcaggtatctggagtagattgttccagccataggaaaaagccagtgcaaaggccctatgatgagggtatgcacagaatgttagagtaggggtccccaacccctgggctgcaggccagtagcaatacatggcctgtcaggaacctggccgcacagcaggagatgagtggcggttgagcaagcattaccacctgagctccacctcctgtgagatcagcaatagcattagagtctcacaggactgtgaagactattgtgaactgcacatgtgaggggtctaggttacgcactccttatgagaatctaatgcctgatgatctgaagtcaaatggtttaatcctgaaaccatccccctccaacactggccccctaatccctgctgcagaaaaatggtcttccactaaaccagtccctggtgccaaaaagggtggggactgctgtgttagagaacttaaaatgtttctgtcctttgcctactctatttaaggtacagggtgtcttaaatagaataggcaaaggacataaccatttaagaagcaataagacaaggttgttcatgagacaatcatagcttctattggcgccattcattgactctcttaaagtgaaatagacaattgggaagagatagctatggtccacttggtaattatttgctgtgaaataaagactactaattaagagttacgtggtagttcaaaaaaaataagtatagttcttttttcttttttatttagacttctttttaaagcaagtttaggtttacagaaaaatgaacaaaaaatagggttatctcatacctctcacatgtatacaactctcccacccactgcccccattactaacatcttgcattgagtggcacatttgttacagctgatgagcctatattaatacactattattaatgaaagtccatagtttacattagggttcactcttgtattgaacattctatgggtttgacaaacatataatgacatgtacccaccactgcggtaccattcagaatagtttcactgccctaaaaatcccgtactctacctattcacccttccctccctccccactctcctccatactctgaacccacggcaactagtgatcttttcactgctttgttttactctttccagaatgtcaaatgattagactcatacagtatgcagccttttcagattggcttctttcacttagcattatgcatttaaggttcctccatgtcttttcatggtctaatagctcatttctttttaaaaattttaaattattgtaaacataaaatttaccattttaaccatttttggtatttaactcagtagtgttaactatatgctccttcccctggcccaaaacacaagatttttcttgactctttaccgtaaatgggattctgggagataaaacctaccaaagtggaaggccctactaagactggggaggggccgggtgtgggggctcacgcctgtaatcccagcactgggggaggccgaggcgggtggatcacaaggtcaggagatcgagaccatcctggctaacatggtgaaaccccgtctctactaaaaataaaacaacaacaaaattagctgggcatggtggtgggcgcctgtagtcccagttactcaggaggctgaggcaggagaatggtggaactcaggaggcagaacttgcagtgagccaagattgcgctactgcactccagcctgggcgacacagcgagactccgtctcaaaaaaaaaaaaaatactggggaggagtttttgactccctagtccacactcagcctcaagcaattcatccattaccattgaagtgtttctaccagtttatggcccaagcatcttctgttatcttggttatgattctctgtattcacctgtctctccagttttggggatggcagtttgaactggtacctcaatctctgatggatctagaacagtctttgattttcagtttggtcagattactgttattgttaaggagaggagtgataacttgcaggttcttcacatgttgaggctgaaactggaagttcagtgatcttttaaagagattttaaaatttaaaaaaagtctttaaatttacccatatatttagcacttccaggactcttcattcctttatggaggtccaaatttccatcttatataattttcctttcatgtgaagttcctttaaaatttactatagttcagttcagttggcaatgaattacctgcttttgtttatttggaaaaagtttttatttatttatttttattttttagatgaagtctcactctgtggcccaggctggagtgcagtggtgcaatctcagctcactacaacctctgcctcctgggttcaagtgattctcctgcttcagtctccagagtagctgggattacagatgcccaccatgacacccgactaatttttgcatttttagtagagatggggttgcaatgtgttgttcagcctggtctcgaactcctgacctcaagtgatctgcccatctcagcctcccaaagtattgggattacaggcatg

SEQ ID NO: 1879679 - DNA, 4001 bp, Homo sapiens
aatgggaataaagttatttgcccaaagtaaccacaatcaaatggaagagctagaatttaaacccagctttctcctattccaaatgccagacattaaaaacacaaaaacaacacaaaccatattttactttcctaattctaggcttgggatgaaattatttttaagacttaaaaaagtagccaataaattagtataggtaaacagccctgctatttcctttgagcacaggaaataaggataattaatatatgatgtttgagatgcataggggtaaggataatatatgacaattgaaaaaaagataacataattaactgaataattcaaaaatcattcaacttagtaagtcccatgaagatgcaaccctccatgttaaaagaaattacatggaatctcagaggaaaaaatatcattaatatgtaattttgggtgattaaagtaatgacttaaaaaaaaagaaaaggtctgccatgaagttgagcacagaaatggtaacaataaggagaaatccacagcaatactggaagctagcagggatgccacaaatagaccagaccatgagaagtttctggaagataaaaaacagatgggaacaataggcaacaaaacctcaaaacgtcatacgtgaaaggggagacctccacagaaataagatttcctgtagaacccagaataactcaaagaccagaggcaatggggtttgggagaatgactggaacttgagctactattatatgcaattccaatagatacatagtttttaatgtttctggcctttctacattttagggtttttttgtttcttaaagtgtcactataaaaaaattaaaaggtgggcatattgtcttctttctggagtatctaaaacatttcagacctacttacatagtttaagcaatagataacctaacatgttaagacttcacagttaccattttgttagccatatgtgaaaacccaaattgggctgtcaagatgttacctttaatatactacattgataatatctaaaaagtaaaaaagactagttctcaccttagattgtatttttatcttagattttaatagaaaattttaattaagttaacaacttaatcctacatttaggaaagaaataactgtagggaaccagaaatctatccttatttcacagggcataataccattatggtatgggtagagaaaagcagaatatgcctgagtaatgtgaatatagatcctggatggcctttaggtctttaaaatctcaacttaaacataaaaatttatatcattctcaaaacaaaccttagaaaaacctacaaacctgtgatctacattttaaaccaactatagagattcatttacaaacctttgtgaagtcagatggacaccagcacacagacgtgacctcttgagaatgacccaggagcacagtaggaggttgccagggtgtggagacctagtccaatcaaaaacaaacaagtcagcaaagcaatattagatttcccagatagaggcctttgaattcagaagtgtgtcttagagagctttaggattgttaccaaaggccactagacctgcctagctatagttaggaaaaaaaaaacaacagatttccaatgggcaatgaaatatttctgttactaatctgagaaaacacaatgaaaacagtcaaaataagtaaataacatgagcttacacacaaggatagtccttatttcatatcaggacaacctagccatatatattttgactaaaattcaagactggcattgtcccttattccttaggtggtaaactttctggaaggatgttatccatccttaagtagtcaactcgacaactcagtcctgtttttacacagcatatatatcttcagatccctagtcagctacttctaggaacactaaattaactgtgaaacctgaagatttctgaaacatgctaccagctctcttcggacaagatgatggtcttccttccaaaagaagaccgtcctcttgtcccaacagagctggtcactaacttttacaaaacccaaagttatactccttcattttgagttggataaccttcattctgaaggggtataaactatattttacatggcactttggtatcctttctgaaaaacatttttttcctctaaaactatatttcagttaattttctgagagaagttttgaattttcaagtaagtgtcactcgcattttaatatattttaatgcagaaagaagggtcacattgtactgtcctgtacatgtgactaagaatcatatttttccatcatcagatgccaccagttatgtacatttgacagcatcatacagctgactcattcaagagatgtcaatctctttcataggccatgggaattaatcagcacaataacgagtacaaacacacataactattattagcatgtgtgtttcaaaagagcaaggaggttggggctgagagaagttattctcttttcattttcctgaggctctgaatcatggctcatttgtatgaagaaagtggaggtgactctggaatgattatttgtgagaatgactaagtaaacttaatagattcccccagattatggttaagagatctgacacactgactgataaggttattcaactcaatcattaatactcctctcttggcttaaatggtacatatgcaataattaaaaaagcaaaagaagacaaagagcagagtctaacttgtcttgcagagttaattaaaatttatcagaaaggaagctttttccacatctacaggaatctcacttactgcctactcctacaatggcacagagataattcattctttcacaatgtaacatattttagaaaagactttgaagatcgtctctaactatcccagtagtcacagaaattttcctttcctcctctgtttgggatggccccagtcgattaagtttctcttcacccaaggtccaaacaggtctggtagcagcaaattagaagggagaggaaatcctcaagtcctactgagcatccctggtagaaatacattattgtcttccattgattcaccctgcttattgcctatagctttttaatttcatgatattggtcctttctcagtttctgtattataatacctaggagaacctaaatgtgtacaccaagggttaaaataagtttcaaaaaaccccctaaatacccaccaatagaatatatgcacatttttgcatttatctatagggtttcagagaaaaaagaaagagacccattagaaaaacattttggaatacgttaacaaggtatcaatgacgacagtaaaagtctaagccaggcactttacatagcattaaaagtggggggaagtttcctcagaaagttaaacaattatatgacccagcaattctattcttaggaatcgaattctgttcctacactcccaggagaattaaaaacctatgttaaacaagaacttatacacaaatgttcacagcagctttattcatgtcaaaaaatggaaacagctcaaatgtccatcaactgatgaatgaataaacaaaatgtggtctatccacacaatggcatattattcagtcataaaaaggagtaagtactgacacatgctataacatggatgaacctcgatattatgctaagtaaaagacgtcacacacaaaatgctgattttgtatgattccatttatatgaaatgtctagaatagcaaatccatagagactgaatgtagtttagcaggtgttggggaggaagaggggattagagagtgactgttaaaggacacgggtttttttctggtgtgatgatgtttgggaattagatagtggtgatgttggtacaacactgtgattacaatagtaactactccattgtaaactttaaaatgactaaaatggtgaattatatgttatatgaattctatctgaataaggaaaaatgggaggaagggcgtgttatgggttaaaatgagaaactaatgtctaacacgtttttatgaacttttatgctttgatagtttaggact

SEQ ID NO: 1879680 - DNA, 4001 bp, Homo sapiens
taggtctggagcagcactgcccgacagatcttgctgtgaggatggctgttcttcgttggtgctacccaatacagtagccaccagccatatgtgagagggctaggatgatagaggaaaagaaattctaacttgtttaacttaaattattctaaatttaaatctaaacagtcacatgtggctaatggctaccatattgggcagtgcaggatgggatgctttattagatccaggatagacattttggcaaggatagatgatgtcgtggacttactgctttcctttgctggagggcatctcattcattctctgtctccctttctctctctctttctctccctctgcctctctctctccctgtttcttattgtgaactcatgaatgctttttgaagctagtttttgaattctttcacatagtttgatttaaattagtgtttggcacaacaaattgtcaccagttcaccttgaccaaacctaaacttggtattaactggtttgttttttgtttgtttgttgtttctgtaaggaatggtatttagaaaccaggatcagggaactaaatttgcttgttgctactgtgtcaatgtttctaaaccctttcagtagaaaccctaagggaaattacgtttataatctttggttcacactatatttttcaattcaaatttagtattacagaaaaattaagtgggagaaaattaatattatgagtgttctttttcttggtttctttttttttatatttgtatctcctttcccttagaaaaaaaattatggtggctaatattatcaacctatctctttagttttctacaatattgtctcaaaattagaatatcactactaacaaacccattaataaatttaaggtatgctttcagaccttttcttttttttttgcccttagacttatacatcccattaaaatgggtcaaagaactattttcaaaaattatttgaaataattatttttttctctgtggtttatcaaattgatatatagtcgatttcatttattgctgtttatattcaattttatgtaaaaatggtttttctcttatttcttatgattacattttctattctttataaatgtaaataaaaagcatttcacttgtattgtaatttttacaatgtactacaatacaattatatcacaatttttcacaactttttctgtagaaaatgtattctagtattaataagttgaattgccgggcgcagtggctcaggcccgtaatcccagcactttgggaggctgaggcaggcggattacgaggtcaggagatcgagaccatcctggctaacacggtgaaaccccatctctactaaaaatacaaaaaattagccgggcttggtggtgggcacctgtaatcccagctacttgggaggctgaggcaggagaatggcgtgaacccaggaggcagagcttgcagtgagccgagattgtgccactgcactccagcctgggcgacagagctagactccgtctaaaacaaacaaacaaacaaacaaacaaacaaacaaacaaataataagttgaattattgacagaccttaacagtaaaacccattttttaactttgagattgcatgtattctgtgaaatttgaggctaatgtacctcccccaccaaaaaaaatggaagtacctcttctccaaaatatgtgtcatgggctttcatgctgtcctgtgcacttgtgacaactgtattgattatttcgttgtggggtttgtttttttcctttaatttaaacaaacattgatggaagcattcctctttgccaagtattttagttcttgttaattactgatatagcctgtaaactgcatggggacaggggtcctgtctgtcacatccatcctgtcatccccactcatagtacctctggcccagcataggtgctccataaatgaatattgaatcatggatacatgattaaacaattctctgggctccactctccatgtggaaatgggagaatcattcaatcaaatccatgttacattctaacaaaattctgatgcatggccacctggaaaaaaattgggcctccctgcacagttcttttacattttaatgatctctgtgtatgccacttaaacacaaaatagccctcaggttttcaaagaggattaaattgtgtttatgggagcctctcattaaggaaaaagtgatcagaatacttggctcttggagcctggcggtcctttgcgagacataccacatgaatagactaccactctttctattaaggacaatccatcacattttccagttgggatggatgataatgccacatttagttttctgtatttttaagcatcatctcttcttaacgggatgtgtaatgtgattcaaactgatgtgatgaggcagaccattaacgaaatgtctttcagtctttgcttgattaataaatatttcctctgcattttattatgggcagcttgcagagggagccaaagtttattgcttttttgtttttaatcagtgaagtaacatcagctattatgcataatcagttccagcttgtacatttgtaatgttttgatttagaatagtaaaaaggaaagaggacagtgaaggctgccacgttatgagagaaaattctggtaaatgcatgacagttcaggtgtctctcatttttgctttttaaatgcttttctactttgcccccagctcccagacatatatctaaaaagaatatctttcttacacctaccaatttttaccagtcttctacaaacagtagttctcaaagtgtggttcccaaccagcaacatcagccagtgtagcctgagaaattgttaaaaatgcaaattttcaggccctacatagtcccactgacttggcaactctggaagttgggtccagctgtctgtttttactggtcctgttggtgattctgatgcaaactcaagttggaaaactattgttctagaaagagtgaaataacatcctcatcttaatgattagattcaagtaaatgagtagacattcaaattcccttacatttctaaattgtcatttggcttttttttcctatgtgctatgggtgtttagtttaatttgagaatcaatatgactcatgcatgacactggaaaggtatttttattttcaaggtacagagagtaaagtctaatggagaaaaacacattttactcattaaaaaaaaatgaatcatgtcatcggcataaagacgtcattcttcaaactggcgttaaataaatctctgtaacaaagttaatgtggctttctaaattgctgccatcatcatgatgttacagccagttcttccagagtagaattatctggcctcttggttttttttttttttttttgtaattaagccttttatcctattattttgcatttaactgttattaacacatatcatcaaagatggataggacagagaaaggagatgtcacctttggattatatctgaaagggatgttataaaaataaaaaagaaaccaaacaccaaatccaatccttagaggttcagataagaaagcaatgctcagggaagttaaatgacctgtaaaattcagatattttgtgttttagttcagtatgttttccactgtttgttattagtaattcttgtccctacttagaaaaagattttagagttatcaactcagaaataccttttttttggcatgaagtcatgagtgaatttgaccttagcatttttcttactgtccctcttctcactaacagacatggacaattgaaagctacctaaaggatttgtagcagtatttacttcctcaaatgttgccaagcagaatagcaaattcattccaggacattttttaatgtgtcaaaatcatcctagttcttaaaagtatcggaaatgaacaatggtccatcatacagttaaaagcattggttcagagcctagtgttttttttttttaatttatgttaatcacttaaaataggtaattgactctcaaattaatccctggaaaattaaaggaacatctggt

SEQ ID NO: 1879681 - DNA, 4001 bp, Homo sapiens
ttatatgtattcataatgttttcccaccaaagatctgtgacacgtagcagcagtttgtgattgctaagcattacacagagaaaaggagctatgggatggggtataagaatgacaggtattggagcagtgctgaataagaaaggttagataattcaggctagggtagacagaacatcctgggtaaaatgaggttattacagtgaaattctagttctacaaaagtaaagtgactggtagacaacaaataaatcatgtttatcaccttatatttaatttttatggtttttgtatggcaccttaataataaaaaggactgtggtagaagactgaggcattattatccatcaaagctgtccacttagacaatgttactcaaggtcctgctgacttattgaaattagaaaaatcacttttgtaattttaaaaacaaaacctccaatttaatggaaaaatctgttttcaatcacctcttttaaaggaatatattttgctctgctcaatttaaaaaaatcgttattcatgggatgaagggatagaagaaatggactgagaactgtagaactcttggcacatgactccatccaaacctctgagttactaagagacaaactttagcatgccttctagcagtgtcagatcatgtccctaggagaaccccagctcccccatgaaaatgcctgcctgagaaagctcaatgctaccaggagaatttactatttgttctagccaacacctgatgataggctcctgacctccctttctcagggcgtttattaagggcttaccattatgaatccttccttcttctctttaaggtgtttatgcgtctgctacaactcaagaggtccttctaaaggacctgagagccattcctttgaaattgatcgtcaagaagggcagagcctctacctcccaatctcagtgcaagaatagcaagctaggctgggcgtggtggctcacgcctctaatcctagcactttgggatgcccaggcgggtggatcacctgaggtcaggagttcgagaccagcctggccaacgtggcgaaaccccgtctctactaaaaatagaaaaattagccagatgtgttggcatgcacctgtaatcccagctactcgggaggctgaggcaggagaatctcttgtactcgggggtgggggtggggcggaggttgcagtgagccaagatcgcgccattgcactccagcctgggcaacaagagttaaactccgtctcaaaataaataaatacataaaaaagcactctaacttctatagctgctagctagcagacacatctggccgaatcgcatctatgccaatcaaatctgtaatttttcacttctccaacactattgagccctgatcaccttccttccttcattctccctttgaaatgcccagtcacttctgtacaaatcggaacagaggtcagttcttttcctttctgtaagtagttactgaaaaaagtctttttcactgcttcaatgtctagctgggttgtctttgacaggatccaaaaaggaggggaattcagcccatttgccttttccatctgcagggcaaagttttgagttgactctgaggaagttacgccttttgtaaaaacaaaacatccaaccctgaatgaagcccttccccttaggcctaggccctcccctcaccaagcgacacctagaggtgacaagcaggcgctcgctcagggacctaggtaacgatacacaatgccatgtaacaaactcctgctcatcgagggcatctgaccctgggtgcacgagtgaattaactgagttaatgttgactaagttcctggttagtattcacggagcaattggtgaccccaccaaaacgtcgttcaaggtgcaaggtccagaggcctcgaggagtgggatttacacatcggagccgtccgctcagacgccgttagtggagggttccgccgacttcacgggagtgaggaaagtcacttttggaaatcgactttgccttcgcccgcgaagcccgccagcgtccggactcgagttgcccccggagccactgccggaagtttaccagctcactttcggcgtcgcgcccgcctccgtggagcaggccggaagtggctttccggcagccgccgccgcagctccgtaaagcaagatggcactactcactctgaggctattatctccgttttatatctagtattcctcttctcaccagttactctcgatttccgtcccgcgccctaattttcttcagcaccacattctcatgtttttctttcattcagccttggtggagtatggtctggaggcaacctacggctagcctgagcaacgtggggcaccattttgtacggaaactgaaggcagggcgggggagtgtgaggcctcccgaggaggcccggcttgagagagagcgtgggagggagagcgttgttcaccgatgatgtatttccgcttctggtctgcctggtcgtttttggttggatcggcttgttgcggggagggagggggggagattgtttgcagcatagaagctccgcggacgggaaggtaaactgaggtaaggctgtgcggggggcttttgcgcatggctgggtagaatggacgggagtagggtccttgggattgcggaagagtgtggaattggagacgggaggcttagatgtctcgggttggacagagaaggtggggtggggctcggggttacaaggtgaatcgcaaagccgggctggggtggagtgggacgagcgggagaccacaggagatggaggagagcctaggggtgcagaggaaagtctcgaaggcgctggttgaggagggcctgggtcgagaggagctgggacgggggaagagtagaatctaaagtccttgagggctaaggagagaagttgaggtagggactggtcggaatacatgggtgggggcgtggtgagagtgtagtttttgggaggctgtagagttggaaggggctggtggctgcggttttgatgctgacatgaccatatacttggcctttgtttctctgcagctccccagagacgctcatcctacagcctcagctcgggcccagccttctctctccagctgccaccacagcctggaggcgcctgcctccaccctcccgaatggtgctcctcctagcaggcctcggtccaggatccaagccccctttgccccctgccttggagctgttgctccgggtttgtcacagtggactccctgtggcgggaagggaagaacttttgcacagacaaggcttcagctctaggaaccccactgacaacttgaatctcaacctctaacctagtgtgaggttcttcctgtgcccaccttttctgccttttgagaagagaaactcttctcctggccatctagagcccaggaagccccaagctggggccctggtcccagcatgtcagtcctctcttgtgcatagggctctgccctccccctgtcagcatggctgagctcagacaggttccaggagggcgggagaccccacagggggagctgcggcctgaagttgtagaggatgaagtccctaggagcccagtcgcagaagagcctggaggaggtggaagcagcagcagtgaggccaaattgtccccaagagaggaggaagaactggatcctagaatacaggtgagagcactgagagcagggagagaaggagagcccagattccagcctccctgaagagtgttggatgaatgagggcttagacttactctgtccccagtctgctggggcaggaaaggagaacaagtttgtcaacaaatcattgcagggtaatgtaacaagttccaaaagagttgtgtgtctgaagtgctgatggagtgcagagaaaggcctggccttagtgcttgggaggcattgctgaaagcttcactgaaggagcaaagtgtcacttggcagtagatggaggaggcacactttaggtcagtggagggtaggtgtgttgtacttctttccagataagcagaggggctgccaccttagttagggatgctgtgtgaga

SEQ ID NO: 1879682 - DNA, 4001 bp, Homo sapiens
gtgaaaatccatcataaaattttgacctgaaagatcccttttaaaagtcttcttagactagtctcagacatatgttcagaaataggatcttctaaatggggcctgggaatctgcactttaaatgctttgtgagtaactcatgcacagccagtttgggactttctcactagtctaatcaacctcttttcttttcttttttttcgagacagagtttcgctcttgtcacccaggctggagtacaatggcgcaatctcggctcactgcaacctccgcctcctgggttcaagcgattttcctgcctcagcctcccaagtagctgggattgcaggtgcctgccaccatgctcagctaattttttgtatttttagtagagacagggtttcaccatgttggccaggctggtctcgaactcctgacctcaggtgatccacccgcctcagcctcccaaagtgctggaattaccggcatgagccaccgtgcctggtcatcatcctcattttacagaagaaacttaggtccagagaggtcaaaacacagcataagcagcaactggaagctagaatttctgactcctggtttcctctccttagaccatgtaaagtacatgattagtgaagagaatagctaatgaacactgagaactaaataccaggcattttgctaagttctttccatatgtcaacttatttaatccttccagcctcccttcgagggcaggtggtatttgttatccccttttacaaatgaggaacccagagtaagagaggttaagtaacttgactggggagttaggtgtcaataagtgcagatctgggacacaagcccaggcgttcttcttcagattcgctcttcgccgtcatccaagaaaataagctaacacagcacaggggttttgtgaggaaagaagaacgttagctgaatacaatcttatttccccctgtgggataaagtcatcttcgaagctccatcgggggcgggggcgcaaatccagacccttctctaacgctagatggcgcatctcaggttctgaacacccacctgtggataaagcctttggggactacccactggctaccctgatctcaagatatcatagtcaattctctctctctctctctctctctttttttaaagacagatggtgggggctgggcgctgtggctcacacctgtaatcccagcactttgggaggccgaggtgggtggatcacctgaggtcaggagttcgagaccagcctgaccaacacggtgaaaccccatctctactaaaaatacaaaaaaaaattagccaggcatggtggtgagtgcctgtaatcccagctattcaggaggctgaggcaggagaatcacttgaacccgggaggtggagattgcagtgagccgagattgcaccactggactccagtctgggtgacagagtgagactccgtctcaaaaaaaaaaaaaaaaaagacagatggtgtcctgtgtaaattattcctagtcttcggctctggggatccttgcctgtgtaggagggtaatcacccagaagaaagctggctctcgggagaattgttgagtgggacacttttagctccaacttggctgttttgtgaggtagggaggtttgctcttttcatttggcattttgaagtacattaagtacaattaacatcagttgcttgtgagtacacagtatcagcctatccttagacaaaatgccttggcttcaatcttctttcaagtgatgaaggataacttggctaacacccttcatttttttccccttaaaacatgtaactctatgccatttgtggttttatattagccttttggttatagctattggtaggtctagaaacctcaaactgatataaccacttggccatatcttatccacgaaaaaattttgtgttggcccccccaaagtgtttaattagttaattaattagttaatttgtttgccctctcaacccagcttttcctcactctaggaagaactagaaagagagggattaatttatttttgaaacactagtttccaatgagcaaaattaagaataatttttttttaatgtggatttcctgattctcttaaaaagtaggaaaatcaggcaacaccacaccttccttcccagcagcaacactttgctgaagctgtgcgtgctctttcaggctgtgctctgggtgcacaggccccagtactccctggcactgtgcttcagctcggcttctgcaggcttctgcatttaactccctgatggacaagatcaaggagtcttccaaaatgtccaaaataaacaactgattccaggccggtgcagtagaggtttcaaaattcaaatgcagaatgttttgaagcaagctggaatgttcagcccgggcaccagacattgctgactggggacttcggtgcactcctctcctttgacatctctccttcccttaggactctctctttctctctctctctctctctttctttctttctttctctctctctttctttcttttctttctttctccttccttccttccttccttccttccttccttccttccttccttccttccttccttctctccctccctcccttccttccttcctttctttctctctgtctttctttctgacagagtttcgctcttgttgcccaggctggagcttgttgcccaggctggagtgcaatggcacgatcttggctcactgcaacctcttcctcccgggttcaagagactctcctgcctcagcctcctgagtagctgggattacaggcatgcaccaccatggccggctaattttttgtatttttagtacagacagggtttctctatgttggtcaggctggtcttgaactcccaatctcaggtgatctgcccacctcagctacccaaagtgctgggattataggggtgagccactgtacccagcctccaattcacttctctgcctgctgatgaactcctgaaggggccaccatcacatcactgttcaggactcatttaatcgtttctatgtctggagggcagaggcattcttttaaattatacttttgtctccccatccaacactttgcacagttctttgcatatcgtagatgtggaaattagaaagaatgccatgctgggaatcagccataacacatctgggtggtgatggaagtcaagggttgaaagatcatccagaaggatgcaaggggccaagtagtatgaagaggggcaggttgagattgaaagaacgagtaatagagaagggataattgagtataggggttcaaggatgaaggcctaggcagaggcctcagaaagtacagtcttgcaccttgatgggggtacaccttggtgggggtcagagagttccaaagcaggctgagatgccccttctggaagattccttgactcttctctttctctccccctccatattcagttcttcagagaatttcattgactctgctttctaaatgctttcagactccacccatttccacaacctgcatcagcaccaccctagtttaagctgtgatcatctctcacctgcgcaatggaaagaacctcccatccagtgtcccttgtccacccctaccatctgatgctctattcttacccagcagccagagtgagccaagctcctcaggttagaaggtcctactagatttggcctctttgacctctctgatcacattcctccttctccttctgttttatgccatttcagacacactaacacacctttaattttctgaacatgttatggggctttgcacttgctgttccctgcacttggaatcttcttactccagaaatctccagcgctcacacactccctgtaatcaggtctcgctcaaatgtcacttcctctgaggggtcttttctgaccacctcacctagcaaagagtccttcttcccactggaacccccaaacatacacactatttcttttcctttctgttttttatttgtttgtttgtttgttttggagatactctcgctctgttgcccaggctggactgcagtggtg

SEQ ID NO: 1879683 - DNA, 4001 bp, Homo sapiens
tacaggcatgagccaatgtgcctggcccaaaatggtgtaggttttttttttttttttttttttcctgagacagggtctcgctctgccgtccaggctggaatgcagtggtgcgatcttggctcacggcaagctccacctccctggttctcgccattctcctgcctcagcctccagagtagctgggacttacaggtgcccaccaccatgctcagctaatttcttttgtatttttagtagagacggagtttcaccatgttagccaggttggtctcgatctcctgaccttgtgatccgcccacctgggcctcccaaagtgctgggattacaggcgtgagccaccgcgcctggcctaaaatggtgtagtttttaatcctttatcagatatatgctttgcaaatattttctcctagtctgtggtttatctttatattctcttatttgcatttttgtaagagactgggtctcactacactgcccaggctggcctcgaagtgctgagctcaaaggatcctcccacctcagtctcctgagtagctgggtttacaggcgtgtaccactgtacctggcttattggcacttttgaagagcagttcagtttatctatttgctcttttatggtttacgcttttaatatcatataggaaatctttgcttaattcaaggtagaaaaaaatttctccagtgttttcttccaagagttttataatgttgttttcaatggtctttgattcattttgagttattttttgtatgtggtaaaaggtatgaattaaggttcaatttttctttttgcatatggatattcagttgctccagtaccattgttgaaaagactatacattctccactgcattgcctttgtgctttttaaatacatcaactatctagatatgcataggaatatttctggattttttttctgttccttttatttatctgtctcagctctatgccaattaccatgccgttgaaacatcttttaatttaaacatataaatacatgccaggcatggtggctcatgcctgtaatcccagcactttgggaggctgaggcgggtggatcacttgaggtcaggagttcgagaccagcttggccaacatggtgaaactccataactactgaaaataaaaaaattagctgagcatggtgttgcatgcctgcaatcccagctactcgggaggctaaggcaggagaatcgcttgaacctgggaagcggaggttgcagtgagccaagatcgtgctactgcactccagcctgggcaacagggtgaggctccatctaaaaaaaaaaaaaaaaaaaaaaaacccacagaaaactccccacaaaacacatcttaaagccagttctacatgccccaaggtaaaggggaatactgatgataattataaagcattcttagtttgggagtcctataatcacttaacatctctgacaaatatcacacttaatattatgcagtttattattttaataagttatttacagtaaaaggcattctggacactttatataaattttagtattagatgacttaaactacacttcactaaaggctcctgcaagattctatgtattacatcattagaaatgagatgctaatctcttcctagctcttccctaaacaggcccctaccattgtctttcccgtcttagttaatgtgaactcattctcccggtttttcaggcccagaccttggagccatgcttgattccactttcccacatccttaactactccattagcaaatcaggtcaaccctatgacacaatatattcagattccttctacatccacagctatcacccggctcaaaccaccaccaccttgcacctgcattattcttacagcttcccaactggttccctatctaattatgtcagagacagaattctttttttttccttttgccctctcaacccagcttttcccaactttgggaaatctgggaagagaaagcctaagagacagaattcttaggtagaagacaaaaaataacaattctgatatttacaataaaaatggcactaacaatcccagcactttaaagagaaagtgcattcactcacaaatgagatggttgcctgaaaaagaaccctcctttcatctgttgataagcagcacctactgttctttataaagcacctacctcccctcaaaaaagctattacagcttgccatgggtaaaaaacattaattaaaaaagaaaaaaaaagttaaaattgagaggtaacagtagcaacttttaactttaggaaaacattattttgttataaatggaccctcaatttttaacaaaggtaacaagacaattcaatgggggactaattaatctttgcaacaaaggtgctaggacaagtggttttttgtttgtctgtttgtttgtttgtttgtttctttttttggagacagggtctcactctgtagcgcaggctggagtgcagtggtgtatcatagctcactgcagccttgatctccgggactcaagcaatcctcccgccatagcctcccaagtagctaagactacaggcatgcaccaccatgcccatttaattttgttttgtttttgtgtattttttgtagagatgaggtctcactatgttgcccaggctggtcttgaactcctgagctcaaacaatcctcccatgttggcctcccaaagtgctgggattacaggcatgagtcactgcactgggcccgacaagggatattgacactcaaaagaatcaatttgcacactttcctcacaacacgcaacaaattaactcaaaatggatcaaagacctaaatgtaagagctaaaattttatgagaagaaaatgcaggagttaattttagtgaccttcggttaggcaatgatttttacaccattgataacaccatcaaaattgcaagcggtaaaagacaaacacataaattggaatttatcaaaattaaaaacttgtgtttcaaatgacatcaaaaaagtgaatagacaacccacagattggtgaaaacatatgtagatcacatatctgattttagatttgtatctagaacaaagaactcttactactcaatgacaaggcaaataacctaattgaaaaatgaccagacatatctccaaagaagacatacaaatgaccaacaagcacaataaaagatgctcaacactatcagttatcagggaaatgcaaatcaaatcagaatgaaataccacctcacatccactagaataactataataaaaaaagacaataacaggtattagtaagaatgtgaataaatcagaactgtcatatattttaatgtcaaaattactagtgggaatataaaaatgatgcagccactttggaaaagagtttagcagtttctcaaaatgttaaacagggagttaccatatgatccagcaattccactcctaggtatagacccaggagaaattaaaacatatgtccatacaaaaatgcatacatgaatgttcatagcagcattattcataatagccaaaaaacagaaacagcccagatgtccaactggtgaatacacaaaatgtggtatatccatacaacgggatattatttcataataaaaaggaatggagtattgatacattctataatatgaataaatcttgaaaacattatgctaaagaagccagatttaagagccctcatattgtataatgctatttacataaaatatccagaatagacaaatttatatagacagaaagtagatgatggccagtagcgacacatgcctaaaacctcagtactttgagaggccaaggcagggggcatgctgcaggccaggagtgcgagaccaacctggttaacatgagaccctgtctctacattaaaaaaaaaaaaaaaaaaaaaaaaggaaagtagattagtggttgcctaaggctggagatgagaaaaggaaaactgaatgctaacaggcatgagattttttaagggtgatgaacatttttttttttttgagatagggtctcactctgttgcccaagctggagtg

SEQ ID NO: 1879684 - DNA, 4001 bp, Homo sapiens
tctgaatcaattgctggttgggagaaggtagagacattctttacttctgcctagaactggggaaaatggcgtagacttctgctctgaagcagtcctcagtgctgcttcggtcagaactcccgagaggcatctgagtgctggcctgtcactgcggctggcattccaggcatttcattggccccacttcagcccacgcctggctccacggggctgggcagctgaggggagtttgtggcagagtgggcatggggcacggcccgtgcaatgtgcgttacaaaggggctctctctgaagcaagtcctctgcactccagtctatttgaggaagaaaaggacaattcccatagggagggggtttgctgaagcaaccagctgcctggtttcctctccagcattgagagggagggagggctggcttaactgggggacggccttctcatctggactgtgtcaaggccaaggttaggctccaaattccagaaaacctctctgcagggtcttctttcagagtggtgagaatggaagcaggctcccttcccctccagcactaggaagccccgcaattggtgaggtgcaaagaaagatgggcccaggcagggaggcgggagcaggggaggtgcccagggcagtggctggaagggcaacgggagaagcagcagaggctgggggtgggggtcgcagcaggtgctgtccctggcctgtgtgaaaggtactagaaggccccatccttggtgccacatggaccccagaggcttgtcttagtccatggggtccgaggtgtaagacacttacgtttggcgtcacctcttaggcttggatgaatttcagaaagtgctagactggagaacagtggaaaaaatcagtggaacaagatctggagcactcactgctcaatgtcaatgttagagagcacaacgacaccaatgggaggagggtgaggaccagaggctgattgcatgagctctgttggagtgcaggacccactaacgggttatctcagggttcctggaggccacggctgtgccttgtggtccaagacctggggaagccaccactgtgtcttccctctccatcctccggtgactttggtccaattcctgttgccatggcaatcagcccagctggcctcacagttcactggcctcaaagttggcatctgtaggtgaagccagtgggacccagagaacttaattcttctcaactgagctggcttggaggaacttttctcatcagccactggagcagagaacgtcaccagcgtctcactgacgtcaacatcctgggcctggctctagctgaaaaggaaaattctccccaaggcagacacatctcccgaagcccacacaggcactttctatgattgcactggaaatctgtctcctggggacagggagcgcgtacgctcacagtcaagtcacaatgttgagcagtctccaggactccacgttcatctctaagaacaggagccggtggttgggcgcagattcttgagccagattgctcgcgttcaaaacctggtccctttttattaattgcatgcttagttacattttctgtttgtacttttgtttccttctctgcaagacggggttaatcacagacacttgtacatgatgtaatacacttacaatacttaggacaggccttcctgcatagtaagtgctctgcaaacactggctactattctccctacgtgcaaacttctcccagccaaaagccgcccacaccaagcccctgtgcctttttccttccgcacccacgagcaggctgctcctggggccctggagctcactttcccagccgccctcaccacccaccgtggcgcagaagagcttccgaagtcctggcgtctcccactggtctgggcatctctcgcttcatcttccctcttgggccccacaacgtgcagcacttctagggcagtatacttgctgattgcttccttactattgctcacaacaaccagctaagacactgccaaagaaacactcacagctggccggtccacggcatccggaggggactcgggggacaggcctgtcctgcctctccccagcacctgttgataagaaggaaatgtggggaggaaagaaaggatgcaggaggccgaggtgggaggatcgcttcaggccaggagttcaagaccagcccaggcaactagcaagactccatctctacaaaaaaattttaaaaattagccaggcatggtgacatgcgtgcctgtagtcctagctactggagaggccagggcaggaggatcgcttgagcccaggggttgaggctgcagggagctgtgattgcgccagtctgggtgacagggtgagaccccgtctctaaaaataaaaattgggtgatggctcacacctgtaatcccagcaattttggaggccaagacaggaggatcacttgaggcgagaagttcaaaaccagcctggttaacatagccagaccaccaccttcagcaactgtctctacaaaatgaaaataaaaataatgaaagagagaggatggaggagaaggctgagaccagtaacagattccaaaaggactaattgacaaggagaaaaagagtcagcacttccctggaagagaaaaaattcgaaaaggacagtggttgaaaagtcagcatgtctgcgtgaaagggaagcaatgaagtagcgccaactcctcccccgtcccgggcaccgtttagggagaggatcagagttctgccagagaatcagaaccagaaggagatatagattaagtttatttcaaggaatcggcttacgtgattgtgggggctggctaggcaagtctgaaatccagagggcaggccagcaggccggaagctccccggaggagctgacactgcagtccccaggcaggatttcttcttcttcagggaaacctcggttctgctcttgaggcctttcaaccgattgcatgaggcccacccacctcgcagaggagaacctttgacttacagccagtgatcatcagtgctgaccacatgtacaacgcacctcacagtagcacccaggcaagcgtttggttgaatcatgggtatcacagcctcgctaaattgacaaggaaattgcccatcacagggtttaagatctagtgctttaagatctactgacttcttgttgttttgttgttgttgtttttatagagatgggttcttgccatgttgcccaggatggtctcaaactcctgggctcaagtgatccttccgcctcggcctcccaaaatactggggttataggcatgaaccactatgccaggccaagatctagtgactttggatacggaccaccacggaacagttcctcttccatgtgggtgtgggggcatgaaggactgttttcaggaggatcaaagtcacctctaccccagcatgggaagtcccagaaacttgagttccaggtaaggtagtgcagaaaaaagcaggctcatgagccagtgctgtctctctctgtgcaagggggaaagagcccctctgaggcctccacacacagtcagcaggacacaggacacagaggtcagcctgttgtggccactgtgaaatgtcccgttggagttgacaggagcctgctctgacctcagtcctcctcctccaaacaggtgaccctgtaatgctctggttaaaaagcaagccagctggactgtgttatcttttagtgtgggaaaaatgctcttaggccgggcgtggtggctcacacctgtaatcccagtactttgggaggctgaggtgggtggatcacttgagatcaggagttcgagatcagcctggtcaacatggtgaaacgccatctctactaccaaaaaaaaaaaaaaaatacaaaaattagctaggcatggtggcatgtgcctgtagttccaggtacctgggaggctgaggcaggagagttgcttgaacctgggaggcagaggttgcagatcacaccagtgcactccagcctgggtgacagagcgagactctgtcttaaaaaaaaaaaaaaagctcctaatatgtcagat

SEQ ID NO: 1879685 - DNA, 4001 bp, Homo sapiens
gaccagggcgaaagctcacacctgacttattccactataaatgttaccctgtgacgggaaactactgtccactgtcctgctggggagtggcctggctgctccaacagcctgaggggaatgagggctgaagatagctgaactctagcttggcatgcagaacacctctgtctgggacctagagatttcttctcttctgggatttcagggcttcaaggtcagctgttgcttccattgtggtacaaagaccacacatggctttagaattggacaagcctaaatccccaggcccatggcttattagctatgttatctgaggcactactactcctttgtactttggcttcctaacctgtataaaggggacaatagtaatacctgtcttgggagttattttgaagatgagataatcgtatcaattgactggcacagtgactagcacacagcaggttctcaggaaatggcagtggtttttatgatgaccattagtgatctatgctgggcgagagctcaccaagggaacactatagctgtggttctgggtaaggcttaccctaacaaggcaggggctgtcaatgctaggaaaggcgaatgggtgccagtggagcccaggagggccagccgagccaaagcactgcggcttttccttggactcccgctgctctctcccacctgctcttaggggttctggcttctcgtgcttgttgaattagggatgccatcctgcttccaggtgggtcgaggaactaggaaactggagaagccacccctatggacctcctggggtagactattaatggcaggaggtgggacataaagtgcagtcctggggaaatggagggggctggggccactcacctctttgcacaagccatggaacagaagcgcttggaacgcttgaacttataggcaaagtccacccggccacagagctcacacttgagtttgaggggagcaccctcctctttggattctgaaaagtatagaaatgggtagggtggagaatgagaaattcctgcaggactgtggccagccccaccacggggcctccctactccatcctgcctggtcctcctgctcccacagctgtgacatacagcagcattctagcatggaaaatgccagtggttctcacccctggaatgcactcaagggtgtctggggatgccccttgtagacttgacatttttttcttccacgtggtctgagtctgaggcaaaacacaggtggggaagaatcagcatcaaatgactgtggaagaaagcaggagcccccaggaaatactctggatgctgtcacagctgctccgctggcatcatcacaccttgatctatgcagctggctgctgacccagtaaaagacctcaggagcccacgctcctgcagctgtgcagctctgtcagtgcttcatgtggaaagagcagccttgcctggtctctgctgtgacctagagctggccccagtctcaaggcagggacgaagggcaggacttgcctggggccactcctacagtcatgcctaaaacttgccaatgattcccacaggaaaagccattcttgggatcctgtggttggctggagggggattgggggagcagaggacacatggttcccgtgatttcccctatccctctttttgagggaaggaggctgaggaggtgctgggggaaatgtttacagactcgctggctcagggttcctctggggaaacagagagaggaagtgtgtgaggcctgcctttccagccacgctgggaggccgagagattcagggtctgagatgcccaccttgcagatagggctcctccatctccgagtcagtggtggtggtgtgatcctgctgtggaagtttctcaggcaggaacccctgtgcatacttcttcttgagattccccaccagcagggacgagcgtcccacctagaggacaggtaacacggaggccgtgagggtcaggtgggagcggcttccttgctatccatcctcatcacaattacacgtataaagtatccaggcacagaggccagccctcctcaaaccttcccccatgtcatcatccaagtgtgctgggctcaaggccctattttgctggttggctcacgaggtaagatgctaatgggcaaagtacagggatggcttctgtccaggaccaacggatggctcaggagattaggaaaatgtctattccagtaagagtctaagggctgagatcaggtttcccacagtgccagatcaagcaccaagacccagtacccacgcatctccaggcaaggacagagcggagtctgtgtgaggctgtacatacgagagagagactcagcacccattttctgatttttttactgttctccaccttaccccaatgcctgacccaagccagaggtacaggccgccacagagtatagcaggaaaaaacagaccctgggccacagagccaatgaactctcagttgtcagaaccccagagcagcttatttacgcgtttagatctccttttgtggcctgtgtttaggcagcctggtagccagtcacgtggcaccgactctagggcaatgctgggggtgctatgcaatctgcctccaccccatgagatcaggtggtttctagtgttactctaggaggcccagtctaacagggaagggatgtaacagagcgagagccacttctagctaaggtgttccaggcagatttctttgccactggccttggacaacctccagtgggaaagaagacaagaagctatgtgtcttttggcattttacaggagcagttcacccatctcagttaatcaagctccgcgtcttctgcagactaatcaaaccactcatggaaccaaagaatgaggaaaaggcagatggtatcccagaaaggtgtcttctccaacagccagatacttttcatcagaacagaggctggtgtgccgctggctctgggctcctccacacccacagggcagcaccactgtctccagtgcacactgcacagaagcagctctgggtgctttggtcaataacccatcttcgtggctcgtggatatttcttgttagtcttaggcttccatcgtgacctttctgagtgcccctcaatctcattaactcccctttcaaggctctgtccccagaaaacaagcttcaggttgtgaccctgtttcctcacattcatttctgatacacgtatctggagaattctgttctgtgcaattccttttgttcctaactggccgaagttttgccattcagaggttttggcattcaaaactcaatgaaatctaatttcccaaaacccatcatctctcaccaaatatcccacagtgaactcccttttaaccaagggttcacacatcaacaggcagggacacacctgagtttgtgtgggaaacttctaaccaagggtcttgtcaattattcctgatcactgacccccctcttctggaccttggaaagataatcctagaaagaaatggctctatattctttgggggaggaagttagcaaggaaagagcaaattgttcacattttcagaaattttacatggaaatgtaaaaatattctaagacacatccaaaatatacttaaaaaaaaaaggggaaaagaagtagtccgtaccgggaaaggctccgccccctcctggatcacaaacccttcgataacatgcgtcaggatttggggtttcacaatggcctgtggtggtttattctcaccattctggggggcagtgccggcgatgctggaggcagagtttccgttccctgaggtcatgccggggctgctgaggtcggtcagtgcatgaacaatgccctgccctgtctctgcacgagagagagtaggaaaacaaagcaggggagatcagaaccagagtccacgcccagggagggacagcaaggactcaaactgcgcccggcttttaccgtggggccaagcgacaatgcaaaccaagcagtcccctcccctcagtgacccatttaaaagtggcacagtttcaatggacacatcaccaagtatgagtatag

SEQ ID NO: 1879686 - DNA, 4001 bp, Homo sapiens
cccaccatctcctgggggcagcatgcctgtgtggaagcactggagagccggtgaaatagttaagagattttattctaatagctataattacagtgcttgtttgtcgaaatgaaaactgaaaacaagtatacaaaacagttgattactaatcgtgtattgaaagcagtaagaggttccacgacaccaaatagaccagttctgaggtttccccaagataaatttaacagctccagcttcagtgtttatcaaaatacaaaagaaaaaagtagaggttgtctttttcgatggcaaatcggacccttgcaggctgagggagagaaagctacatcacacacagaggtggggtgctcccgaggggctgtgggtctaggtggaccgcctgcccggcttgcacgcgctcctgctggtgaggccccagacatcctgccaaagtgtctgagcgagcacgagtgttggggacgacggacccactctggccacacggcgaccgagggacagatggggccctgcgtcccataggctgcctgaaggtgggtagggcggcctgcggcatagtggggtggctgtgggctcccagcctggcccctgggaaccgtgggagcacagggacaagcacatggctatggaatgcagggtgacccaaggacaagcgagttgcggggatctctactgtgaccatgcagaattgatcgcagtctgctgcgccaccaccacctcatgttcccgaggggaacagctgggctggcgactggcatccaggccgtaactgcaaatctatgctaggcggggtctcccttctgtgtgttcaagtgttctcgacttggattcttaactattttaaaaaatgcactgagtttgggttaaaaaccaaccaccaaaatggatttcaacacagctctaaagccaagggcgtggccggctctcccaacacagcgactcctggaggccaggtgcccatgggcctacatcccctctcagcactgaacagtgagttgatttttctttttacaataaaaaaagctgagtaatattgcataggagtaccagaaactgcctcattggaaacaaaaactatttacattaaataaaaagcctggccgcaggctgcgtctgccacatttacagcacggtgcgatgcacacggtgaccaaaccacggaggcagcttctggcactcacaccacgagccgcacgtttgccacatgagagtaaagcagagggcaagaggagtgagagggaggggggtcgcgttcacttctggttccggagctgattggacagccagtccagtccttcatagagcccgtcgccgctggtggcgcaggtggcctgaatgtaccagttcctgtggcgtagtgagtgcagccccagcttgtctgtgatctcggccgcattcatggcgttggggaggtcctgggggaaggaagggttggtgggaagggctgtccacaggacagagaaaggggccccaccagcctccagtaacccctaccaccaggcggaacccacactggctcctcacattccccaggctggcccgggcgcctacctgcttgttggcgaacaccaggaggacagcatcccggagctcgtcctcggccagcatcctcatgagctcctcacgggcctcgttcacacgctctctgtcattgctgtccaccacgaagatcaggcctgccgggcagccagtgtcaaatggtcatgggaacacagcccccctgccgcatctatgggcatcgatgccccatctatgggctggccccccctctctagaagcaggagtgcccatgggaccaggccccagccacttaccttgtgtgttctggaagtagtggcgccacaggggccggatcttgtcctggccacccacgtcccacacagtgaagctgatgttcttgtactccacggtttccacgttgaagcctgggtgcgggatgcagggtgaggccttgtaccttggcccagcccagcccagcccactccctgctggcccccacctcacctatggtgggaatggtggtcacgatctcacccagcttaagcttgtagaggatcgtggtcttccctgcagcatccaggcccaccatgaggatgcgcatttcttttttgccaaaaaggcccttgaagaggttggcgaagatgttccccatgcttgtggacaggtggaaggacactggccagggacacctggagagacaaggtgctccatgtctggttctgtgctgcccagcagtggttgctcagaacccacccacccagggatgcaccactgcctcaccccacctcctggaagcctgcagggaaacagggaaagagccctgcctcccatgccccccaaatccacctcaggatgggggctgagggaaaatggctgagtcaggaattgagaaactgttgccctcatcttgggaagctgtccccacagctgcatggccagaaaggctgcctcatcccagcctatgcaggaggggaggctggctgcctgaggactggcttccaggtgcgtgcaaggctcctctacaccccaacacagaaccttccagggccagagagcaccactcactgtgcctgcccacactcacaaggaccagagcacacagggccacgccagactcagcaggacaccttcagggacacactcccatgaggacacagcctcgatggggcacgcccgccatgtctgccccacaccgcaagggtaggggttccctcagcagaacacaaatatcggggacagcaattaagtcagctggcacccaccatcagagccctgcggagactccagcaggaagggcctccactgcccagacgcctctgtgaggacactgaagttgttaggctttggcctcactggccagtgggcaatttcacgaatcaggtgattttatcccgaacagggactttagaaaacactggtcactttctgaaacaatgactgcttcttcactgcacccgcaagcggggcttaccccgagtgaggaaggcttctgccttcaagaggacatgccaggagcctgtgagcacacccacccctcatcagacctcctccaccaggggttccacacacaggtggcttttggctgaatcacagccatgactgtccgctggtgactctctcatccagtcaccccagcacgctacggcaaggaaatgcctcttctccatttctcaacatcagcaagagcccacacatgcctgtgtgtttcagtgggtgtgaactggccgcccgtgtctgatttaacactgccatcatcccagatgagccacagaaccccttcaagctggatcagtgtcctttggacactttgctcttggttttgaacatgtcacctattctgaaatttaaatgagttctgaaatttataaggaccttcactgtagtgttccctttttggggacggccaggttttctaagcccagaggaagaccaccacccatggagcacagaagagactgaatacctgccctctcagtccactcctgcaaccactaccaatgaagacaccaaaatgacacacacgccttgaagggcagagagaaaagggaggaagaccttggatgtgatgattgaccaggcagagaaaactggaccgcctgggacccaagggatgaagctgggactgcctagggcagcaatgtccaatcttggctaccctgggccacaatggaagaagaattgtcttggaccacacacaaaatatactaacacaacagctggtgaaccaaaccaaaacaaaaacccccaaaatctcaatgttttattagaaatttgtgttgggtcgggttcaaagccatcctgggccacatgcggcctaagggttggacaagcttggtctaggggagcagctgcagcagggcttaggcctgcgctgagccatgacaacacacttgagccatgaaattccagaataattcctgagagttctatatgccccagcagatccacacacaagcaactggagctccgcccacccccaccccccaccaagagacaggcctgtc

SEQ ID NO: 1879687 - DNA, 4001 bp, Homo sapiens
aatggtttggcacctgggagcttcaagtaaagttgagcatgctgcccactgaaaagccaaggctctcccagacacgggtgggcttcacctgagcacagcccagtgccatcaaggccaggggccctgtgtcctcaggatactaacccaggcctgcattccctgcttcatctcagaactgatcaaggcatgactacaaggataatgattgatcctgaactgatcttggtgagcaccggctttcaaaggaggcatcttgggagccttcccttgctccaagtaggcggctgctgtgactgggagctcccttcagagcctgcacggtctcctgaaagtctccgggtggcaagctctgctggggaccaggtttgactttttaaaatagcaaaacagatttagagtcaaactgagcccagaaacggggaatcagactggatggtgctgagtctgggggaaaatctggtgtgaccaggtaataatggagaccaatttacctgaatggctcgaacaggctctgagagcaatgggaagaaaaggttctccaaaatgtttctggcaatggcagccacagtgggatagctaagggcacagtccaccaagcactagggtggtcaacaatgaaatgaacatctctggctcttctgcagtcagaaactgaggctcgggactctataatcagaactccttcaggctcacttgggctcccctccacccagaatgtcaggaatctgtacttccagagaaaacactaccaccaagcagcagctctcaggaaagctagaaatctccaccccaaatatttcaacctcaggctccaacttaggtacctatgatttaaatactctccttttaaatactttgtaaaaactgcttttccgagccccttttatgctctgcagttgccatatccactaggtggtattgcaaataagtaaagcatcctggccatgacgctgctagtgagaatccctgaccaaagttactctcctcacctcactgcaaacctccaggaagcggaaactactacccctccacagacagagctcccctgccactccatgaggcgctgctgccggcatcagttaccgaagccctcacccacacccagcctgcaatggtccactctatattccacaatacaggaaaaagcccaaggagtcagatcagttacgcccctgggatgcagaaagaaccagtgattcttcagatatgacagcaggcaaagttctgccctctccttcccatcttctatcaggaagcgatcccataaaatctcttccagggaaggaaagaggcagctctggcttcttggagagacagagaagcaggagggtgaggaaggagtcaccaagctatccaagcagccagaggcgagaaggtgggagcagggcaggaagaaaatgcagaagacttgttctcctcagtgggcctcttccctgagtttgatttttgagttgagattttacctaatttcaactcaaaaaaaaaaaagaaaagaaaaaaaaaaaagacaagagtatctctcattgacatatcactaagctccagctccaagagtggcatgtgacagaggaggcaatcaaggttttccaaccccattcccatcaagttccacggggcactcaaaagcaactggaccttagccaccctccctgtctctcacagatgcccgagcctccccaccctgggacacaacaggcaatttccccttggtgaaattccagctccagtcctaaaacactcaagtacagaccctcctgcaaaatacttatggcaaacagctttacagtatttgtacatttacacaaaaatagatccttttttatatatatatgtatttataactggttacacgttggattcataattaggcatcaccagtagtagttggcacagttttgttatttaagctcagggtcaagttctgtttcattttgtcgttccaaagtacaaaaagaaaaaaaaaatcaaaggcatttcatctccatggtgttttcttaaatacagtaatgtcataggaaacagtatgtacagatgagcagtgcctcctgacccctcctctgtctcttggagataggggctggggtccgatggagacgggtcaatgcggcctgctgctggactccgatgcctgcctcttgcgtgaaggggtgtagccgttgagacagccattggtctgccgtttggagggccctccattcaggatgtcctggatgtgctgcacgatgaggttgatggccactgtggggcagagaccagcagagcgttacgggtgcaggcatgggtgcaggggtgagtgtgggagtctgtctgggggaagggcatgcaggaaccacagtagaaagacttccagggaagtggctctgccacttgcaggcaagtcatccaacttcccagtggctctgcctgagctaatatgatcctcctccttcacaggagggctctaaggagtaagatagacaatgcctaccacagagtaagcccttaatgaatgggcttcttatcaggagatgatcagtcaccactggatgaagcactcgggccaaagtctgcagacgtggtaaccagccatggttctgacacgtcaattagctatgagacctttccaccagggaaccttccagttttccatcctaagacagagcatccctatggaaggccctctttccctccaaaaaatataatgcagagagctatcttttattagcattagaaataaattatatacctcaaccaagaggtcaatttaacatcaccaaaaatggaatacacatcaaatgctttctgatgtgatacacaaagaggaccacgccacatctctcctgggataattccttcagactgtataagctcatgaaaccaatcataagaaaataaaagacaaacccaaattgaggaccattctaccaaacaatgggcctgtacgcctcaaaaatgtcttaaaaaacaaaagatagggaacatctccaggttaaaagaggtcatatcaatggtaaatgtcttgaatttaatgactgcattctgctgatgaataagaatgcctttgttcttaaaaaatacagggttaaatatttattgctataacttactcccaaacagctcaagaaataatctttttaaatggagggaaaattaaataaattctaaagagaatgaagaaaccaggtcctattttacagatcaactctgccacactacgcctagtccagagacattcatacttcctagacaggccaaaaaaataaataaaacaatggggccaggtgctatggctcacgcctgtaatcctaacactttgggaggctgagatggaagggtcgcttgaggtaggagttttagaccagcttaggcaacataatgaaaccatctctacaaaaacacttttttaaaattagtggaccgtggtggtgcaagcctgtagtcccagctaccgggaggctgggcccaggaattggaggctgcaaatgagctgtgactgtgctactgcacttccatcttggtgacagagcaagacctcgtctctaaagtaaaataaaataaaatgaaaaataagtacaataatggtagcaaccagctccctttagaaagggctaccgtgatggcaggtcattctaaattagatcaaggagggaatctgcttttgctaaaaggtggcctcagaagcaaagtacccaagtgtcatcattgggaagtgatagtaaaaggtaatctacagccctctattctgccagagaagcacaagtgcatgtctgtccccgtaacacatgggtgcctacacccagggacctgttcctgaggccagacgtgtaggtggaaaggttctgctggctcacaatcacagacaagcagggcagccatgtctgcagagccctgtagggtcaccacatcctgccccaaattatgactgacaaagggcagacattatactccaggatgacactctgcagggactcacccagattatctgcacctctagggatgatcacatcagcatacttctttgt

SEQ ID NO: 1879688 - DNA, 4001 bp, Homo sapiens
agtaagctccttgagggcagggacacattaccaggacccagcattaatctacttcacaattgtgcaactgtgtggcaacggcccagatcatcagctccattttacagattagaaaaccagggaccccttgacaatggacatgtgcaagaagaggaaaggttttctaaagtacacacctgacatggcagcccccacacttgcacaatccttccatgccttcccactgtcttccctaaaaggttaacctatttaccccacccacaggcctctgcatgacaggtctctcctctctcccttctcctacagtggtcccagcttccggagcctttgtaattctttctaaactccactgtctctctgtctcgttcatcttggtttctcaaatgcctgatacatggtatatgtatgagtgaatgaagaatgaatgaacaaattacatttcataggtatctgaaactcaagatgtctaaaactcatcaccttccctccaaagaaaactcttcccttcacccttctgtgttcactgtctccgtgaacatcctcatcaaccatccaatctctgcagccacaaactggatgtcccccaactcctgctcctccctctccctcccctcactttgttgtctaatcaatctctggatactaatcgttttacctcgggaataccctctgattccatcccctttcctttccccctgctgccgtggctccaatctctgtctcctggcatatccctctgagtccttcctcactgtgaaagcagagtgatatttctaccctgaccatgaccctgtccttcttgaaggcctccagtgagtcccgcttccctcaggatatgcgccctgggtggtctagtccagctaccccgactcctgacaatgagctccttcctggtctccagcctctctgaacaggccaggtgctgtcacagtgccacatccgtgctcctcagactctacttctcatctggctaactcctagtcaccctccaggatcccactcaacagccgccgcctcagaaactctccccaaccccacctcacccctactcctactcagggccaactgagcttccgaggagcaccctgcgctggcctctgccatcaaccagtaacccgggtcctcactgcccactgaagggctcatctctcccactgccctgtgagcccatcagcggcagggtgcccagggtccagagaatacgcatgtcactgtctccagtgagttgttctttccactgtgctgcaacttcatttcacagtcagtctagcaagcatttcacacgcacatgcgcacacacacacacaaattgagacatgcataggaatgcacatacagagacacacacatagtcatactgacacacagatgcacagacacaaatagcagatcccacagacatacctagtgacccacacagaggcattcaagcgtgggcagccactgatatacacatatgaacatgaacatccatatccatgcacatatgcacatgcatgcacagcccacatggatgcacagaaacacacagacacacccagtcacaaatacatagaccggcagacaagcacaacaggcacacagaaatgtacatacacagccaggtacagtgactcacgcctgtaatcccaacaatttgggaggccaaggtgggcggatcatttgaggtcaggagttcgagaccagactggccaacatggtgaaaccccatctctactaaaaattaaaaaattagccaggcgtgttggcaggtgcttgtaatcccagctactggggagactgaggcaagagaatcgcttcaacctggaagaaaaaaaaacaaaatgtacatacacacacattctgagatgtacacatataaaaccatagactcatatgcactcatgcccagaccaacacaggcacacacacagacacaaggatgccctcgtagacaacactcatgtctatacaagcagcacgtgtgttgtgtacaagggcatccttgtatctgcttgtagagacacaagcagcacgtgtgcatccacacacaaggacacatatgcataccacagacactcacaagaagcagcatttacattggccaacatacacagatgtgtgcatgtagacaggctccccgagacaggttagtgaatgatgcaggtcaaacagagctgtctgctaggggcgggggcctgtctgaggtacctcggggcgctcacatttttgcagctcaggaaggcagctgacataccagcccggctgtgatggtattttgcataaatgctaatgtattaattaccatgtacagtacacagagctgccatttaaaagaaaaagttaagactttttaattcaaaagccccatgaggggtgggggtgggcgtggggtacctgtcctgcatggagggtggaggcaggcagggcagccacacccatgcccactgtacctgcacttgggttgccaagccttccccaggccagccagtcagtcctctgcctcaagattcttggtgctttctgggaactctggcacagcctggagctgctggcccagaagagggctggggagagtgtggaaggcaagtaagtcctaagcagacagagtggagcatcctcacagcagggctggggcaggcgtcacagccagaggtcgctaagcatcacagtccctcccaccattcaatccattcgctgcacagcagctggagtcatccagacagtggatcagactatgtcacgccctgcttcaaacctttcaaaggcttcctattgctctcagaacaaagttcacactccttagaagggcctgcaaagcctggcatgaccgcgttctctcctgcctcacctgacctggcttctctcccatctctccatgcctctcctgtcacactcctccttcctcactagtcacctgagcttgcccgctcttcccctaaacttctcatcagcctagcctcagctcacctgtcaccacctcgggagacctcccctgactgcccctgaccgccctatctgaaggagcccttctccccctcaccctcttttacatcaccagggtttgggttttggtttttttgtcttcatagaacattttgctgtttcaaccctccttgttgatttttttactatctgttgcccccactgtacgatgagctttagaaagccagaacctgaatgaccttgtttcctcatcatatcgcagcccctaggatggggcctgacactgtgcaggtgttcagtggcatgtctgttaaaggagtgaatgaacttggaatgaacgagggatgctgtttctggccagctctgtctcagcgcctaactcttgcagcagcactctctccacctgcctggcaggaccaccctggctgttctgcctcccatcgggggctcacatcccagatccggagactgaggcccatcatgggatcatgtccaccatcccgtgacctcttagaggctggcgtccaggcctcccgagcctcccaccagcccacctctcctgccacgtggaaagaagcctcaaatgatacaattgaacagcaacaacaaaacagctcctccaccctcaccttcatagtccacttccatattaattgtcgtatgcaggcccagtgaggcaggcatcatttcccaaatttcgtaagaaattaaggtccagagatatatgtgactcccctaacgtctcacagctcatcagaggagtcaggatttaaatctgtgtctgaggccaggttcggggcttcctccacttaccagtgacctactctccccgaaccctgagggatgctccaggaagctagggctcagcagtcatggaaagcctcccacatgcctcccaggccacctcttcccccaggaagcaggagagtcgaggtgggcttgccgggcaggtggagagagcacctgagacacagctggttggctcacttcccaaacacagggtagagtcctcaaccccaccttaaggcaccctcccacacccactcacctaccaggtgccaccattctaggcccta

SEQ ID NO: 1879689 - DNA, 4001 bp, Homo sapiens
actgcaaatgacacccaacactcagttcttcaacaccccacaggcctggttgtagattttgaggtcaaggttgggtaagtataaaacccaatgaatttttataaaactagtaacggggaaaacaggaagatcagggaaggtggtgaaatcttcaccaaggccaatgattgcacaacacataacttcttgaagcacttttttccacctgctcaaacactaaacataaggagtgtttcaaattacttgaggattcaccaatccctaactttcccttcctaaaagttcttccagagtttctgtcagaaattccttttaagaaaactccaaagaatttcaggagtggtagcataataactggggagacccctctctctaattaatcaaaaacgtagtgtagcttatatagcttagagaaattgtggatctatgaggacatgtgaaggtactgggctataatgtggtcaatgtgtctgaaaaaataacagttctgggccaaccaagtgtggctcaagggatcactactaagaatggttcctctttgggtagagcagagggaagagacactaaagggaactgcaatcaccagcaaaggaacacagtgaccatcaatgtctgaggactggcacaatgaaggataagaaagaacctctctgtacgaggcctactccctttcagttccctttcttccccattgtgtcccagtggaggacctgataatacacctgacccatatctaagacatgcagttggcagggctgatagtaggtaaggttcacagtatgttaaaaagtcacacgaggccgggtgcagtggctcaatgcctgtaatctcagcactttgggaggctgagggtaggagaatcacttgaggacaggagtttgaaaccagtttgggcaacatggtgaaacaccatctctaccaaaaatacaaaattacatgggcatggtggtgcacacctgtaatcccagctactcggcaggctgaggcataaggatcacttgaccccgggaggcagaggttgcagtgaaccaagactgagctactgcactccagcctgaccgcagactgagactctttctttaaaaaaaaaaaaaaaaaaaaaagtcacaaatggtttttctctccctggcccctcttctctctgtggtaggtaggttcaaattacagcctaacctcagccatctctgttctctttgctcaagcatatgggtcactgctttgggttcctacaccagtcagacatccacaggctcccagatacagacatgagcctaggatgaggtaatatacccgattaggctctgagcctaaaacacgttccatgaaattacctgagccttccttgcacagtactgtgatctaagatctaacacataatcaagtcatgcactttgtttcttatttgctattgttacatgtgtacagtgtccttaggagtctacagggaagagggataattggcagagattggcattggcagaatcctgggttctccaataaccacctttcacccccagcagtactctctagagtaagatggaggttgaagatgtgtgctgttaaatttcctaatcctggctgggtatagtggctcatgcctgtaatcccagcactttgggaggctgaggtgggagaatcaattaagctcaggaggtcaagaccagccttggcaacatagtgaactcctgtctctactaaaaatttgcaggtgggtggcctgagcctgtagtctcagactcgggaggttgaggtgggaggattgcttgagcctgggagatcaaggttgaagtaagctatgatcatgccactgcactcccgtgtgggcaacaaaaaaaaaatttcctagtctttcatgcacgtgatgctggcttggtgtttacagcttcgtattcctgaaatcgatatgtgccagatatcactgcagactagtccttatttgatagaaataaaataatttacattttattttcatgtaaatgtgacagcagcagcaataacataggcattcagtaaatattcttttgaattaggccagatcctaaatatcctgaaagaaacatgacatgtcactatctactccttcaagacaaagatatactttttttctttcttcacttcagtaagctggtctacaatgatggacttttatttatgcaacaatttcaatactgttcaacatattgggctttttttttctccctgtaagtagaatctgattttgaaatctagtagtgtactgacaagtgccaagctgttctaattaggttacctttcacatttataaaaatggtacgaagttctctgaataccattccagaaatactaattcatacttacctattttcagtctcctaaaggttccaaagatcttaatatatgttcactcagcacaacatggctgcaccaacaactaccccatgttacaaaacaaggcaaagagaagcagaataactctccctatgccccgggagaagtatgacagaggtgcagggtaagagggtttctgggtcccagccacctgtttcacattcctctttcaccttctttcttcctgggtacggtgaggctcctctgatggaaggtaagatggctgccatccttcagttatcacagtactgtacctttagaatagacagcatcagcactgtgataactgagccagggcagcctgtcagtcactgtgtcggtcaacggcatcctttctggtggctgcattactctctctgaaggctccccatgaagtgaaggactaaaagatcaccttctggttggagacgtgaggaggcagaagaaaaagaaggatcagagcccagcaagtggtgaggctgaaatattaaaaggcccagttgaattaaattagaatgaaagatgaacacatgacttatccatattaatgaggatgaacaactgcatgattaggttttcactctaatacatcaaatatgcagtaagcttccagcatatttcacagcttatctcttccatgcatggattcactgactgtgcctccctgacctcaatcattgatttttcatatatataccgaggaactactacgttctaaagccctcttctagatgttcaggaaataaagataactaagacatgattcctgtcttcaaagtgctcataaccaaacatgacaataatacttcatatctgccaaacattcaaaactgctctatatgttttctcatttggttttcacaagacgctatggggctggcaatgaattattcattaattcatcaaaaaaggattctggaaatagattagatattattaccccattttataggcagaaaaaaaaaaaaaaaacttaggtgatttgccagagatcatatattgctaagttatggcgaacccatgtccagaaccatgtcaaatgagtgaacacagtgctttgttttctctaccctaccctagctgtccaactccatcaactggatattcagtttacacaaacaaaaggatttctaaaaacatttactttttgttttagttttctcagtaactgagatcatgaagcagaagctagtggggctttataattaagaagaaaaatgcacattagcaaaaatgactttcattcctcttgctctgagtgctaagaatgtactcaaattagtaacattgatatttttcactatagtttatgtcaattctatacctatggtgatactgacaaccttcagaatacctttttaaaaagtaataataacatatacacatcacttgcttttaaattatctgtacctttgagacgtactctgaagtcattttagggatgattcttccttttaataaaaagtacaaaagattctgaaattggaattcaggcatcagaatatcaacttattaaaaccatgattcacttgggttttttccatgtcataaggtttcaagttatttcaatatgagtggaacttgacagatatttgaaaaataattatgttttcattaggcatttgctcaatttcaaagactcattatatgcatat

SEQ ID NO: 1879690 - DNA, 4001 bp, Homo sapiens
ttgacaccctggaggggtcttcacctcatagtgtcactgatgaggatgaggtgtggctgtctgatggcactggggctttctactctccaggacttcaggccaaaaaggacctgaagagtctcatccagagagtatcccagctggaggcccagctcccaaaaaattgactagaagggaagctggctgaggagctgagatcagcctcgtggcctgggtaaggatggcactgtctgggcactttctggattgaaaatgtgtaagtttgtgcttggtgtagggtagctcaggcagttggaagaaacaacatgtctgggtattcacaaggacactgatttaaatggtagatataggtctgtggaaaagacaggtaggcaagcaggagggcataggatgatgtcccagtatctgggagataccagatctcagggatttcctcttagggatatatcagtaaagtaatagtacatatggtatggtatagtatagtatagtatagtatagtatagtatagtatagtatagtatagtggtaatactggaatcagactgcctagctctgatgcttactacccatgcaaccttcttaacctttctgagcctttgtcattacctattaagtgaggatgataacagaacccatctcaaagggtggatattaggtttacatgaattaatacaagtgctggccaggtgtggtggctcatgcctgtaatcccaacactttgggaggctgaggtgggcagaacacctgaggtcaggagttcaagaccaggctacccaacatggtgaaaccctgtctctactaaaaatataaaaattaggtgggcatggtggtgcacccctgtaatcccagctactcaggaggctgaggcaggagaatcgcttgaacctgggaagtggaggatgcagtgagccgagatggtaccactgcaccccagcctgggtgacagagcaagactctgtctcaaaaaaaaaaaaaaaaaaaattagtacaagtgcttagaatggtgcccagcatacattaagctctcaatgctatttgccatagttatcagtgttattgacactttgtgttgaaaacacagacattcatcttggtatgtgtcctggttatctactgctaagtaagaaccactctaaaacttagtgacttcaaacagtactttattatgcttcacggttctgtggtttgactgggctcagctgggtggctctcacttagggtctcttgttttgggtctcatcagttgatggcatgagagtttatgtgatggccatgattgcaaaatacagtcagccacagtatcacaacacagaagaaattcagacatcaggtggtggttaaaacagaagacatgaaaggtcctatctagacttaggatgagatgagtctaattattcattgagtatctgctgtgaatctctgtgatgctggtgctgtaagggatgtgaaacgcagaactatcttcattctcacagaccttacgatttatctagggacatataattaacatatatagaacagttgaagaacagtggcatggtaaattttttgttttgttttgttttgatacagagtctcactctgtcacccaggctggagtgcagtggtgccatctcggctcactgcaacctctccctcccaggttcaagcaattctcctgcctcagcctcccaagtagctgggattacaggcatgtgccaccatgcccagctagtttttttgtgtgtttttagtagaggaggggtttcaccatattggccaggctggtctcaaactcctgaccttgtgatctgcctgcctcagcctcccaaagtgctgggattacaggcgtgagtcaccatgctcggcccatactaaatttttcagtgcaatactttatcagggtagaatttactcttaaatacctcctatggcttacgtgccagaattcagtttgggggagttccttagagatgttctcatagaaatctctacagaagcccccataacttatcatccaccctttcctcttctgtcctgcattaggaaatatgattccctgattcaggatcaggcccgggaactgtcttacctacggcaaaaaatacgagaagggagaggtgtttgttatcttctcacccagcatgcaaaagatacagtaaaatcttttgaggatctcctaaggagcaatgacattgactactacctgggacagagcttccgggagcaactggcccggggaagccagctgacagagaggctcaccagcacactcagcaccagtaggttggccacagggctttggatactctcagtcaccccacagttccagcccctggtggccaccacatctccactgcaactttttaacgtagggtcctgtttctatttcatttcctggggctaatataggatcaagactgctcaatggggagcatggagaggaacacacagggctggagatgccatggttacaactctagaaacttcaccactcatggaatgtgacctgtggggcaggggagacatctctctggtgctaagagggagtaggggacatgacatggaagggccttgttataggaggaagagccgtgagctaagaattgcaagacgtcgaggcgctgaggccaaagggtccgtgaggaaacaggcgcagctcgcgcccctcggcctacgggagggagggcaaggagagtcctacggttcctgggaggacgagaagagccaagagccccgacggccggcgccggggaaaaggccccgaggcggggtccgcatccctggaagggcggcgtccacactcctgagaggcacggggcgcccagggctcggacgctcaaagcccgccggctcctgcagcttctgggagccgaagagtgtcagccgggaggatcccgcacacggcgcttagttctggaactgcatacccaggggaggatgcgggagcccgaagcccgggtatgtgtccccgaagcccgggtgtgggtccccatggttttcgtgttgggggtgggcgcggaacgctaagcctgggcctattgggagccatagtcttcttgatggctggtgcttattgggcttttttcagtcgaatttcgaaatgcagttgaatttcttactttggaaacgataatagaaatggctgacctaagattttcatgatgatattttgccttttttggtgcatatgcagtttctgtggtgtagtggttattatgttcgcttcacatatgaaaggtctctggttcgagactgcgtgggaacatcgtgttttgttttgttttgtttttttgtccctaaatttagtgagtttaatcgaggttgggaaacaaacagaaaagtagttgaacctgtggctacactttagacctcctcaatctagagagatcgttgaccaggctacagtttccactggtctgccagcaagaggcctgcttaatattagctttggttccagaaattccttcaggttctcttcattctcttctatcgcctgtattttcacaggctgacactgaaagtggatgacatcttagtgcatttcctaagggtcccgcttggcttcgctttactctggtaagttgcagatctggctgatttgcaagacaacaaaaacaaaatattttttaaaaaggttctaaatctgcatctggaagtcatagagtcaatattcctaaatcacatgaattatgtatatacatttgcatgcataccccttccccaaataatcctcagaaaaccggttaagttttagcatctgtgactctgagatgcatatgaggcctttgtaaatttagaagttgagagtagaaagtacaggtttgtattttagaaggagatttgggaataaatatagctctggtggatatagatcatatgttaaggtttgttggccagagctggtgtgtgtcttgggtgttgggcaaagaacagagaacagccaaaactctgcgaggtcaatgtgaagggtgatttccttggtgggctcaagtttatgacgcagcctggacctagct

SEQ ID NO: 1879691 - DNA, 4001 bp, Homo sapiens
cattgtttgttgaatatttcttaagcatctagcccctaaagagactgcttcttaccaagcctgtaaactatgcatgatggaaattcttgtattttatttaggaatggctgttggtttacttaccacatctgtggaatcatggctataaatgtttgcttacaaactaaaaaaaaaaaaaaagaaaaccagaagagaagaaaaacacagtctctctcattcttgaggaagtgtagtgtggcagttaagagaaaagatcctggggccagacttgttgcttcaaatcccaatttgtaaactttcctatgccccagtttcttcatatgttaaaatagtaataaaggaactacctaccccatcagatactaatgtgaattaaatgagtaaattcttataaaatgctttagaacagtgtctggcatcaggtaaaatgctgtggattagttctcattctgactaccactgccccaatacactgatgttaacatgctgatatatttattcgaagtcttattttcctatgcctatttttcacacagtggtaacccaataaacttttaaattatagtaaactttagagagcattaaacttgcagcatgcagaaatagcttgtcctgcgttcttgtggctatcctaactagataaggccatgttaatggcttgagaaacatcagtgtgtgtggaatgaacacaggacgttggaggatttgaattcaggctctgccatgtgctagtttgagtgatctagaacaagctggtttaccacctctctttaagttttggtttccccagtcagtaaaatagaaagtggtgaaacctaacttgtgggtataaggaggataagaaatactgtatttgaatgcctagtacagtgtcagggttgaataaagtacgacttcaccttattccctagtaattattgtcctcatgaccaaacctgcctcctctcaaaggcagtggccacaacagcacatccaacttttatttaggaagacatctttgtcttttttcagagcatgaggagcacagcagccgcaaggaaatggtcctggtggaggggctgtgctctgagcaggggcgccggggctgaacgctggctagttcctctgagaggaagcccttggagaatgaactagggaggcaggaagagttctgggtatatggaaagtcagaaaacatctgggtcctatgaaaggacatcaaagatctgaaggcccagctgcagaatgccaacaaggtcattcaaaacctcaagaaccgggtccagtccctcttggttacaagtgattattcatctagtctggaaagaccctggaagctgagagctcctgacaccctggaggggtcttcacctcatagtgtcactgatgaggatgagttgtggctgtctgatggcactggggctttctactctccaggacttcaggccaaaaaggacctgaagagtctcctccagagagtatcccagctggaggcccagctcccaaaaaatttatctagggacatataattaacatatatataacagttgaagaacagtggcatggtaaatttttgttttgttttgttttgatacagagtctcactctgtcacccaggctggagtgcagtggtgccatctcggctcactgcaacctctacctcccaggttcaagcaattctcctccctcagcctcccaagtagctgggattacaggcatgtgccaccatgcccagctaatttttgtgtgtgtttttagtagaggaggggtttcaccatattggccaggcttgtcacgaactcttgacctatgatctgcctgcctcagcctcccaaagtgctgggattacaggcatgagccaccacgcccggcccatactaaaatttttagtgcgatactttatcagggtagaatttgctgttaaatgcctcctatggcttatgtgccagaattcagtttgggggagttccttagagatgttctcatagaaatctctacagaagcccccataacttatcatccaccctttcctcttctgtcctgcattaggaaatatgattccctgattcaggatcaggcccgggaactgtcttacctacggcaaaaaatacgagaagggagaggtgtttgttatcttctcacccagcatgcaaaagatacagtaaaatcttttgaggatctcctaaggagcaatgacattgactactacctgggacagagcttccgggagcaactggcccggggaagccagctgacagagaggctcaccagcacactcagcaccagtaagttggccacagggctttggatactctcagtcaccccacagttccagcccctggtggccaccacatctccactgcaactttttaacgtagggtcctgtttctatttcatttcctggggctaatataggatcaagactgctcaatggggagcatggagaggaacacacagggctggagatgccatggttacaactctagaaacttcaccactcatggaatgtgacctgtggggcaggggagacatctctctggtgctaagagggagtaggggacatgacatggaagggccttgttataggaggaagagccgtgagctaagaattgcaagacatcgaggcgctgaggccaaagggtccgtgaggaaacaggcgcagctcacgcccctcggcctacgggagggagggcaaggagggttctacggttcctgggaggacgagaagagccaagagccccgacggccggcgccggggaaaaggccccgaggcggggtccgcatccctggaagggcggcgtccaccctcctgagaggcacggggcgcccagggctcggaggctcaaagcccgccggctcctgcagcttctgggagccgaagagtgtcagccgggaggatcccgcacacggcgcttagttctggaactgcatacccaggggaggatgcgggagcccgaagcccgggtatgtgtccccgaagcccgggtgtgggtccccatggttttcgtgttgggggtgggcgcggaacgctaagcctgggcctattgggagccatagtcttcttgatggctggtgcttattgggcttttttcagtcgaatttcgaaatgcagttgaatttcttactttggaaacgataatagaaatggctgatctaagattttcatgatgatattttgccttttttggtgcatatgcagtttctgtggtgtagtggttatcatgttcgcctcacacgagaaaagtccctgattcgagactgggtgggaacgtcgtggtttgtttttttttttgtttgtttgtttgtttttttggtccctaaattttgtgagtttaatcgaggttgggaaacaaacagaaaagtatttgaacctgtggctacattttagacctcctcaatctagacagattgttgaccaggtacaatttccactggtctgccagcaagaggcctgcttaatattagctttggttccagaaattccttaagattctctttattctcttctgtcgcctgaattttcacaggctgacactgaaagtggatgacatcttagcgcatttcctaagggtcccgcttggtttggctttactctggtaagttgcagatctggctgatttgcaagacaacaaaaacaaaatattttttaaaaaggttctaaatctgcatctggaagtcatagagtccatattcctaaatcacatgaattatgtatatacatttgcatgcataccccttcctcaaataatcctcagaaaaccggttaagttttagcatctgtgactcagatgcatatgaggccttggtagatttagaagttgagagtagaaagtacaggtttgtattttagaaggagatttgggaataaatgtagctttggttgatatagatcatatgttaaggtttgttggccagagctggtgtgtgtcttgggtgttgggcaaagaacagagaacagccaaagctctgcgaggtcaatgtgaaggatgatttccttggtgggctcaagtttatgactcagc

SEQ ID NO: 1879692 - DNA, 4001 bp, Homo sapiens
agctcctgacaccctggaggggtcttcacctcatagtgtcactgatgaggatgaggtgtggctgtctgatggcactggggctttctactctccaggacttcaggccaaaaaggacctgaagagtctcatccagagagtatcccagctggaggcccagctcccaaaaaattgactagaagggaagctggctgaggagctgagatcagcctcatggcctgggtaaggatggcactgtctgggcactttctggattgaaaatgtgtaagtttgtgcttggtgtagggtagctcaggcagttggaagaaacaacatgtctgggtattcacaaggacactgatttaaatggtagatataggtctgtggaaaagacaggtaggcaagcaggagggcataggatgatgtcccagtatctgggagataccagatctcagggatttcctcttagggatatatcagtaaagtaatagtacatatggtatagtatagtatagtatagtatagtatagtatagtatagtatagcatagtatagtggtaatactggaatcagactgcctagctctgatgcttactacccatgcaaccttcttaacctttctgagcctttgtcattacctattaaatgaggatgataacagaacccatctcaaagggtggatattaggtttaaatgaattaatacaagtgctggccaggtgtggtggctcatgcctgtaatcccaacattttgggaggctgaggtgggcagaacacccgaggtcaggagttcgagaccaggctacccaacatggtgaaaccctgtctctactaaaaatataaaaattaggtgggcatggtggtgcacccctgtaatcccagctactcaggaggctgaggcaggagaatcgcttgaacctgggaagtggaggatgcagtgagccgagatggtaccactgcaccccagcctgggtgacagagcaagactctgtctcaaaaaaaaaaaaaaattagtacaagtgcttagaatggtgcccagcatacattaagctctcaatgctatttgccatagttatcagtgttattgacactttgtgttgaaaacacagacattcatcttggtatgcgtcctggttatctactgctaagtaagaaccactctaaaacttagtgacttcaaacagtactttattatgcttcatggttctgtggtttgactgggctcagctgggtggctctcacttagggtctcttgttttgggtctcatcagttgatggcatgagagtttatgtgatggccatgattgcaaaatacagtcagccacagtatcacaacacagaagaaattcagacatcaggtggtggttaaaacagaagacatgaaaggtcctatctagacttaggatgagatgagtctaattattcattgagtatctgctgtgaatctctgtgatgctggtgctgtaagggatgtgaaacgcagaactatcttcattctcacagaccttacgatttatctagggacatataattaacatatatagaacagttgaagaacagtggcatggtaaattttttgttttgttttgttttgatacagagtctcactctgtcacccaggctggagtgcagtggtgccatctcggctcactgcaacctctccctcccaggttcaagcaattctcctccctcagcctcccaagtagctgggattacaggcatgtgccaccatgcccagctagtttttttgtgtgtttttagtagaggagggggtttcaccatattggccaggctggtctcgaacttctgaccttgtgatctgcctgcctcagcctcccaaagtgctgggattacaggcgtcagtcaccacgcccggcccatactaaatttttagtgcaataatttatcagggtagaatttactcttaaatacctcctatggcttacgtgccagaattcagtttgggggagttccttagagatgttctcatagaaatctctacagaagccccataacttatcatccaccctttcctcttctgtcctgcattaggaaatatgattccctgattcaggatcagccccgggaactgtcttacctacggcaaaaaatacgagaagggagaggtgtttgttatcttctcacccagcatgcaaaagatacagtaaaatcttttgaggatctcttaaggagcaatgacattgactactacctgggacagagcttccgggagcaactggcccggggaagccagctgacagagaggctcaccagcacactcagcaccagtaggttggccacagggctttggatactctcagtcaccccacagttccagcccctggtggccaccacatctccactgcaactttttaacgtagggtcctgtttctatttcatttcctggggctaatacaggatcaagactgctcaatggggagcatggagaggaacacacagggctggagatgccatggttacaactctagaaacttcaccactcatggaatgtgacctgtggggcaggggcggcatctctctggtgctaagagggagtaggggacatgacatggaagggccttgttataggaggaagagccgtgagctaacaattgcaagacgtcgaggcgctgaggccaaagggtccgtgaggaaacaggcgcagctcgcgcccctcggcctacgggagggagggcaaggagagtcctacggttcctgggaggacgagaagagccaagagccccgacggccggcgccggggaaaaggccccgaggcggggtccgcatccctggaagggcggcgtccaccctcctgagaggcacggggcgcccagggctcggacgctcaaagcccgccggctcctgcagcttctgggagccgaagagtgtcagccgggaggatcccgcacacggcgcttagttctggaactgcatacccaggggaggatgcgggagcccgaagcccgggtatgtgtccccgaagcccgggtgtgggtccccatggttttcgtgttgggggtgggcgcggaacgctaagcctgggcctattgggagccatagtcttcttgatggctggtgcttattgggcttttttcagtcgaatttcgaaatgcagttgaatttcttactttggaaacgataatagaaatggctgacctaagattttcatgatgatattttgccttttttggtgtatatgcagtttctgtggtgtagtggttattatgttcgcttcacatatgaaaggtctctggttcgagactgcgtgggaacatcgtgttttgttttgtttttttgtccctaaatttagtgagtttaatcgaggttgggaaacaaacagaaaagtagttgaacctgtggctacactttagacctcctcaatctagacagatcgttgaccaggctacagtttccactggtctgccagcaagaggcctgcttaatattagctttggttccagaaattccttcaggttctcttcattctcttctatcgcctgtattttcacaggctgacactgaaagtggatgacatcttagtgcatttcctaagggtcccgcttggcttcgctttactctggtaagttgcagatctggctgatttgcaagacaacaaaaacaaaatattttttaaaaaggttctaaatctgcatctggaagtcatagagtcaatattcctaaatcacatgaattatgtgtatacatttgcatgcataccccttccccaaataatcctcagaaaaccggttaagttttagcatctgtgactctgagatgcatatgaggcctttgtaaatttagaagttaagagtagaaagtacaggtttgtattttagaaggagatttgggaataaatatagctctggtggatatagatcatatgttaaggtttgttggccagagctggtttgtgtcttgggtgttgggcaaagaacagagaacagccaaagctctgcgaggtcaatgtgaagggtgatttccttggtgggctcaagtttatgacgcagcctggacctagcttggctt

SEQ ID NO: 1879693 - DNA, 4001 bp, Homo sapiens
gcattagaaacgtttcaggaatgctgagaatttttagaggtgttcttttttttattttttgagacagagtttcgctcttgttgcgtaggctggagtgcagtggcgcaacctcagctcactgcaacctccgccttccaggttcaagtgattccccagcctcagcctcctgagtagctgggattacaggcatccgccaccagccccagctaatattttgtatttttagtagagatggggtttcaccatgttggccaggctggtctcgaactcctgacctcaggtgatccacctgcctcagcctcccaaagtgctgggattacgggtatgagccactgcgcctggcctagaatgtgttcttaaaggttcttgttctcattatgtttttatgagcaggtataattgtcttagtgtttcggcttaatagaggaatccactccattcaaatattttttttttctgaatcccaactcagtccttggcactggatgggatgctgtgagggtgcagagaggaataagacgtggggcttgcccttaaggagctttaacaggaagacccagaaataggagcaactatgtctgctataaggcagaacaggccagatgctatcagggagttgcaagtaaccataaacatgtgccaaacacagtctctacaaaaaaaaaaaaaaaaaaaaaaaaaaaagcagggtatggtggctcaagcctgtagtcccagctacttgggaggctgaggtgggaggtgggaggatcacttgagcccgggaggtcgaggctgcagtgagctgtggttgcgccactgcactccagcctgggcaacaaccagagtgagaacatatctcaaaaaaaagaaaaagttttcggccgggtgcagtggctcacacctataatcccagcactctgggaggctgaggcaggtggatcacctgaggtcgggagttcggaaccagcttgaccaacatggagaaaccccatctctactaaaaatacaaaattagccaggtgtggtggcgcacgcctgtaaccccagctattcaggagcctgaggcaggagaatcgcttgaacccgggaggtggaggttgcggtgagccgagatcgtgccattgcactccagcctgggtgacagagtgagactctatctcaaataaataaataaagtttcctcccctctgcacatgcactcctttcatttacagaagcccttttctacactctcacaagctgtcctgagagtttcacccacccccgcggggacagcacagtgttaagagcacaagctctggagcaaggcagcctagtgttgaatcccagctctgccgtgcagacgatgcataactctgggcaagttacttaacatctctgggacagtttccccattgggaaaatgaagataatatttcctgttggcccagcacaagtggctcatgcctgtaatcccagcactttgggaggccaagtcgggaggatcacttgagcccaggagttcaagaccagcctgggcaacatggcaaaacctcatctctacaaaaaatacaaaaattagctgggtgtggtggcacacgtctgtagtcccagctacttggaggctgaggtgggaggatcacttgagcccaggaggtctaggctgcagtgagcagtgatcgtgccactgtactccaggctgggtgacaaagcaagaccctgtctcaaataataataataataataataataatagtaataatattccttatcttgttgggtggttatgcagattaagtgaagtggtcaatttaaagggtttagtggtcagttcatacagagcattcaatgaattagcagttgtgacatctccatttcctaaatgagaaggctgaggtgtaactggtccaactgatttgcccagaattattcagctagtaagcagtaagggcagggcttgagcccaagacttctggctccaagtccagtgctcgttctgttgtttagcagcctgaaaactatgggagtccaggacctgacccaggggctggggaggaagagcaggaagtgggaggagtggagctccagagaggtttcctaagataacatggaatggagactttctttgagctgctatatgtgaaagccttcgtctaaggattattttcaacagcaactcaatttattgggtatcctactcaatgtattagtgtaatttctttctttacattgaatgttcaacacctttttttttttttttttgagatggagtctcactgtgtcacctaggttggtgtgcagtggcgtgatctcggctcactgcaacctctgtctttcgagttcaagcgattctccagcctcagcttcctgagtagctgggattacaggtgcacgccaccccacgcccagctaatttttgtatttttagtagagacatggtttcgccatgttggccaggctggtctcaatctcctgacctcacgtgatccacctgcctggcctccctgttgggattacaggtgtgagccactgtgcccagctgaatgttcaatttcttttgattgatccctcttctgtgttcccaaacacactgtacaaattctgctattgaagagtaattgccccaaaatttagtggcttaaagcaacaagaatcatttcatcatctttcaaggtttcagagggtcaggaattcagaaagggattgcctgtgtggtctgacttggggtctctcatgtggttgctggtggtgaatggtgaacggagctggatgggcatagctctgccttcatttactctcagagcgggccaggcgcagtggctcacgcctgtaatcccagcactctgggaggccgaggcgggcagatcacgaggtcaggagatcaagaccatcctggctaacacggtgaaaccccgtctctactgaaaatacaaaaaacttagccgggcgtgggtggcgcgcgtctgtagtcccagctactcgggaggctgaggcaggagaatggcgtgaacccgggaggcggagcttgcagtgagcccagatcacgccactgcgctccagcctgggcaacagagtgagactccttctcaaaaaaaaaaaaaaaaaattatcactctgacatactctactggttgaaatggtctcaaacgtcttctcaggttatctttggaaaatacaacccaccaggtatgcttttgtgtctacctttcctgccagaacactcattcatgcagtcactcaggtactcatttgttccctcatccaacatttgttgagtacctgttgctctccaaacactaaggcaggccccttatatagattatttcatctaatattcaggtcaaccctttgaagtaaatgcataatccccgtatttaacacatgaggaagctaaggttcagaatggtgcagtgacttgcccaaagtcatgtgaatgagtcgagaacccatgatttgaacccataactatccattccagagcctatgcccgttccttaaccagcctgccctcccaggatcagcataacctggctgccttcaaggcttttgagtttgtaccttggctaagctctgtgctcttcatgcccccaggactggtcagaggggctggggaaaggaacgagggaaacactgtctggggccagtgggaaggaaccccaagtcctgtgccagctatggaacttccacttgtggtcccaggggttctggccacacagtgcagggttgggattcatgcccttattgaggagacaacacctattcacacatgaccaacaggggttattttggtgccaactccagtcagctgagtgtcagcatggagtgctgagttgagaaagatcatgagcagaatctgggctgggcaggattaagggtcttgatccattagttatgtctgccactgatacataaccaggtatgttggcacatgggccttgcatcccaatcttacaaaactacatctcttttcatatgggacaatactaagaagcaagcaccacaagggcaaggattttgtctgttttcatccccgctatatc

SEQ ID NO: 1879694 - DNA, 4001 bp, Homo sapiens
ctcagagagaagaggcctcacaggcaagaagaacacgagaacacagatgctcccagggtccctggaaaaatgccatcaaaatctagtgtacatctgtaacaaagacagtttattgttccaagaggctgcatgtttcacctaataaagagtcatataaacataaggaagctctggcctcaagctacaaatgcatttgctcactgagtgcctgactggaggacagactgtgcttcctgaacaaaccagaaccatataaaaacaatcctccctgagtacacaggacccaaagtgatttctcaggatgctcatttcctttcacaagtagtcccaggtagtatgtcatgtccagagcagtcctggtactctcctagaacaccacagctcaacatcctttcggttcactgtccagaggcctagcatgctcatttcctctctaaaccccttgactctcagaaatgtccctaacacatttacagtttacaaagtattttcacatgtcatttaattcttgcaagtactctgtgagatgacagagactcaatcattcatttattcagcaagcactaatcaagggctaggtaccatgccagaccctggggagacagaacaagctaagatgtgctgcccacacttgaggagctcacagaacaccaagggaaacaggcaatgccccggcctagctgccatggcaggagggcaccacaacttaagagagcacagagggagtccattctggctcaggagaaccagggaggtttcctgaggaatatggtctcattcctgatgggagtcagagctgagcaggcaaagaaggggaccaaaggaatgccaggcaagcaggagggcattcaagttataaaagagaaagcgtggcccaagtgtggtgctttgagcagctgagtatggcttgaagtagagtgtgaagtgtgggaggggaggtggacaggagataaatccagagaggaactcggggccagatcacaggtgagtatatttcaggacatggtaaggaaatttggatttttaccctagggaaataaataggtaattgctaagggttttaagtaaggcaggtacatgaatgagctgtgcagtttagaaagagtaatcagaatgggtaggtgcagtggctcacacctgtaatcccaggactttgggaggccaaggcgggctgatcacttgagttcaggagttcaagaccagcctggccaatatggtgaaatctcgtctctactagaaatacaaaaattagccaggcgtggtagcacacacctgtaatcccagctactcaggaggctgaggcaggataatcacttgaacctggaaggaggaggttgcagtgagccaagattacatcactgcactccagcctgggggatagagcgagactccatctcaaaaaaaaaaaaaaagagtaatcagccagtgcagatgctggactgagggaataagccaggaagatcctgagtggtccaggagagagaagagattttcattcagagcagtgggaatggggatggggagtagggatggttcaggatatatttaagaggacatacaggacttgtgactggatgactgtgaatggtgtaggggaagctggggcaaacatccagatttctgtttgggcccatgagtagatgatggtgccattcacctaagtaggatgaggaagaggaacaggtttgggaagaaagtgaacgattgattgggcatgctgagttctagggacatataaatcccaaacagagatgtttggggaagtttgggttcagggctcggcaactcaagggagaggtctggcttggtgatatggatttaggggactctggcatagtagctgtagatggtgtcacagaagtatgtgaggtctcccaaagggaggatgcagaagcctgatgtcattagacagatgaagggactgaggctgcctgaagatctcatagctggtccatggcagagctgggctggagccaggtcttctgactccaagcccagtgccctatctgccacacaaaagtctagccaaggactcctggatatgagcctgggctgtacctggaagccagcaggttttacctctgttgtttccttgttttatctaataggaagtagcccttgagcagtggccaagaagcccttcatcatgttgctcttggtaggctacaagggtgagtggaggaatagtctaaatacctactggggagatacccttgggtgagacaaggcagaaaatgctcacacttgccaccatgttcaccctgtcattcaatccttacatctgctcttcctgggtcactcaccttcctgcttacttccctagactctgctcacatcaggttctttgcttcacctcccctctccatcaaaatcttcttgttttagtcccatcccacctccactctatagttctctgctagactatgagataaagcaagtcctgctaagatgggtactaatcagttaatgagaaatccatcccatggtacccactccttttaaccagaattcttggagacatgtaagtagcattgctaaaggcaataatttgaagcaatttggccaattattgaggaaaggataggcatataggcaggagaggaagtaagagagaaagttggggcccgatcaccatcggtatgtttcatattacattaacatgtttggagttgagttcattcaacatggtgatgcagtggcctgctggttaaggccctccttgtcatgacagttgacattctatttcaacacctgtaaacaataggtgtgcccttctgtacacacacaccgtaagcatctcttgtctcctcatctgcaatacaacagaacagagacagggtgatttttcaaatcaaggccacaggtcccaaatgtttttctcaaattctgttagtgatctcattggtagaaccagtgccaggccgggctagaaatccaatcagaaacaatgtttactaagggctgaattaagaaggaatctcttgggtgagggagggtttttctcccttggcaaaatatgatttgctgttttcaagttaatgaaaagaagggggaaaacaaaaaataacaactgaaagatcttttaaaggaagtacaaacttggacagaccaaggaacacttatgaaacagcctgccctgctgtctggttccagccttgcaagacttaagccacagtgaccccagggtcacggaaagaagcagcccgctggggttagggtttgaggaggaggaatgctgtccagcacatgtggggcagggcggcaggtttatctcaagggctcaagattctacagtaagccccagggtatgttgactgcctgtctgggtagacatcgggccacccagtcctctaatgtgactctggatgatgggttggccgcagatggtgaggcgagcccagctggccttacagctacagacaggaaatgccagagccctggggattgggcatcatggagttcattaaatcacatgccttccagctgtaaggttgtccagtctcactcccatcagttgatgtctgaattccctcagcaacattcttaccaagtggtcattaagccagtacttgaatagcccccatgacagaaacttttatccttcaagaaagtcagttttgtctttggatagttctggctggaggggtaggagttactaaatccctccattacttcaactgcctggtgggggatggttctctgcactcacacagaagacatttctgcccatcccaagtggcaggagttggtctgaacacctgggtctgccagaaggcacatcattctagtcaccctacatctccaagcataggtgacaggggcattttgaactgcatgtcacaggaagaggtctgctttgtttacctctgaatcttcagcagctgccccatgattgacactagaaaaactagataaatatttccaaaaaatgaatttatgaacaagcctaaggctttgccatttatctcatcaagaaagagaatttggatttacaaaagtca

SEQ ID NO: 1879695 - DNA, 4001 bp, Homo sapiens
cctcacccagggagaccaggtttctgtagttttctaacatcacgtccctatacagattctgctgagcagggtccagatagctccactcctccggagagaattctatggccacatccctgaatatcaacagtccctggcaaagaaaaaacacatacgtatcaagtggtcatgggcagagttcttaatctgattccaggcacaaagagagacagagagaactggttcttacttatagaagagactgaaatgatcaaataattgtaaacacagaaatattctctaacatattctttaatcctgaagaaagaggatggcataagctccacataaccagtgtacatattctactcttgtgaataatacagtataaaattaagggcatcaacgcaggcatatacattttttcctgctctatttacctcacacaggataaactgtaaatatttctcatatgtagaggtcatgattcatcagaaggtacccctgaaattttaatgcgtacacaataaactagagatcctcttaaaatgcaggttgtgattcagaggacctagggtgaagcctgagtctctgaatttctaagtgagccatacagtgatgccactgtgtctgggccaaggaaaatattttttcaaacatgcaggaagtggcagagcctgtgtttatttcagtttatctaaccaataaacaaacacgagagccttcattttccaaagcaagctataagcgaggagaatctaaaaagaaagaagagcttcctaattaaatgtgatggcttatatgtatcagtcagtaaatctccccaaggtactaaacaataatgaaaaaaatatctctatcgtgcaaaaatctggcagagagcaccttaaccaagtaaataaaattaagatcaactataataggataaatcaacatcaaagatgtcaaggataaaatgacatcaaggatcacatgacatcaaggacaaagtatcactgctctaatattattgaccacaaaaatagtaaattacaatctgaacctaatcatgtagaaacatcctttttttgttttgttttttggagacagtcttgctctgtcgctcaggctggagtgcaatggtgcaatcttggctcactgcagcctctgcttcccaggttccagtgattctcccacctcagcctcccaaatagctgggattacaggcgtgcaccaccatgcccagttaatttttgtatttttagtagagatggggtttcatcatgttagccaggctggtcttgaactcctgacctcaagtgatctgcccgcctcagcctcccaaagtgctgggattacaggtgtgagccacagtgcctggccagaaacatcagttttatgcaaagttcaagctatagctgtttccctggttctttaatctgcaatagggtatttcaatagtgtttctttagcatcctagacagcaaatgtcttctaattattctcttttcagaactttaagttattccaggcaatgaatgccatcctctttaaatgtctcttttcttaattctgttctgcatagagatgatggagcatgtggatgaaatctaaacggtacatgatccccttcttcactgacatcccaagacccagccccatccccacggataatcctggggatccacactttcccatgttgatatgtcacagaacatctgaatactgcccatcatacattaatggtaagatttggtcatgacatataagaagcctggaaggagggaatggagagaaggttctggtacacaggaggaaggattttacagagttccttatcaatcataagaaaggaggggggaaggggggaaggtagttgggaagaaacacattaggcaggtacatcagaagtacagaaataaaggtttgcaagttctaaacacataacatcccagaagaaaagaggagacacatcccctgaacccagacacattcacctgagaaccagccatttcttcctcttcttccttcttctctgggattccttctcaggtgagattatctggacaaatcacacctgcatttgagaatatgtctttaaaggtgtcaacacaaccctttcacctgcaaccagcacacctagaggcagaaggccctgcagtgcagaaaagggaatactcccctattctttatcacaggagaggaaaaatgagctaccacataaagaccaaaaatttcctgccttcaggtgatctcccctgccatgaactccagcaatttctggtacagcaaaggaaatatggatcttggtgacctacccttatcaaaccgaagagcaggccctctgacctccttttggaacccaagtctcgtgactgtatctgggagccctcaaggttgactctgatctcaccttagaatcgctggggggcacttacttaaaacaacaattatgcttccatccagaccacagacaggatctttggagacagcatgtgtgatggtagttctccaaactggctatttgtttctaattgaaagcctgggctgagaaccacatacctgagtactgtctctctggcttcaatgtacatataaataatttggtattctaatttggtattccaggccccattctaagtaatgtgtttccgcaggtgtgaaaggggtctgcaaatgggcttctataacaagtcttctgatactgttcccccggactcctcatcagcagcactcagctagagaaggcaaatacagcacagagtcccttgtactcaacaccggtatcacaacagaaatgctttggccgggcgcagtggctcacgcctgtaatcccagcactttgggaggccgaggcgggtggatcacctgaggtcaggagttcaagaccagcctgaccaacatggagaaaccgtgtctctactaaaaatacaaaattagccgggtgtggtggcgcatgcctgtaattccagctactggggaaggcagaggcaggcgaatcgcttgaacctgggaggcagaggttgcagtgagctgagatcgcaccattgcactctagccggggcagcaagagggaacttggtctcaaaacacaaacaaacaaaaaaaacccagcaatgcttctgattgcaagtgaagaccaccaatcgccatcctgaaaaatggcattctctgctgagcgtttaaagtttactaaagtctagagaaggcagcaatgtctgagtaagtctgcactgggagaacgtggacacgggcattaatgaatgtttacggaacacatactacgtgctcagaagtgtgttacagaggacagcgctgaaaacctagtaataggtgaggtaattctaacactccgggaggtgggtactaagtgttccataatccccagggtttacatgaagggcccagcttttctttttctgtttctccatcactgagttttagaaagaaaatatatagaatgaaagctaaatacagacagatgggagagatacagaaagaaggggttaaatgtagttgagagggatttttcgttgttgtcgtgtttgtatttactttctggtaactcatggaggaactactgcatctgcaggaatgaagaacacctgggtctgcaggatgaacagcaggctgctgggtgggatgtctctggcagcactggtttcaatgaaaaacaaagggccacaattacacagtgctttgttctcatttacctgcttttgggtttgggaaaattgtcagcacctgctctggagagatcacaggaaccaccacgcaacaactctgatgtcctctaatgaattctgcgacggagatttcagggtgggataaggcctgggaagcaggctgatctggcagagctgggccacgaagcagaccctcagcttctcacctttaggcctctgggtactaccggttctctttgtcctaggcctgcccaacagacgcttgactcccagagtttgtgtaattttaaccaattttagctacttcctcgtctattttataagatccagtcacgggcaatttaaccaacaccctta

SEQ ID NO: 1879696 - DNA, 4001 bp, Homo sapiens
tgcttcagactaagccaaactgtccaataaacaattacgagctctcggcacattcaagtgataatcatttttaaattcttctcctattcataaaataggttttggtaagaccaaaacataagtgccaaatcaaaggcgaagacctgagccatctcaatctaaaatcataagcccattacaatttcagattttccaaatagattacctaccagaagaagccatggtgaatagaagacaagcgacaggcagtgtattctgcacaatcaactgggataaggaaagtcctgaaaatgattttcaaaaacatgcaatcactttctttgcctttctatatgtcatcaacccaaaaaaatctcacatcacatctacatacatcgtcagaaaaatacgtggaataaagacgtctaaattaaccacgaaaaaaattatcaaaatctactaaataaacattgggaaatatgacctgaatatgatattggttccagaaaatcaagttaactgagctttctcggtcataaaactcttggatttttaaaatcagacaaagtcacaagggtgaagaatttttcccccataaactctttaacatttcaccgaaactgtaagaagatattccagattcaactcaacagtgcccccggagccatcttaatactgcctacaactcattgtgcaaatgaaatacccacccctgctttgtctgtgtctgacgtggtggataagaaaacgcccaagctaatagtaaccaataatgttgaactcctattgtccctcaggtttaagcttccttgcccaacagcaagcaaaatgtttatgaacctctagattttgacttatatttgctgccgttatgtcatgaaaaatgctgtatctcttgttgatctttttaacattatgacttttgtagacgccagctagtaccaaaaacgtaggatgacaggttcccaaaagctaggaattaaaatcagaggcagcgacaagatttaagaaaagcagagaattagacgcagcaccggacccaggatgggcgtggccctggtccgggcgaggaaaagaggaccggtcgcccccggccaatcagagcacgccttgcgctccggcccctggccccgcccccttcctccccgcgccttttcgaatctccccgaactcaacaccccggagcccgcgcgcgtgggaaggggaggggtgggcggggctaacggtccaatccgggtaactccgcccctgcctgactccccctgcgcggacgccccccccaactcccgccaaaaacacctccaggccgccgccaccacccccttcacagttcagcgggtggggcaggccccgggaacaggcccccgggtggtcccgcggtgagctcgccaccgcctcccgccgtccccatgcccaacctgccgccacccacgctgtccgcgcgtccggccgcgaagacagaagaaccctcgtggggcccgggagcgccgcccctcaatcaccagctgcggtcgccaggggacggtcgcagggagggtcgcggccctggctgcccgcagtttggtcctaaagccgctggtccctggggcaccgccccgtcccttcagacaatggggaacccggcggggcccgcagggaagggagggagggagggaggtaaacgagggcccacgccccctattgtctcctcgacggcaccccggagcggacgcccggtgatcgcccagccccctgcccacgaacagccgcgcccccggagagcggggacaaaggcgaggctccgcccgagccacacacaaagcggagcgacccccgcccaccaacccctccgaggcccgcagccccgcccgccgccctgcagcagggggtcgctgccacggcccagcccctcccgccgaccgcgtccctcttgctggcctcagccagccgccgcctcctccgagccccgcacccacctgctcagtccgagccgcctgaccacactctgagcaccaacagacccgggcgcgcacaaaagcgccaaacagaggcacgtgacctccgcgcggggctccgcattggccgagagcggcggcacgtgccgcccccgccccccacaacccgcgtggagcgccgccccccgggaccccgaagcacctcgggaagtgtagtcctgtcccggagggcaggaggacaatgccgggggttgcagggcgcctggggagcatccccaggtgtgggcctgggactaggggggtggtctcgccgtggaagagggcgtggcagtggaccccggactaggtccgaaccagctccccattctcgagaacaagggcagggcggagcaggcggagggcgggggggtccttccctacctttccaaactttggccgcctggactccaccttgtagagccacatgcccgcctcgccccaagggcagcactcggacagagcagtgccccttctagtgcgccacccacatgggtgcctaagacgcccgagcccctgtgacagcacaatgccactccacgcccctgcagggccccctgcccccggcaccctacaccgacaccggcgtgtcacccatattgtgacatcatcgtaatttctaatccactcagcccacaggtcgcgggcgtggcccttccctcactgtgtgcgttcttgccagcatcctcaggttcccgagccggtgaccagggacctgtgcgggaaagcgtggggctctggaatttgatcgcctttggtctaacaaagccactcagcttaaatgcagactccatctgttcttccaagccttctgcggatgataggggaggaagagcaatagccgttctagactacacagattgcagttaagtgttgcttttgttctcagagcacgtgctccccagagcagcactgggttctttttaaaaatcgaaaaaggagccacaaggtcactgttctccctgacctggatagctcagaacctcagcaaaggcacaaaggaaattggtctgaccgtgccttagaataactggccctttctctcacaaaaaggggaaaaaaataaatgaaatgaacatggtccccgcctcctcccattctctgaccaagaccgtgtcctcggttggtggtcaatacaccaagacacctgctttgagatcttgactaagcagaagagatatctttattttattaatgagctgcatctccccaaatcaagaaacaaatgtgaccaaccttcctgaaacaacagtcctaatttagaaagactctcatgcctagttagtcaccagggatgtgccagagataaaatacaactaaggggtgcccaagacaataaaaactggatcatacaagcagcagcacactacacaaagcaaacaattagcaatgcgctgttgcctgaaatatgcttgttgcggcattttttccaacaatcgcccttgtgtggggtcggcctcccccccaagccaatcgaagtggttttcacttagcctgtgagcaggaccaggaataattcagatactgagccttgaaaggcttcttctcagaccaaacttagcttcaaaatggctaggtgcttccgtctgtcatttttctgaacagaatctcagacatcattagaaaagttggagaaggatgggcatgagacccctcaggaaagcgacagataggcaggcaacacaaatgagcaaggaacccaagcccaagaggtccttacccactgaacaggctttttatcttgaagtctttgtatttgatctggaggttcacagaggaaggtcccactcatttaatgcatttttttaagtacaataaattgccacacaaaagtctcacattcctgactattaatgttgtgacagaaaaaagaaataaatctttcaaaacactgataatttgaaagcacttacactgcttccccccacattttctttctccctagagcagatgtctatttccatggaaaccatagcaaggaacgtagatgttagaactcatgttcatttttaatcttttttagcaatgccacttggcttctgggtttgttgg

SEQ ID NO: 1879697 - DNA, 4001 bp, Homo sapiens
tgactgcgtgaaatggggacctcccaggggtccagattttctcagcctgatggtgtgcccatgcagatgagactggacagggaagcggaggctagagtcaatggcacacaatcctcatggctgctacttagtaagcgcttaccatgagcaggccccgaggggagtgcccaggttcagcatctcatttaaccctcacggtgacccccacaaggtatgcattatgatccccactttacagatgagaaaactgaggctcagagaggtcagaagacttgccaaaggtcacacaggtaggatatgtgggggcttgtgattcaaacccaagcccagggctcgcacagggcctcaagccttgaccaagggaaaggagagggctcccctgacccatctgcaggtctaacgcccgcttcaccccagtttaaggcaggaagctggggtccagtcccagctccactgcaatcttgctgaggcctctgggccagtgacatcccctctctgagcctcacattcttgggaataaaggtgggtgagagtcatcccatttgatctctcgtgagatcaaatgagataacacgtgtgatgcacacagcgtgaggcctggcgcactgaggtgtctaatcagtgctctggcctctgtgtctggcctctgtgtctatgtaattaatcgccacagtcactgcctgagtgtcagccctcgagggtggggtggctgcttgtggcctgccatctgtgaattctcccacgctccctcccagctgggcaggttggaataactctgctcaacccattcctgggtcttgctcaccataagttctcccaggaaagatgaaggtggcatttctccctgcctggtacataatttggatttaaggatttctaagacttactctaggttcaccggagtctagttagggtgcgtttgggagcaacagggtcaagaaagactatttctcttccattttattgctaaggctccagggttgtgttggaagaagttaacgctagcaaacagagagcaaggggactttggaaattattatacttgggggcgtctaagttctacaggagctttttttctctctgagctgtgtttggtctaggatgctatctgccttccctgaggccatgggaccaagaaaatctatgatcctgcgtgtcaaagggtctttgccctgggacctctggggtcactgagaaagggaggatcctctgggattcatgcagtctcagtggggctggaaagggagtgaatttgagaacgcttccagcaagcttgccagatgactccagtccagccagctctctctctctcaaaattcttccagtgcaaaacaaaaaacaaaacaaaaaaaagtgggccctggccagacacagtagttcacacctgtaatcccatactttgggaggccaagacagacagatcacttgagctcaggagttcaagaccagcctgggcaacacggtgagactccatctctacaaaaaatacaaaaaattagccaggcgtggtggtgcatgcctgtggtcctagctactcgcaaggctgcggtgggagactcgcttaagtctgggaggtcgaggctgcagtgagctgagatcatgtcactgcactccagcctggctgatagaccctgtctcaaaaaagaagaaaagaaaatgccagctccttgtttaaagagcagacaaaagagtaccattaaaagtgctacagtataaagttgtttctttgtccccgagtctctctcctgacttgtcagggtggtttttatttgctatttcacattgcgctttgccggggacttgcatggggctggacagtcccttgctggtgtcagggcccaccctgtgggcctcacagcggaggcctagctcccagggggctgtgcttgggcatgcctctgctatgagacccacatgctgtgccctggaacggggctggcaggtccagtttggcatctctcattcccacaggactgccaccccaagccaaggcaaatgggcgacctccagagtattgtggcctctgggtatgtgctgggtacctgagcaagcctgggtgagacacttacccctcccaagttgcccaccaaatgcccttgcagggcagggacgactgatgccatgaagatgctgagtggcacatgtgcccaaccccagccctccccatgcccaggctcctgctgggggcagagtgctgcagcatctcaggacagtgacagagatgggggaggccttgcactgaggctccagggagcacagaagtaggcagcagagaatctgtgccagggaggcagggaggctgggagacaggactgtgcctgagcagaggctccaagccccgtagatgctccactgatccatcagacctcacaaaacagaattaagatttcagggcagccaggtgtggtggctcacgcctgtaatcccagcactttgagaggccgaggcgggctgatcacctgaggtcaggagttcgagaccagcctgaccaacatggagaaacccccgtctctactaaaaacacaaaattagccgggcgtggtggcgcatgcctgtaatcccagctactcaggaggctgaggcaggagaatcgcttgaacttgggaggcggaggttgcggtgagtggagatcacgccattgcactccagcctgggcaacaagagtgaaactccgtctcaaaaaggaaaaaaaaaaaagggagatttcaggatagtgactgcagaacattaaagctccacgccgtgactgcactggtcacctgcctgggaagccactatgtccccgctcagtccatgtccaccttctatcaccccgcttcccacctcagctcggccccagctgtgggcagtggtgtctggtgaagcaaggtgtgcaggggcaggagtgagaagccctgaatttggggacacacccctgctttaaaacttgccctccccctctcaagccatgatgtgtcttaatttgggtaaggggcaggcaagccgcaaggagggacacggcactgttacccaccaacaaccccctggaacaggagggccctcccgtggccacacttctgcttttcctggaagagcttgaagcaggccccagggctggccaggagcatccggaagccctgcgtgcagagaacagattcagctgagcctcctgccttggcatggcgccctggagctcagttcttgccccagatgccagggaaagacacgtcatgcacgaagttcttaccttcccatcgggggcagggacaaagctcagaaactcatccacatggcccacggccaaccagtccacaaagagctccacggggggctgcaccttctgggcatggaggaagtcccgcaccacctgggtgaccctgcggccacttgacctgggacccacgaggttaaaaaaaaagttgcttaactaaaaagactccatgcagaaataaaatgacaagagtttagcattcctgcaatatctgatttttaaaaaacaaaaaaacatgcattacttttataaacaggaaagtaataaatatgtatatttcattttatttatttatttatttttgagatggaatctcactctgtcactcaggctggagtgcagtggcgtgatctcgcctcattgcaacttccgcctcccaggttcaagggattctcctgcctcagcctcccaagcaactgggattacaggcgtgcaccaccaggccaggctaatttttctgtatttttactagagatggggtttcaccatgttggccaggctggtctcgaactcctgacctcaagtgatctgcccgcctcagcctcacaaagtgctgggattacagggatgagccactgcacccagccagatacgtatattttaaaattccacttagggtgagttctgcatgaggcagactcaggacaggtcagtcacaccagggcaatgacctaccaggtcccaccatccaggaaaatcttcagaaccaccctcacaccaggttcttattctccaagagacagatttcacc

SEQ ID NO: 1879698 - DNA, 4001 bp, Homo sapiens
atcaacgcttttggatgccctcagtggatacaaatggctgagaccctgctggggccctgggaagagggaaagcaaaagcgggaagtaggagagagagagactgagagaggagagaaaatcagacagagagagacagagagggggaaagagaatcagacaggctcctgttgggagcagagaaattctttccttggaaaaaggggttctgaaaccccaattctcttttctcttccagggatttctgctccgtacagggtctgggcagtgctagaggaggaccttgcccctacctgtggcactgagggcccttgggctctcccacgtaactgcggaggacctgggagaacctgcttcaagggccccgggtccccatcccgtcctgaccctcagcttcaagcacccagcagggagggtctgccccggctcctttcccaggtgccctcagcagccctggacgacacccctgtggttcagccagtgttgtgagtgcacaggccacacacacacacacatgcacacacagacacatgcacaccaggaaggatacacacactcacaagcacacaccaggcaggacacacacacacgtgcacacgcacccacacactcacccacgtgcgcacacacacacaaccaggcaggacacacacccacacacacaccaggcaggacactgacacgcacacaccaggcaggacacacacacacatgtacacacccacacacacgcacccacatgcacataccagccaagacacacacatacatgtacacatatccacacacccacacactaggcaggatccacacccacccacacacgcacgccaggcaggacacccacacacgcacgtgcacactcacccatgcacgcacaccagccaggaaacgcacacacatgcacacgcaaccccccacacacacatgcaccagactccctcctggtttcctgctaggggagcagcgaccacaccccagcctccccagggccaccctcctcatctcatctgcacagtcgctcccacttcccagatgaagaaaccaaggctgccggccacggctgcgcacccccacctggggccagggcaggctccccaggactggtgttagtgagggccgaacagttccagctcccagcagggcactcactgggctgtggatagctgtccactcttcaggctacgcccaaggattccagtaagggaaccagagccattggagcgttgccaccaccggaaaacagccaccgacccgggtgggatggtctccagtagcatggtgggatggtctccagtagcatggtgggaggaacagggcagtccacagagggctggacgcttccttccacagctcaccggccggtcaccgtggccgatcaccctctgggttcccgagtgagagtcctcggccctcatgccctgagcctgcaggtcaccattgtgggagaaaatggagccactgtggagccaccccagggtcctgggtgcggagccatgcggagggagggttttcaatgccctgctactgtgacctgcgtttcccaaagccgtgcatgggatgtcgtgatcagaaaaaggcaggacagaagcaacccccgaatactataaatgccactttaactgggataaaataggaaatcaaagttgatctgacgaccccagactttctaggacaaggcacccagtgttgaaagtgagcagcagattcccacggctgcctcttggccccgtcaaacgtgaggtctttgtttccctctcagaagagagatcacgggtctgtcatcacagggcatgggtacggaaccagacccagatctagtcttcaatttccgaacactcagaatgactgtctctctccagtgagaggcggagttgatccctccacagcggggctgacgggggaggggaggagattttcatacaagtgccctctgaagtggatggaagcacgttggcccttttctcaggaattggccactaaggaaaaaagctggaggacgtgttcccagatgccagaaggctgaccagaggcgggagcccctcctccatggccacagcacccaggcttctgttccaggaagccaggccccttgatgggcagccaagcgcctgcagcctccccgaacccagggctcatggcctgcccgcctcccactgtccccccacaccatggggacgctctgcctttatggggcaggcctcaggccttcacactcaccctaggcaaaccggcctctcgctcagagattcaggccgggcctctgcaccgcaagggggacatggcccaggggggtccctctcaaccctcgtcctactgtcctgggcactggggaaagcagtggccctgagcatctgtatcagtttacaggcagaatggatctgcttagcagccagtcttccaaaatgaaaccagaaaccaggtctaatcatttgagctcgataaagattccccaagtgcccggggaagctaggctgtggctcgctggtaactggtttgctttctctccagacacacagatcgtgcaagcaataaaatgaaatacgttggctgcacccacaatgtgaaggggtgggggatctatctcacgagggcatcgtctgggtaagatgatatcagatgtagcaaacaagaaaagcaaggttccagaaaccaacatatatcagcttttggcaaagcctgcgcaccgccgttatgcattttaaataactcgatgccaaatcgtaacaggctgtccttgccagaaaccatgagaggtcaagcgaggatcgcagaagagtgcaaagatttgtctttagaaagcacagtgctgaaatctattttgagttttgcaaaacaagagaccgtctgggcctctctctcttttccttggcctttcccttttcattttaaaactaacatctaagtctcgtccccactgcaggcctccagctcggggcccaggctgggctgagccagagtgtgaggacaggaccctagcaattgtgtccggggccgatggtggtcctgccctgctcccaggctcgaggggcctcccagctgagtccagagtaagctctcgatcccctaaagtttgccggaacagacagcgggcccgggcctgacaccagagcaaccatgccccatctacaacgcttctgcacagaatcagaagcccttctggaatcttcctgtctctgccttttcgaggtgctgtgaccatcactggcgatgggcacctcattgtcccaggcccagtggggagcccacctccaggactggttcctgtctactcctccctcactccagaagcaccagccctacagggcagggtccctgacagagcccagggctggaggctcctggtccagtccccagccctctgcccaccacagagctcaagcacggtaggccactgcttgggattgggtacaggcccctgggttttcaaagctcatctagggattccaggaaccgcagcagggtctgggtccacctgatctgacctgactgtccctcgttgagggctgtctggaccccaggtgctgcctgcaggtagccaggcctgtcccttcctgcgcacctgcagccagctcctccggccttgccctgtccacctgagcagtggactgagcccccgggggcatgggagagacctggggaggaggatgccattggcacctgtggccagggctggcctggggccagactggccgacactgttcccaggcacagccaggctggccgcgtgcggcggcggcgagagctgcggggaccgactgtgcctctgcaagcccaggggagctgggccgggaagagcggccagcggcgcccgggcccacaatggcccctttctccccgcgtttattgagacagttcggtttggaatatttaaacagttgtatattcacagattgcaagagggagaggattacctaaggacgagccagcccgatcaatgcataatcagataactgcccgggctctctacaaggtttcacaggaagatccgccactcaaacgct

SEQ ID NO: 1879699 - DNA, 4001 bp, Homo sapiens
cctggtgccagtctcctgccgtgacaaccaggtgcctgtcgtgtaggcagctcgcagtcaggacctgcagcctctgaaaaccctgcacggtgctgcctattggctacggttcagagagggccagttagttgcccaaggacagaagcaggactcaaacccaggatccgcttgacccaaaaaaaacattgctgaatgaggcctggccaatccctccagggaagacagagagcacagagctaccttccaggcctgtgggagtctgggagtggcccaagccaggggcggggcagcaacaggctttaggacttgaaccagctctcctcccacaggacaaagacaattctggtgccacagtcttgcatctggctgcccgcttcggccaccccgaggtggtgaactggctcttgcatcatggcggtggggaccccaccgcggccacagacatgggcgccctgcctatccactacgctgccgccaaaggagacttcccctccctgaggcttctcgtcgagcactaccctgagtaagatcacccctcttaaggggtcctctgggtgggctgggccagggctttgggggatgcctgggattttccacgcctctctggcactccagggcaatgatccctccagtggccatcctggggccagagggccaggccagagaaatggctcccactcaacatgaaattttcccctcctggaaaaccccttctggggctgcccccagagccctgcaagcaggtgctcccagcatcctcagctgcccggccgcacacagctggacctgggaggctgggcacacaggccaaggtcacctgttccccttgggctgcttctgccgcaggggctctctctggctcaggctgtgctcatttgcaagactgttcaggatggagtcgggggcagcaagggcaggagcgcctcctaggccctagtcaaacaggcagaaagggaaccccatcagttaccaagcagttaagggagaaaggcccctcccagacccccaccccacctcctggccccagagcccctggctggaggccatccagagagcatcttgttatctcctgtggcccctcagcccgttcctactatcaagggaagcatggggatcccaaacctcctggggagtgggctgggagctcccctgggtggggtggggggtcacacagagcagggggcatgtgtgagtcttggggagggagggagggagggagggactcaggtgttaggtgcgcctggggaggcagggatcctggggaaagctgcccagggcctgtctgagagggtagggtgccagatgccacaggggtctgagcggggagtggggtgctctgatgggtgaccctcattagtctaagtgggagcctgagatgtaaatgtgaatgtggacccagcctcaggacgagagcagctttggtatgaattcactgcttccaaacaaactaggatttggatcatgtcaaagtcagtgggatttagactaggagggccccagggacccttgagtagagggttccaactggctcctgtcagcacctcttggaggctgtcccagattcctgagttagactctccaggttggggcgtgggagccacacctgggacatgtccccaccctcacggcggtgattctgatgcacctgtcccaccccctcacttcaagcagaggagaaggacaggtcttgagaggggcaggtgcccctgatggcgggaccaatatggcccaagtgtgaactggaggacgctgagcccaccttctgcaagtgctggtggggaccgccagcccctgagccttcctcactgagaagccgtgatccctccgtgggctggatcccaggtgttaggaagactggctgtgctgtggaacgccctccagggctccggggctgggggaccctgaccccctcccaggccatgccaggtgctgtgtgtgattgggcgctggtgctgactcagtggccagatggcctggactgatgagctgccagccccccaggagtcaccatgaatctcagggaggtggacagagggcttgggctccgttccccacagcagcatgtgactcgactgataagaaggtgtctttgtgtggttgccaggctgggctcacgcaggaggggcagctgggaattggggttgggggctggggtacccacttaacctcctaccttgggggtagggattcctgctcatcaaggctgtggatatgagggctgggagctggggagggcagaggcttgagctgccccaggacacagggccccatcaggggacccaggtggcccagcttcatgctcttgtgagcctctggggcctgctgtgaatcgttgtgaattattcacaaggctcagctctctcgctggcgcgtgggtgagcactgagggaggaagggctcccggacctgctggtgggaaactcgatcctgccagggaggctgtgggtggccacgggacgaggaagtgacacgctgcagaggagctggaaggctggacagcctcggggaagctcagctaattccaggtctataccttggggtgttataacagaaagcgcttgagattgcaggaatgtcctgcacgtcccccacacctccccgtctgtcccgttcatggggccaagtcttcccagaagcagaggacttgtcacactgacctcaggggctgctgccacgcgggaccctccctctgagcccttgtagaaaagagatctctcatacaaaattagccaggcgtggtggcgcatgcctgtaatcccagctactcaggaggctgaggcaggagaatcgcttgaacccggcagacggaggttgcggtgagccaagattgagccattgcactccagcctgggcaacaagagtgaaactctgtctcaagggggaaaaaaaaagaaaaaaaaaaggcatctctcagttgggaggcatggggctggcaggagccgggctgggcaagtcccaggctctgggtctcagggagattgagttgggaggattggccctcccggcaggagctccagtggctgatggaggggaacaaggggtccagatccctaatcagggcagagtgaggaggggcaaagagcaggtggccccaaggccggtggccatcctcccaggagggtcctggagcccaggagctcactctgtccccctcacacctgcttctggctgccccagggcctgagcagctgggcagggctgtgggggtcagggagctggggatcagttgggaccctgaggcttaagcttccaggctggggagtgaggaggctccaggctcttcccctgggctcgtgggtgctgccagtcacagcaagctggaaaaccagttagcccagagattttatcaacttcagcaggtgcctccttccccgaaagcctcccctacccccgaccagactagactggaatgggattggaaagtacctggggctgggtacggtggctcatgcctgtaatcccagcactttgggaggccgaggcaggtggatcacctgaggtcaagagttcaaaaccagcctgaccaacatggtgaaaccccgtctctaccaaaaatacaaaaattagctgggcatgtggccgggctatgcctgtacaggtggcccatgcctgtaatcccagctacttgggaggctgaggcaggagaatcacttgaaccagggaggcggaggttgcagtgagcccagatcatgctattgcattccagcctgagcaacagagcaagattctgtcaaaaaaaaaaaaaaaaaaaaaaaaaggaacgaacgaaagaaaggaagaaaggaaggaaagaaaagaaagaaaagaaaaagaacctggtgctgagtatcttctaggggtctggcaccacccagtgtcatctgagccacacaaccaccccgagcagtagctatgtaatcagcccattttacagatggactcattcaactaatgtttattgagcatcttctatgtgccaggcaatattctaaatgccagtgatatgctggtgaaccagacaa

SEQ ID NO: 1879700 - DNA, 4001 bp, Homo sapiens
tcacacaggtgggtctgggtttgccagcagcctgcacactaaccactatgttcactgccctcctgcttgcatggcctccaaagcccatgctcattccacttaaggaggcagctccaagatgtatttatgggccaggtgtggtggcttttgcttgtaatcccagcactctgggaggctgaggcaggaggactgcttgagcccaggagttcaagaccagcctgagcaacatagtgagaccccccatctctacaaaaataaaaataaaattaataacaacaacaaaagaagtatttacagagcacttgctgggtgcagattctaagctaggcacaggacaagcagctgtgagtcagacatggctctgatcctgggggagttgagagcatggccaggagacccccagaaaaataattttggtgggtaagtaaagcactctgaacccaagcaatgttctgggccccaagaaaggcagggtctctgaggccagagctggttgagggttgagggagggtggtttgctaagacttggactgggaagataagccttgaagactagagctggaaaaaatgaactagggaaatttatgttaattgtttacatacacagaaactaatgtccagagaagctgagtcacttgctgaagaacccacagcacccaggcataaaatgtactcccggtgagggcctgggggcctgtggatggtttagctgcatttcatcccaaggagatgaaatgtttgttgcaaagctgtttcctgtccacccacttacccattgcacaatctcttccaggtatcatagcagagctgggttcatgaacccagcaggctgaagctgggagaggggcagggcctagaccctcagcctcctgattctcagcccagggccagcaagaagaggaaggtggatttgaatatgtgtgcacacaaggcagttgcctcttataggccctaacctcatactcagagctacagtgggggtggactccatatcagggatgatggccacagcccatgggagaagccaaatgagggccgagtgcaagcagtgccctccttaggctggccctggtactgcaggcccgccttttattaatattttaataaattgatcacatattcattgggcacctatactgtgcaaggccttgtgccatgggccttacgcttaagcagaatactcacaatgaccctgcagagatgggccttagaatcctaattttacaaataagaaaactgagtctgagtagttaagcagcttgtctggggctgcacagctagtaaaaggcctagccagtactcaaagccaggtcggtcttattccaaaagtagtgtcctcctctattctaccacatcacctctctacactgccctaggacttttcttctgccgtataatcatcttaattgtctgtaacccaaggatctagttctaagaatcagggcccagccagacattattaagcaagaccaggacccatgcacactgccccagacatcttcagatgtgcctcctaactaggtcaggattgattctagagaccatgacacagccaagctgggataggtgagggaagattgctgggagccctagacagctcacggacaagaaactagggagccctgacagaattagaactcccacgttggggcctggagacttcaaacccttcaagagatgagattttccagcagtggtgctgcatggcccctccgcgaggctgtgtggcccctccgtgaggctgcgtggctcgtgacctctctgagtcttcatccagtttcctggtgactctccttgtcttctctctcaggttgtccatctgggactttcaaggccaaccaaggggatgaggcctgtacccactgtcccatcaacagccggaccacttctgaaggggccaccaactgtgtctgccgcaatggctactacagagcagacctggaccccctggacatgccctgcacaagtaagtcctagggcccctcaagggcgatggctggccgagtcccaggtctacctgcagaaaagctcagagtgaggattgggtgccgtccggttacagccagtctttccctggtgggaagagaaatggaaaagtgctcaagaaaggggcatcctggggtggccatgctcccaccttgcagacaccacagtgctggcatctggctccttacccccttctgctgagtcacatggaagataaagtcaaggtctggattcacaaagggacaggggatgggaggcttggcaggagatgaagcaacacaggtagtatatgtggcagaaaaggctgcccagtgttctaacctggcagcagctgcctgaatcacagcccaaggtcctctaggaaggcactgcctgagaacgcagcgtcacaacccctgtatctgtcagggatggcattcagctgtaagtaacagagctgagccctatggctgaaactgtacggatttattctctcacccaaaaggagcccaaggtagacagtcctgggacagtatgggcaatccacgatggcctttggggcctggctctttctgccattcagaatggcataatcctagctcactgcagcctcaacctcctgggctcaggtgccctcagccttctgccctcagcctcctgaatacctgggattacaggcgtgcaccaccacacccagctaatttttctaattttttgtagagacagggtctcgctatgttgccaaggctagatttgaactcccgggctcaaggaatcttcccgcatcctcccaaagtgctggattacaggcatgagccaccacgcccaacctagtttctgttcttttttttttttttttttttttttgagatggagtttcactctgtcgcccaggctctggaatgcaatggcatcatgatctcagctcatggcaacttccacctcccgggttcaagtggttctcccacctcagcctcccgagtaactgggattacaggcatccgccatcatgcccggctaattttttgtatttttagtagagacggggtttcctatgttggccaggctggtcttgaactcctgacctcaggtgatccgcctgcctcggcctcccaaagtgctgggattacaggtgttagccactgttgtttctgttcttaacgtcacttcatagtccagcatagctgctgaagtcccagccatcacccacattttaggcagcagaagcagggaaaggacaaagggacacgccatagctgtctgtctctttttaaagaaacagccctagtcaacaacttctgctctatatcagtggcaagcacttaaacacaggaggctgggaaatgccatcttttagctggacatattgccaccatgaataaagctgggctgttctaaggaagaaggagaaaatagatactgggcaggtataattccaaacgcaaaaatactatcctcagtaacaaacactgagcagtttgtaagctgggaggagagaaaggtttgggcagatgtacagcaggctaacttgtattctagaaacatttctctggtggggagacaggacaaagaatttaaggaagtcctttcagaggggctgagccagagcagcgggcacagagtggtcacatggggaatagtaccccctgagccccccactgaccaacacctctcccccgccccagccatcccctccgcgccccaggctgtgatttccagtgtcaatgagacctccctcatgctggagtggacccctccccgcgactccggaggccgagaggacctcgtctacaacatcatctgcaagagctgtggctcgggccggggtgcctgcacccgctgcggggacaatgtacagtacgcaccacgccagctaggcctgaccgagccacgcatttacatcagtgacctgctggcccacacccagtacaccttcgagatccaggctgtgaacggcgttactgaccagagccccttctcgcctcagttcgcctctgtgaacatcaccaccaaccaggcaggtaagtgcttccgac

SEQ ID NO: 1879701 - DNA, 4001 bp, Homo sapiens
tcgaaggcggtggccaggcgcagggacagaatcacagacagtaagaggggacaggctggggtcatcctatgtcccttgccctgtggagagagacagtggtcagcgggcccccagcacagccagcatgggctctgaaccttctatggtgagctgcgggagtgggcctcataagttaagaccctggtctttgaagtgtcacctgggtccacctgtgtgaacttagacaagggacttgacctctctgagcctcagtttccttacctgtaaaatggaccaatgataggacctatcgcacaagtttcctacaagggtgaaataagtaagggaaaggactcgcgagagtgcctggaatcttgtgagccctgaagaaacagtagttgttgttgccatcgttctgtttcctcagagtcagcccatcaactacaagcatattcgccttgcattcagatccagccccagcctcaccatccaacctgtattctccataactcttgctctccatccccgtgtgtcgtgatcagctgtgaggcatgtcaccgcgtaatcctgtggtaattgtcaaagtggtgatgtttgactatgatttgcttttttataaattagagcaatttgaggttattcctggaacaatgtcattctcactcacttgctttactgagagggagagaaaggggcggagttacagccagtgtgccaggaactgcgcacaacctgagccatgcccacaggagggcactgtcagtgtggacgtcacatgtatcactgctgtggatttcctggttggaataagggggagaggcaccgagtaaggggacattgggcttgagccccaacccagccagccacctgctggtgggtgaccctcatgagtctcagttttctcatctgtaaaatgggtgcagaaattccccctcttacttccctcttcccctccagctccatgggattatcttccaaggcctggttcagggcctgctaccccaccccccactacccacctgtgaagccaccagccagtcgtgacctctctcctatactgtttccccaaggctagttcattcagcttatgggtcttccagttcctaagagtggggacccaagcttgttgctttctaccttcccttaaagtgctgccctaagctgagctcccaacaggtgtgaatgtactccaggtgtgggtgggcacctaggacccaagcccgacccatacagacacacagagcagtcaggccagagtgggtaagggctgaggatggggggagctgcaggtgccctcccacccaccaggccagggctgtgtcactgcccacagcctgcgcaacctctacccaactgcccagaaaatggaacctagcgcgtggtctgaatcagccccacttccaatcctaccccccaagtaatccaagcggcctccctcctgcatgccacaggatagctcacagcactgcatgggccccctagagcccagctggtcctcatcagaggagaaaagatggggctaggaaaagggagacaacccgctccagatcacacaaaggtggccacagaggacgcaagcccaggatctgaggcccagcccaggcctgtctccctccaccagtagcctctgctccttccctaggcttgctgctcaggcttcaggccagatggaccagctattagctctggggactgaatcagaaacacaggacaattcacaggtatgactagattctcccaagacacagttgctcccagggaacagacttccccttgggtcttcaggagtctaaacagcaggcagaggggggacagaatttagaaccccaactttccagtccctgtgcagcatccatggagctccccactgctccagatcccacatcccttcatgctgcacctccaagccaggcccaagcaagcatcttcccctcccagccatacaggggctgggggagatggtggagtagctccaggcagacctactcactgcagaggagccaccccaccctcctcccaagacccacatggagttattcggcggaagccagacaggctgtgcctctccccccaaccacccaccctcctcctcagagctgaaaaagggatcagacccctggtctttcccaccctacatcatgcctgtcccacactgctcagctcgccccacctgctgcggcactagccaagccagcggctgatgatgagtgacatccaatccccctgctgcccccaattatttttaagccgcaaaattcaggccatggctgcggctcagtggaggggaggtaggggctcattataaccggcctcccctcccccacttacagcagctcagggaacctcccctcacatacacaccaacacacatgggtttgaacacccttgtgccctgaggacacacacaccaaagcatgagggcacagatgttcacaggagttctgcatatgaatggatacatatgtacacggacatgcacacaggtgaaacccacagattcatgctgtcacacacactcaggagttaacacgcacacacaggggtgtagaggcttacacttgtacacatgcacagaggtgcacacgcattctcgactgagaacacacatgagtatctggccctctgaggctcagcatatgacagctaagtgtcaggcaggatcctctgcggggtcttcctttgcatgtctgaagctggatctccctcccctaccctgctcctaggctgctgctccctactccacagccccgccccatcaagaagcacaaggtccacatccttcagagccacaggctggcttctccagaatggagtcacttttaacccaatccaacccccctcctcccctcagtctccttcagacaccttcacgctcattctgggatttcgtcctggacatgcgtaaccctcactgtgccggctatgacataagaccttttggggcgcctttttatattacttcccaccattcaaaataaggcaaagacccaattccaagctgggtcacagacagccactggttcattgaagaccctcctgcctgtgtatagccaggcctgtcctcctgggggcactgatgacccagaggcctctccctgagccacccgggaaggggacctagaaggatgatccttgcctcacaggcagcccaagtggctcttagtcatgattaacccccctgagcctgtttccctctctgtgcaatgcagaccatgagccttgccctggggatggcagacacctcatcagcctcccaacaagttcccagcacagagcctagctcacagccctgtctcctctctgtcttttcaggacctcataaacgctgccctcttgcctgctgaggtacagggcactgcctctgggaaggctctttgggttgaaccataagtggctggctacctccaaacccaggaagaccacagacccatccctgcacaagagttagataggagaggtactaaagtcagctctgaggaagaacttcctgggccagaggtggctgatagagaggaggatcaaaaggcctcctgcctcagagatgggtgcggagctggctgaagtagtctccctctcacttttaaccctaccaaggcccctcctctagggggctgggggctgccttcaccacatgcccctgaccccagcaaacccaagaatctcactctgcccaaacacactcaagtcccctttctttccacccctcagggctccccagcttcccttctgcaccaataaaggaattcaaagctttcagcagctgaaagggccaaggcaagactgtggggtaaggggcagagcagcgggagaggggtgtctcaggcccagggccggtccgggattcccaggatgactcccattcacgctgggtggcgggggaggggcgggccgggggaaggggcgcggcgacgcgcacatccgtcgcgtttatccacctggcagctccaattcgcccgcccgtcactcaccctccgcctccccggcgctcgccgcccgacctgcccaggccgccacgcaggcgg

SEQ ID NO: 1879702 - DNA, 4001 bp, Homo sapiens
aaagacatttcatattcatggtcagaagctttgttaagctggaaatactccccagattgatccacagattaaatgcaatccctgttagaatacaagctgacttctttgtagaaattcacaagctaattctaaagttcatatgaaatgtaaagggacccagaatgaccaaaataatcttgaaaggcaataacaaagtatgagtactcttactgcttgatatcaaaacttactacaaaaaaaaaaaaaaaaacccggtaatcaagacagtacagggctggcataaggatagacatgtatatcaatagaatggaattgagttgatagattaaacccatacatctatggccaactgattattaacaaggttgccaagacaattcaatgaaggaaagaatagtcttcaacaaatgatgctggacactgtatagccacttgccaaaaagaaagaagtagaaccctacctcacatcatatacaaaaatcagctaaaaatggatcaaagatctaaacataggagctaaaactataacacttgtagaagaaaatgcaggagaaaatctttataaccttggattggacaatggattcttagatttggcgctaaaagcacaagtgacaaaacaaacaaaaaatagacaaactggacttcatcaaaattaaaactttcatgcttcaaacgacaccatcaagaaagtgaaaagacaaatccaaaaatgggagaaaatatatgcaaattatatatctgataagggtattgttttcaggatatataaagaactcttacaactcaataataaaaaggaaagtaactcagtttttaaaatgggcaaataatttgaacagaaatttctccaaagaagatatacaattgtccaataaccacatgaaaagatgcttaatataatcagtcataagggaaatgcaaattaaaaccactacgagataccactttacatgcattggaatagctaaaataaaaaagacacataataacaaagattgacaagtacatgcagaaattgtaaccctgatacattgctaatcaaattgtaaaatggtacagccacttttgaacaatttggtagttcctcaaaaagttaaacatagagttaactctataatataatagaacatttccactcctagatatatatccaagagaaatgaagacatatcttcacccaaatgcttgtacataagtgttcatggcagcattattcatgacagtcaaaaagtggaaacaacacaaatgaccatcaactgattaatggataaataaaatgtggtatatcaatacaatggaatattacacaaccataaaaaggagtgaagtacacactacaacatggatgaaccttgaaaacattatgctaagggaaagaagccagtcacaaaagatcacacattgtatgactgcatgtatatgaaatgtcatgcataggcaaatccactgagaaagaaagtgggttagtggttgccagggactgtcaagcaagggggaatgaggaatgactgctaattagtatgggatttcttttggaagtgatgatgaaatgttctaaaattagataggttacacaactctgtggcatactgaagaatcactgaatgttacactttaaaagggtacattttatggtgtgcagactacagctcaataaaaatgttatttgaaaagacttcatggcttccccattgctatcaggatgaatttccacctcctgcaggatgagactcctgctgatccctccaggctcatcttttgttctcccaacacccaagcattcagtgctccagcctcatgacagatccctcaacatgctcccaagtccttatctctgcaccttgaagcttgctgtatatacaatgtagagggtatgaccaagggcttgggagtcacatcctagcattgcagactactgcttccagcatgatgctgcctctttgccctaaaaatggccagaccaatactgactccatctctgaacactgaaggatgctctataaagttcaatgacctcttacattagatggctccatggcccacctttcccacaggctttcctggagattccagtttttctagttactgggaacttaatctagtagacacagaaactgctctcctagttggtggtaggctctcaagttgaaaagccaggtgagatcaggggcaggggcactagactaaaccagatattgggtgagcgtatggaagaagctgaccaggagaaagggagaacatgcaagaatgtcagtgagagagagagaaaagagtctacacagccctgggggatgaacagagaaagtccgggttcagctgcacttctgagcttttgttctgtgagatctttttcataatgtgccctctttatgtgagctaacttgattggttttctgtttcttgcaaatcaagcatgtcaccctcctttaatgccgaaaatgtccctttctgccctttaagaccccaataggtctcttccatccaggtgtgtatttagcctttcctgcctgcaccaatgacaggttctgtggcttggtcccagcatgcagcaatgcacatcctgttattattcattacactttctctttgagcttataagatctggggttggacagacaatttttaagcttcagcttttctgctggagagctctcctagatgacagtctgaacctttaaatcctgtatgtcttgcaatgaatgtctcatctttctcttacaaatttctctaaactagccgcctgccatcatgctgtactttgaggttgtcaccactggcctgacaatacccaggcaagaagagttagcctgactctgtcctctcactcagttcctagtagctcatccacaggtctctcctgcctggctgcctcttcactggcctccctgcctccagcctctctcttcttcctgttgctctgcatacattcgctctatgatgctccccaaaatactgccatgacatcagctaagacaactaacacgtgtcacatatctactgtggatttgtatactgtgccaagagctttaaattttaatttattctacaattaatctcaagagggagcttttagtttctccattttataaatgataaatttgaagcacaaagaggttcagcaactttccactctatgcctaactccacacaacgaatcgtgatttaaactcaggtctgtctgactcttgctctttcaagtaaactggactgggtcaggttattcccccattcagagaccttccacatgactatttcccagagacaaagtccaaagtcttttttttttttttttgacattcaaggccctccatgagctggccccaacctggacctccaagtgtattagtctgttctcacactgctaataaagacatacacaagaccgggtaattgacaaaggagagaggtttaattgactcacagttcagcatggctggggaggcctcaggaaatttacaatcagggcagaaggtgaaagggaagcaaggcaccttcttcacaagatggcaggaaggagaagtgcaagcaggggaaatgccatacacttataaaaccatcagatctcttgagactcacttattatcaaaagactagcatgggggaaatcaccctcatgattcaattacctccacctggtccctcccttgatatgtggggattatgggggttgcaattcaagatgagatttgggtggggacacagagccaagccatatcaccaagtaaactgaccaactgaaggttcttatagtcatctttttatttgttccctgaattttcatttggattgttcacctcacatggaaaagtccttcttcttctaggaggaacatgtaatcctctgatgtattgtctgttgtgggctttccctgaaaacacagagaatatcctcccttttgctctgcaatagaagggttttagcaaattcagtatgtgctgcttgggtaggaggagcagaaaataagaaaaggagagaaaacaggacatatgagccccaaa

SEQ ID NO: 1879703 - DNA, 4001 bp, Homo sapiens
aaggaagtttatttcttaggaagtgcactgaataatgtatttcttttacagtgtaatatgggggtggggatatgcgaaagaaatgtgtatttttgctagttgcctaccttctgagataaataagcacaatcttgcaatggatccaataacccagttaggtattatagattagtatttaagtttgctgtagattgtgtgtgtgtgtgctaagtaaaagttccatgattcacaattttagtattaacccatgttgcaaaagctgttactggccaacagattgtaatgatgtgtaccatataacacaagcattaactaggcattaacgtttgtaaagccaaatataccatgcagaagtcttcatttttatagcagactgcattaaaacaagttaaatcttgctgtttggggggaaatagtcttgtttgtacaaagtgaaaaatggcacaatttgggcatattttgttgggaagagggggtggtgtagagggagcacttgactgtggctttgacaaaacaaatgaagtcaatgacccatccaggttagactccataaggaactaagacattgattttctttagagtcttagagctggaaaaagcctttacaataatccagtctgtgattttttaaaccttttggtggttctggacctttttgagaatcttagaaaagccatggagtttatccctagaaaaatgaatatgcctatatgcaaaatttgtttgatggcttcataggatccaaagaccctgaagccatccatggctcatgtatttctgcttaagaaagcataatcttgttctgctctctcattttacaaatgattaatgcatcccttttcaactactccagcgctgttgctgctgcaatgttagcaaatgcaagccagagagaagcacttgaaaatcctttgatgtctaaaaaatgttcaaatagtgtggatgtttacatatctgaagttttcagcatttaagcaaattaatgatcatttcaacaaatactagcatatccggtttcccttaatagcctgtcagcagtgctgccttgtcaatttgtgtgtgtgtgtgtgtatgtgtgtgtgtgtgtgaattcataaggagtgcttctgatgcttagtccttgaaatggaacttcaactgtctttcaaaacactggcttcaaaataggatgtgttttcctaatgaatcagaagtgggcaatgagcattgttccacaggaataatttttaatttaatttctataaaactagttgagaaatgagagcctgtccacccaccatttgtgtatcagtggccaattcattagtaaaaataaaggaggggaaaggagactggagtagtggttctcaaactttactgtgcgtaagtataacctgggaagcctgctaaaataaagatttctggagattagatcctcagactagctgatgcagctagtctgttttgagaaacagtccttcatagcccttacctgttctttcacaacaacttgctatttgcctctgacctaaggaaatgtcttaagctcctgaaactggtttggcagaatgtcagtgatattcagagtcaagagtgcctacttgagtaccaagcaccatgctaatgatttcacatacatattaccttattaatcctcacacgggtgctgtgaggtattattatccccagtgtagtgatgaggtagttgagggccagagatctgtgcaagggcccttagcatatgacagccaggatttaaaccttagtgctttgttctttcactaccagtatttcccaaatgagagtctctggggaggagcagattcccaggctcctcccctggcgattctgatttcagtaggcaaaggtggagctctagataaatgccttggtgattcttcagatagagcaagtttagaaaatgcatgcgggacaccatgctgctccacagccaccccagaaatggatcatcagacctaatcaatgccaggagaccttcatcaggtcagataaatggaacaaaaataaaacatcattaattcccctcaaacaacatgttttttaagtatctaagatgaaccagaaagcaaggtgcttattagggaagacacaagtttaatcctgttccctgcccttagggtactcacaatctagttggggaaacaaaacattaacaaaatgatacatagtgagtccagaggcaacagtttgatagaataatgcaggcgagcttttaaaaaccacagggagggccaggcgcggtggctcttgcctgtaatcccagcactttgggaggccgaggcgggtggatcacgaggtcaggagattgagaccatcctggctaacacggtgaaacctcgtctctactaaaaaatacaaaaaattagccgggtgtggtagcgggcgcctgtagtcccagctactcggaaggctgaggcaggagaatggcgtgaactcgggaggcggagcatgcagtgagccgagatagcgccactgcactccagcctgggcgacagagcaaggctctgtctaagaaaaaaaaaccatacacagttattgaagatggttctggtaaaagcactctggtagctcagaggtaacagagctctttgtgggcaggaaaacattaactagaaagggaatgaatgtcttttctcctctctccagggcattatttacttggagttctgtaacatgtccctgtgtttgctttttgttttaattggcttgtcttgattctaggataaggtcagagacggaggcacaagacgtccccaagaggtgagttctgtttcagggagactgacagacaccagtgggtgctttcttcaagggttggggctgacctaagaaggagctcccaggccacagcattctgcaatacactgtccaataatttgtagggaagatctaggaacatgcaaaaggcagtttgaaaaaggacctggttgccaaagtaccatattacccatcaatgtcctctcctacccatttccctttttcacaccctctaaatctctataagcaaatgcggaaaatgcaaactaagctttgaacagaatcaaatgagtccctctgggacacttgcaggggacttatttcttccgaaggatgtgacagcagcttctcccaatagtggcagcgtttgtttcactgttagactggaggagcacaaggagcatacaacatgtggctctgtccacaccactgtgaagttgttggttctgagaaattactggggggagtgttaaaacaagattggccttatctctggggagtcacctgtttaacctgacaagaatcctgctcattaactcaatgtgttagacactaggatgtgccacatgggttccctttcaggagtgaaatttaattccctaggtgcagggaatgctgacagtaagtggccctcaagatataaccccttataggaattaccttcactgaaagaaaatcagcttgaccaaagtcacagctccttccctggacagctcatatattaatacaaagactgggcatggtggctgacacctgtaatcccagcactttgggagactgaggcaggtggatcacttgaggtcaggagttcgagactagcctggtcaacatggtgaaaccacatctctactaactaaaaaaaaaaagccaggcatcgtggcacagacctataatcccagctacttgggaggctgaagcaggggaatcgcatgaacccaggaggtggaggttgcagtgagccaagattgtgccactgcactccagtctgggtgacagagcaaaactctgtatcaaaaaaaaaaaaaaatacaaagactgattgatgtagagtttatactaaccctcttgtcccaaattaggagaactccgaaggttcatctcagcttcaaaaccccctttagagttgcctgagacctttattgagactatattgcagatcaacttctccctctgcccaatcctgctcccatcctgcttccatgccctaggtgcggatcccaagggcacttccaagtaagccatct

SEQ ID NO: 1879704 - DNA, 4001 bp, Homo sapiens
ccctgctggcctcggccccgagggaccgaaggaaaaggatcagggcgtctccctgctacctggggactggcccaaccctgggaacttggccttcgtggctgaggggatgcacggaagaagccaccttctcctaaggagtgcgtgggtgaggggggctctgtgccagaggcctgggctctggggtgatgccgtaggggggcaggcctggttctgggggccacctctgtctgagcagtttcagggcttagaggttctgcttggggggatggggtgtggacagacagttctgtgggagggagctcagtttgggggctgccgtttgcggagaatggctctgctcttggagtaggggacggaatagcctcttcccctctagaagagatcagggacagctcagatctgggtgggctccgagggtgcctgcggttccggtgcagtggcaatgcaaagggcactctcccataaccgaacattcctggcttgatggggtctcgaagccgggacctgagaaggtgtttcagatgtgggggcacagctctgaccacctctgaccctgtttccccagtttacttcctggcaccaaagacaagccctctgaagccacccgtgctcccctttccttcatgctaagcccccaccttgcccaaggcccacctcttccacccaggcctctcacctcctggccgctcgaatctcctgggtctcctctctccctaggtgggaagcgggacctcgaagtgggccaccccttccccgagactgtgtcctgtacaaggggagggtttctggagaagtctggggtctgggaccctggccccgggggaggagggcttctggatgtcttgggggccggggagggaggggcagactcgggtggagctgcactgtagggagctgacatgtccggctcctgcgctgcacccccaccccgcagggctgggagcaagaggcccactggacccaaggtccccagacaccttcggggccctggccctcctctgtaggtgtctgaagagagtgtccggacaacacctatatagagaaaaaggtcagacagaattggaaggattagagggaactgtccagagtgtccatgtagaccaacactgaggctcacggagtcgctaccagtccaaggtcacattcagcagcagagggagaactacacctcggcctcttggtgttatgaggcaaggaactggggagttggcaggggaggtgggtgggctgtggggaatggaggcgtggcctggagagatggggtgggagcctagggggagatgaaagggtggcaggcaggctgcagctgctcacttgtccagaactcacctcctgatccaagcagagctgagggagggacagaagcagcagcagatacagccagggcctgcaaaccaaaggccaggggagggacgtcagactggagccagagggggtgttgcaacactgccctccgcccccagccggctcccatatcctgactaccaacttctcagaaagcagaagttactcatcacttcccctgcccctcccagtggtcccctttccctcacttccagacacagagccatcccagcacctccccttttcctcccccccaacccgtggccccttctctcacctgccagtccagttctccatcgctccccctctactgccccagggggaggcaggagcggactggtcacaaaaactacgcaggcatctgggcgtggagggtgctctctgcagggacagaagcctggtggttacctctccagtgtccagagagcttggggctgggaggacagctcagagaatatggaggagggggtgaaactggtccatccctttaggatcctcagggtgggagcagggaggatcactgccttgtccatctgtagaggctacatggtcaggggctgacctcagccctccaactaaggctcagtccccacctctgggccctgtaggggcttcttagctcctccccaaatcctacctagggactgtttctaagccggctcaggcacacacaaaaggctttttttttttttttgagatggagatctcactctgtcatccaggctggagggcagtggtgccaccaaagctcattgcagcctcaaactcacaggctctccttcctcagcctcctgagtaggtgggactacatgcgtgcaccaccacacccagctaattttggtattttttggtggagatgggatccagctaaattgcacaggctggtcttgaactccaggcctcaagcgcttctcctgccttggcctcccaaagtgctgggatgacaggtgtgagccaccgcacccagccagagggctccttctaaaatggttgtcatctgctcccactcctgccctcccagaggtgcctagaaagtagaggaggaaggctccactgaggatgcgccagacactctctctgaggacccaccagaagccccttccttgggtcttccagacacaagaccttccccagtcatctctctgtcctacttgcctcccggctttctcttcccttcttagataagctctttagggaacatccaggcacatctcatacactttttggccaagggataagctaaatgggttgacggtttaatctctagagaagaagccggcaatgtaacacccactctgggtgccagcatctggagttggttcagtgagggcttgtttcctgtgcgtctctaccagctggggaagcgggaaggagaggtgcagccggggctgcctcatgccccagccacaggcctctcattctgaagagccgggaagtccatctgaagttcagctttgaacactggagaagtgaggcttggaagccaccccagccaccaagcctgactctctttgcccccttcttctcactttgagtccttcccacccctgctcctcatcccactcttagttctgctttccaggaaaaaaaaaatctgtttctgttggatctgaaaggcacccgggagaggaatccagggagccctcgcattgctgaggtgggccagctctggggcagaaaatgaccaagagaagggtaggaatgtgcctgggggcagacactcagccccactgccctccctgagacctagggttcggaatttgagggaggggtcagagtggctgagccagagcgggcgcctcagggattggggttggggtgggggttgccgatggccactccttcccctggctgggccggccactaaggtcagcaactccaccctgactgaacgggggaggccaggatctccagagaagggcccatgttccacccaagtcttcaggctctgcctgactcttgttactccagctgagggaagaagaaatggggtgatagtcactgcctgccccttctctgatgccgacccctcttcatgccctctctgcctctgcttctctctgccaccgagatctcttctcgcagcccctctccacgggtctacccagtacacataatcccatcccgagctgggtttggctttggcagttccctggagaagtgaggggtgggggtgacgtgagctcccggggcccgggccaggcctggctccctctctggaaaagtcccaccccaccctcccctgcgcagcccggcaggggcccatgccccctcctctgcagaaacacacgcacatttatgcttctcacccctttccatgtccctcatttggtgtcgttcccggcccaggacgaggaaaggagaggtcagaggtggtcactctggtgccagagtagaccctggtctggacaaacgcgggctcctcctggccacacctctccacactgcccagtgaagaccaaggaacagagacctgcgcagggctcaccccttcacccccaggtctccctgctggagagtggttggaccctgtgtttctgggcctagccatggagaatccctgtcctgagtccgaattcccgggccctcagagccctccactcctgggtctggcaggccaccccaacaggtgtctttcttttttgtcaacctcttct

SEQ ID NO: 1879705 - DNA, 4001 bp, Homo sapiens
ataatgggagccccacggagcacacagtgttaataattagaaggaaggaagagaagttattttgtggcgaggaaaggccttttatgaagtactgtgtggacaagttattacaaaggatgaaatgaactatcttgtcctttaaaatctaagccaggcatggtggcacaaacctacagtcccagctacttgggaggctgaggcaggagggtcatttgaacccaggagtttgaaaaagatacagtatgaagtttgaaatctgattaaaatacagaagaaataggccaggggcggtggctcatgcctgtaatcccagcactttgggaggctgaggtgggtggatcacttgaggtcaggagttggagaccagcctgaccaacaacgtgaaaccccgtctctactaaaaatacaaaaattagccgggtgtggtggcatgcacctgtaatcccagctatttgggaggttgaggcaggagagaatcccttgaatccaggaggcggaggttgcagtgagctgagatctgggcgatagagtgagattccgtctcaaaaaaagagaaaaaaaataagaaaaaagaaagggctgcaatgcacaatggttgtgcctgtgaatagccactgcactccagtctgggcaacaaagcaagaccttgtctcttaaaaaaaaaattaaatctatcctgaatcttattttcctaactctggagggatgtaccttgagactttctgggtaaattccgtgcttttctaaccaaggataagtctcccttcatagcaaaaaaattattaccctgatgtgaatcaaactaatccacatagtcttcgtcatgctcaatgaaaatgtactaagttctccctctgtgctagtaacagtgattccccaccattctcctaaaagaaaaaattctagtccaaatataatgaaaatagctcacattctaacaccaccctggcacgaaatttggcttcaatacatacaccaaaaaacccctcttaaaccaaagtgccactgccaagagtttcatcttccaggggatgaaatggtgattccttcccagctccacaaatctcttataagcacatacagttttaagttagtttagttcagatgtagaggaaaacagctgaggaaaagaaagttaattaaaggagggtctggagccgtcttggcataaagatgattatgtatttgtcaatgcacatcgagttctctggaagacccaaagccctgaactaggctgggtgaagagacacaagaaaagcaagttttcattttatgttctccaactgaggagacaagatacaaaccaggaagtggtcttaattattacaattaatacagattagcataatgccaacatttgtggaatcctgtgtcttcccttattcccaatctagattatgcacttaaaatttatcaagcccgaatgccacatccagtgccaggattccatcatcaccatccttggcagatggctatccagtgtcttctaaacaatttcagtcaagaggtgcttcctcccacatacctttttcttagagtctcatctcaggctctgccctctaggaagctttccccaacattccctcttccgtttttcctctcagtattttaagtttcatgttcaagggtacatgtgcaggtttgttatataggtaaaatcctgactcgggggttcggtgtacaggttatttcatcacccaggtactaagcatagtacccgacagtttttttttttcctgaacctctacctcctcccaccctcctccctcaagcaggccccaatgtctgttgttcccctctttctgtccctgtgtttttatctccgacatataaatgaaaacacgcgtagtttactactggtttcgttttcaatggtggtgaaagagacatcacgctgaattggcccttaggacactcccccgcccccaaaccaagcccagggaagaagaccgaccgaaagtaagaggtcagcctccaaggcggtggcggggcggggggcgttctcgaagcgtgggatgggggagcgtcctggagttagcaaaagtaggggactgactttctagccccacctcaacccccgctcacagctaggaagccgcagccttcgggtcgccagttccctctccttagcaagtcttgtgtgctcccatcacaccctgtaatggctccttgcatagcgtgtgtcacctttctggtgtctgtcggtaccacccacagatttttaaatttgtgaacagcagagaccatgtgttatccttgcactttagcagaacacctgaaacctgttaagtattccgtaactgttccctttgatatttaaagggcatctattagacccatattaagtattttctcaatgctcctagccagttttattccattgcagtcccaagcgatccccttccttacacaagccagacaaccacgccccttgtctttttcacgagttaataagcaatattcaactctctcagcgctactctcctgttagggacgccaggaaacttccagctccgcttttgctacgttctcccactggattcgacaagattactgtgaaacagtctctacaaggcaagttaagtttgcccgataaagttcagagaatgatccagaaagcctcatgggtgagggtggtcagtaccctaaccacgcccacccctctctcctctctactgagaggcgactccaaattcgcaaccactttgttttacgagcgcctcccacctccgcgcatgcgccttacgccttccacaatatcacaccattgcccgttcgcacctcgtacgcatgcgccaattctatcgcctcagttcctgttactaattccttgtgccctcagcggccaaagctcacgaccctcgctattgctcccgcgccagcactaaccgatactcaaactcctcgtcgtcgtatttgtccgaatagtaaatttgtttgtgcgacatgatcgctcggtttgctagccttcagccccgcgccgccaacctccaagcaactcccaacagcacgcgctcccacccactttggcctcgctttcaaacacgccgcccgcacttcctattggtccgtttggctcgaggcgggacacctctactttcaagcctccgattggcttagatttacttctcttcggatccttattggagggcagttctcacgcttctcaagaacgagcgtgggtcaaaagtaggcgtcttattggccaccactgcctttgtgcgcgatctcgcgctgccattggctaactcgggaaagtgggaagcgtgaaggagggaccctgaggtagagggtcaggggttagtgaggccggaagtgagtgtaataaagtttctccagggaggcagggcccggggagaaagttggagcggtaacctaagctggcagtggcgtgatccggcaccaaatcggcccgcggtgcggtgcggagactccatgaggccctggtgagtcttgacttttttctccttaggtgactcactctttcaccccggaacccctctcccgggaccccacttccggtcttcatttataagtcccgcccctgagacccctctccccggaagtcccacctcccaacttcagggggctcccccgaaccccgacttgatttttattttttgtctccgaccccaccctgtcgcccagtttttctggaagtccccaccccccgacacgttccaagccctactacgagaaacccttcgttactccttccattctccgaaactccgcctcctagcaacgatcctcggctaactcctgtcaaaaggcctatctcccaaaagggcaaaaccctgctcttcaaagaacgattcgaatttgttgaagctccgcccctccgaagccacgccccctccgtaatccacgtctgactgtccagaaagcctccccgcccagaagtctgaagttcgcgtccttaggggaccacgcccccttaggagctttatctttgtgggacctgggtcatcagctgaaaagccttgtcgtcaatccctgaa

SEQ ID NO: 1879706 - DNA, 4001 bp, Homo sapiens
tattaactgggctcccagccaagcaaataacctggcaggaaccagaaatctaacaatatcaactcttgttcctgaggcacttttcctttttcaaaacacattttacatcagttatttgatcctcagaataaacttgtgaaatactaccgtccccatttatagaagcaaaagatgaggcaaagagaaaagcagcctgcccaatgtcacacgagtctcccgggtcctgtttagggatctttccattgtacagcccttcctcactccccagagcagtgaggaagggtgtctggttcatttattcatgccaccaatgtcagatgtctttctgtgtctggccttatgttaggtgctggtgacacagtagtcaacaagacagacaaccatccttgccctcctggagtccccattctagtggagtgacaatccacttgttgacaactgaatgagggtgagtagtgcaaggaaagtaagatgatgggggacaaacagatcggatggtcaggaaacacctctctggggagatgacccagaggacaagaagcagcagccctggaaagaggacttcaggcagacaaagagcaaataaacatccctgaagcaggcaagagcctgacatgttcaaggacagccagtgaacaaagcagagaagagcccaaggtcactcccaagagatggacagaggccaggctctgtagccacgatgggagttgagagctcattccaagaacaaggtgaagccactgaaggattttaagcaggagtgagatgtgatctgacttatgcattttaaaagagatatttcagctgttgtgttgagaatgagaatgggtcacaagggattggagtgggtggggagggcagacgggagaacgagaaggtcatggccatggtgccaaggagaagtggaggcctggatgttgcaggcctgggactagggagggagggctggctgatgcactgaacatgggaatgcgggacaggcaggactggaacagcagccaaggtggggtggagactgggctcacctgttaggaagtcccggacctgctggattaggagccgtgtgcgtctgacatcttcctccatctgggagcggctggcgctcacctgggtctccaagcgctgggcactggattgaatctgtgaggcagattcctcggctgccctaatctgttgacatacactctaggtcagaaggggtaaggccccaagggaacctctcagcagccccacgattctgcggatcatcctctatgccaagacctacctaggaagcatttgtaaccaacccagcttacatgtggatgttcagtaaaagagaaaaaaaactatcttgcacttgctgtggcaccttaagcaggtcacctaaaatctctggactttagtgtaaaatgggaactctgacttgcccgggggatctatcctgtctgcctcctcctacctgtgcccaccccgcctcggctgcacttaccatctgcctggtccgctggagctgggcattgaagccccgcagctgctcagccacctgccccgccatcaagaaggccccaccggccctgggaaggacacccctgcagcgggagccacaggctgtgccattgtcttggggacatagctcaccagggcatgatattggggtgcaagccatctgcctggagttgccacagagctgtggacagatggcggtgttaaagaggctacccaaagcccctcaataaccaatcccaccccacacctgggaaaccaacagccagacatctccatgacaaccaagcaccagaaacagccagacatctccatgagagctaaggaccagaaactggtttccttggcaaccactgagctcacagtgagcagtacaagggtcgggatggctgggggagtggggttctcacaggggcagatctgccctaataggaagcaggtggcagcagttggtgtgtgacaagctggggtgtgggctccaggaagtgggactccatgccccaagtcaccttgttgaaggtgggtgtcaggtcaggcaacgaagacatctccagcctcagggccacaagcttggggctgccggtgcctcctcctcctcccgcctgccgcaccagcctctctgcctctctccggctgtccctgagctggtccaaaaggcgcgagctgtcggagacctgctgagcagcctgggctgactgctcgtaggctgtgctcagcatccggaaggctcctgtggcgagaagcatgaggaatggagatggaggaggagcaggagggagagggggtggcatgcccaccacggcagtgcccatgcccggggttatccgggtgcccctctcctcacctgaaggatcagcactgcttattttttcaaactgctccctcttcctctgatacatagtaaggagaccattgaagcttctgtcaagactctccaggtctctcggaagggacaacgtctcctcctccaggggcagatccagctgcaggccctggagagttcgcctgagaagggagaggagcttacactaaaatataggagggagttttgcctccccaaagcagctatcccctcagagcaactgctactgagtcagaacaaacagagaccttgggcaaaggcaacagaacagagaatccacaggctaagggggttccgctggacagaggcttggcgaccagcacaatctttctctgtccaggtgcagatggagccacaaaactctcctcccttgacttctatgacccaacattcccaattctcctccccctcttccagatcctggcttccatgaggagcaatgccctgatgccctcctccttcgctctctatgggctggcttcagctaccatctgtacagctgcagctccaaaatctcttccacagtccacacctcccactcagctccagatcccatcactgctgccagctggtcatccccccgaaggaggctcagagtctacctcccaggcccttggccactgagctcttggagagtcctctctccctgtgccctttgcagctccaccaacccaaccaccagctccctcctccaagcctcacattctccacctccaggctttgatcaggcacagaacgcccttccatggaatgcccctccatgcctgtgtttccaacctactgaatctggtggactgactgcccgaatctgagacttaggtcagaaggcacctctgtgaagcctgccatgacacattataacatgcgtcacattatagtttaccatttacacatcattctccccagtgcgagcttcttgagcgcaaagattatgtcatactaatttcaatatccccaatgcctgtacaatgcttgtttcatcatagatgctctaaaattatgtaaagagaaagaaagagagagaggaaggaaggaaggaaggaaggaaggaaggaaggaaggaaggaaggaaggaaggaaaaaaagggaaggaaggaaggaaggaaaaaagaaggaaaagaaggaaggaaggaaggtaggttggttttcaatattcgcttgagttcctctcccggagcccccagccagaagctctagcacatcgtgagtcacggagcctccattttcattcttctcaggctgccttttccttccccaccactcacacacctggatggctctgtgcacagtcagaaagccagtgctcagggaatgcaaactaattatagaagcttccagaactgaacctcactaagaaggcacctctgctggtgggatgggggtgtgggcgggaccaacttccattccaaagccacacgtgagttatttttagagcccctgcctctcggatgccctccgccagggtgactaatccagagctgactctctcccacaggcagcactgggcacttaaaagaacgctgggcttgggctcctggactgtgttctgaggcccagctctgcccttcggtggtcatgtggctctgtcacatcacctgtctgtgcctgttttctcatctgcaaaaccacaccagcctcacaggactgttgtaat

SEQ ID NO: 1879707 - DNA, 4001 bp, Homo sapiens
ttgggccgtgggtgtgcccggcccgcgtgtccaggtgggtgcagcccccagggccaggcagaatgggggaggcctggcacctctcgggcagtgggtggggtctccaggcaggccaggccctgccactggaagggaggtggcccctttgccaccaacctgtggctgtcaccggggcaggtgtggctggaccaggaagccctcctggctggcgcctggctgcctccatcctgtccgcagccctcgctcctgctggccggcaccatacgctcttggtcacctgctcagagaggccccccagggccaccggctgccccctcggtagctcccttcagcacaggctgaggtgtctccactcagggactcccccttcccccagaaccttgacctgagctgaccacaggagagtcagggaagattcctgagcaaaagaaggagggagggagggacggagagaggaggaggagggaggagggggaaggagggatggaggagaggaaggaggagggggagggaaagaggagggaagggagggagggagcctctcccaggaaccttgggggcctccggggccggatgcagtgtctggggttctgtcctcagctgggccctttgcacggcgggggtctgtgcacgtgtggttaaaataaggagctggtccaagcatgggtgcgtgaactgcagactttattactatacaaagacttttttctgttttgttcccggtgcttatggagaggaggaggaggaggagaaaccgcacagggaggctctgggtacggccccgccagccccagcagggtccttcctgtcacaccccgtgcaacgcagcaggcgctgtggagagtgagccccactgcagtgtggggcgcaacttcatccgaggggtgcttggagggactggccagacgggcacagcggtgaggaggtgctgggatggggaaggtccccgagctccgggcggtgttggatgagctcaggctcacaggtgtggccctgcctggcccgagctctccaggtgtgtccaaaccttgtgttatatgcaccttgcagtccagggctcacccgtgcggtctggtgaggtggacgccacattctgggggtggcactccaagttcttccccacacacgtcgctcaggcggcagcagcatgggggtggtttcagctggccctgcgggggactgccccatctccccagggaggaaagagggtctggagatagccccgggtgggggaggtcaacctgcagatcccggcttggggacagctccagatgacacctcgtgagccgcctggggtggaggggcccccagtgcagggctgcgtggccccaagcacctgccttccctatcccatggtcttgcagctgggcaccggccccgcccgcctcagccccagagatgggccctggagggagagtgtggtctgcatcccacggctggcccctggaggaggagggccagggctggccccgggaacctcccagaggtctctgcgtcctgctgcctggccgctgagacgctgtgacattgtccctgctgggcatttgtgctcctccgtgccctgggctcaggcactttggggggcccagctgcttctgtctcagcctccccaggtggcgagggggctggggctgtggggtggggctccgggtatctgtgactgtgaccccaggggccaggctgatagcacggggtccacagcatctgcccggggactacagctcgagggccccaggaggccgggtgggcacaggccatggcgagggtggggcacaagagccccagaccccggcggctttgcactgatgggctgcggatgggcacaggccatagtgaggggggcatgagagccccagaccgggcggctttgcactgatgagctgcagggcaggcagctctctcctctaacggtgatcaggcagcggatggacggttttaccagacagtattagacagagggccaggtctaaccatgtctggtaagacgcccatcggccggcggtggtgtgggtggcctccgggtcctgggctggtgtctgcggggcctgtgaagggaaggccccgggggcggctcctgccacctcctgcagctgccctgatccctcctgggtctgcagaacgagcccccgaggcacttccctgacagcccccatcccagcacctggtcccagcccagcctggctgtgtgggggtacccgggagccacctggtcacccaggccctgctcttggcaaaggttccctgcagcccctcgctggcttcctgaagctcggtcgggttaatgagtaacagtgaagggcagcctctccccggtggctgccccctccccaggctggggccttgtgtgggggtgcggtcccaggcgccctggttgcagatggaaaagatgaaacaatgggtcatcctggcctggtgggttttggacaaagttcctgttcttgttgactgggggaaggaatgagaccccttgtccctcagagggcaagcgcagagcgtccccgctcccctgcatggtggggctcgggaatctgaacccaccttgtccttcctgcgcccccagcagaccctccacggagcccggaccacgtgagagaggccactgttgctcttccctctccagccctggcatcccagccctatggcctttcctggagccaggtcaccctaaaacccagcctgggaggttgggtgggggaggcacagcggctccgggagggggagcaggatgccctccaggccacctgtggaggcaccaaggggtcctcaaggtgtcagacccagcctgggcgtgagtgaccccgggggcacccccggcagaggccggcccctcccctgggggctggacttcggagctgacacaggccctctgccgcccgctcagccctccgccctcacccgtctgctggccccgctcggccctccgccctcacccgtctgctggccccgctcggccctccgccctcacccgtctgctggccccgctcggccctccgccccagcccatccctggagtaggagctccggatgtgcctcggtggtgtccccggcgagcggcgggtcacctttgaacatcgttaccagacagtgttagagtcaagctgggaaatccagcactgtccggtaagatgctcacaggggcccgggagggacgtggggtcccgccaggcaggcaggggctgctgtggaagcccagggaagaaccggagcggtgagcagccaggggtggtgccgggaccggacagggctggcggagaggggcttgggggccctgagactgcacacaggcccaccctccctgcttcctccagggcaaggggaccctggggctgctgacccgggaccaaggcgggggcactggtctgctcggtggccggcccaccctgtccggcaggagggaagatggctgtggccaagctgggtggggcggcttcctctgggttccacgtggctcccggttgggccttgccctcctgagccctctgttgggtcctgctcggcccgcacctgctgggtgtgacagcagctcccgcccaggcgctgtgggcagggcccggacacctgagcgtcctaatccccagatcactgtggggcgccctgggtgcagctgcaggaggccttgcattccggggtctctgagatgctggtggggggcgccccagcccccttccgaaggtcacgtccccccgtcactctccccagagccatctggcccggacggggtggggtccggtgagcgggctgtgtgggaggggagtgtggggctcggcgggaggccctgggggccgggacggggtcggccggtcgctgcgtgcagggctccgccgtcatcattaccaggcagtattagagacctgactccatccaatgctgcccagtaagatggccacggctgcccgagctgggtccgggggccgcccggctgagggttgcatgggactcgctgggaagctcagtagctggggggcctcgtcctcctggggcactgaggacagcatcgccgg

SEQ ID NO: 1879708 - DNA, 4001 bp, Homo sapiens
ctacccctctcgagcctcagtttacccaggtgtaaacgagggacactcctaatgcctcatctggagcctcctgtaagaacaaattgaggtgccgcatgcagaagcttgaactcagcatctgtgtggatttaagtagcaacagctactgccattggtgcccggatgttgctccctgatctggcatgcgtggttaggagatgcagggagacgacagagctgggagacaatggaaacgcccccctgtccctcttagttttttagtcccttagtccctttcagagacgacccagaggcaggaagcaggcaaggctcagctggtgaagttgggaaaacggagaagctcctatgtctcgttgttgattgaatctcacaccgttacatcttgctcacagatgtcaggactaaatgagggaagcgtggtgccttcctgacgcatctgggcaattaaatagcaatcagcaagtgtagttaaccagggcagcgctctcctcaatggccctgagtgtgtccgtgcatcatctgccgtcggtgctcattcactgagtctccctgtctaatttggggcaaaaagttaattggaacttgatggtggctggatggtgacctgagacagacaggccaggtagaaatgttaaaagggaaatccatgcaggctccttcctggctccccagagcagggtgagtgtcaccagtaaagaggggggatgaccatgaggggaacccagagctgggggcagtggaagctatgttcttgctgtctcctcttgttatggagtcatggaaacgattcagatcgaatgtgccttaggtggttatgtttcggtcatggttttagggggttgttgccagtaatttcattaacgcttttgatggtcaccagaggtccccagaaaactgactttctctctttggtagtgaggaaccccacatgcagcttctggtgcagcccagagtcaccctgtcattctcccaggtggccttgcattgggggcatgcatggggtatggggggtgtggactggggatgtcccagctgtgggcctcagtctcaccgggagaactcagctggcttgtggttattgcaatatcatcacaaacagcatgggctttgtagggaggctctgctcagcagttgcttgctttgtgacgttggtccagtctcctaacctctctgagcccagtgttctctgaatagtgattgcaatgctgtaggaaaagagagaaattggtaccaaccagtgtcttccatgctttgcctgcaaggacggctcctcatgacacgggttaggggacacaggcctgagcttcctctgacctcctgacttaagcagcccaagcacagtggctggaaggaggccctggtgaaggacagcggctgaggggtggagaacaagagcaggaggtggagaccagctctagcggcacctccttcccgggagttccctccctgtctcctcctccgtcattccctccagttttcctaaagctccccaggccccccacacttgcctacacattcggattccatcagggatccctgaagtaaagggggaaggtacctggccccagagggagcaccagtgtctgatgggcacaagaaatgatggccccacgcgtaactgagtaacctggaaaggggatctcgacagacaaggaggcactgagagggacagacaggaggagcgcaatgggaaaaacttgaaggaggacggccccgttctcttggggatcttaaagccatgtgtaaccatctgggtctgattcatgatagagatggttcagccttcatctaaaaatcatgataagggtattatggtaagaaaatactgggactccagcaaggaaagagtgtggtgtctggtaatgcctggtccagcgtggtggtcacaggcgttgcccctgcctcctgcgtgaatggaaggaaggtcacaaacgtggtaggtgagccctggatgctggggctgggtgttccgccctccgggaagcccacctggttgttttcctgtgaacaggaggtgtttgctctgccaaaccttggtgtttgtggatgatcctacccccaccccatcccactaagaagcctgagagggtctccagcatctgaccccgactgaagggccacacctgggtcccaaagcccaagagacccacccctcaacctggggctggagccacatatcccaggcatcctgattccacttggaatcccttctggggaagaacgaggcattgtgaacatttttcctaggagagactgagatgaatgttggggaaatgggaactggaagaacagatctgtatttttcttgaaaggatctttctgctaagaaacccagtgaaaaggggaccagtgtcttcaccagcaatgagtgggcacctgtgttccccagaataggaagtgatgagagcagtggctcaaactatcaggcagtggcagcctagaccggtaacccctgctgctggtgcagtgggccgctggatgcagaaggggcctaggaactgggcaaactgagttgttttttaaaaatcatctttattaagaattcatttatatgcaagaaaatgcactaaatttaagtgtatagtttgacgaagtttttaaaataaatgtatatattatgtaactaccacaattaagtttagaacatttccatcatccccccaaaattctattatgcctttctttctttctttctttctttctttttttttttgaggtggagtctcactctgtcgcccaggctggagtgcagtggcgtgatctcggctcacagcaacctctgcgtcccgggttcaagaaatgaccagaacctgaaatttatatttaaaggggaagcagagtgtaaaagtttgaaaaatttgcagcccacccatgtggtggaaaagaaaaccccatttccaaggtaagaatcgaagcaggctgcagaaatttgcataagtaaaatggagccaagtgctaatagccaagacagtggggaaaaggtctcaaaggcatttcagaaacctttgcagcagccaccgccaccgccatcacagtcctggaggtgtgggagggcagattggtttcgtgggtcaggcctagggccctgccatcctgtgcagcctcaggactctgctccctgtgtcccagccactacagcaccagccatggctcagaggcccaggtacagcttgggtcactgcttcagagggagcaagccataagccttggtggcttccatggggtgttaagcctacaggcatgcacaatgcaagacatgaggcttgggagcctctgcctagatttcagaggatgtatggaaaacctggatgtccaggcagaagcctgctgcaggggcagagccttcacagagaatttctactagggcagtgcagagggggaagtgtggggttggagcccccacacggagtccccactgggcactgcctagtggaactgggagaagagggccaccatccttcagaccccagaatggtagagccaccaacagcttgcaccacgcacctggaaaagctgtaggcactcaatgctagcccttgagggcagctgcaggggctaaatcctgcaaagccacagaggtggaggtgcccaaggccttgggagcttaccctttgcatcaatgtggcctggatatgagacatggggtcaaacgagattagagctttaaggtttaattactgccctgctgggtttcagaattgattggggcctgtagctcctttctggctgatatctttcttttggcacaggagtatttacccaatgcctatactttcattgtatcttggaagaaacaaacttgtttttgattttacaggctcataggtgaagagacttttgccttgtctgagatgagactttggactttggacttttgagttaatgctgtaatgagttaagactgtgaattattgggaagtcatgattgtacttttgcaatgtgaggaggacacgagatttggagggatcaggggtgaaataatttggtttagatctgtgtc

SEQ ID NO: 1879709 - DNA, 4001 bp, Homo sapiens
caggaatgtcaggcagggaggcaggaagaataaaccccgtgggtctaggcagaagacaaggccagtgaaacagtcgcattgtccctggaagaatggaagcagagccaggtgtggggaggcaggcccagccccgagcgccaggggtgtgctctggaccccgccccgctggacaggagctgggttgctcagtgatatgcacaagcagccaggtaccagcaaggccatgccagagagaaggaagcttcctgtatcccagggacaccagaccctgctgccctgggccagctgagaaccccctgcgccccccctcccctgcagcccccaggtgcggaggagggatctctccaagggagcgagacgatcaaaaggaggtgcctgtaaatcaccacggagcctccctctctgctttccatgcaccggggagccttcccagagctcagatgtggttcaaggacccctcggagatcccagcctgacgtggctccctccagccacggttcagccccctcggccagggaggagggtgggtaggggcaggggaggccttccactagactcaggtttttgccacacaggtctgacttcccactcccaccccaacaacgcacacacacacacacgcatgcacacacacgcatgcacacacacacatgcacacacacacgcacacactcaggcccagcgatgcacacgccacacagctgggggccagccacccaacaccttccattgggcgggaggtccagctttgaccacctgcagcatccctgcccaaactaaggccatctcaaagggtcagtatgcctagggccatgtgctcctggaaattgtccggccacaccttctccccagaagccaacatttgctttagaaaaattggactgatgcttgaaccgggaggcggagcttgccatgagccaagatggcgccactgcactccagcctgggtgacagagcaagactccatctcaaaaaaaaaaaaaaaaagaaaagaaaaatcggattgaaatgaacacccagggccctgttgcagggggaatgggggatgccatgaggctgcaccacggcagtccttacacccctgggcagaggttcctggacaggtgagtcagtcttcagaccccaactccttccgcctacctggagcttcctgtgcagcggcagcttgaagctgtggggagcatggttagaagtcagttccaatgacagcttcaccctttccttgtggccttgggcaagtcacttggcctctttgatgagctccaggttccccgtttatcaagtttatcaaccgtagagggaccaggcacatagtaaatacccctctcctaagccctgccaggggccaccatagctcatggtcaatatgaataataagggggctgtgtgtcatctcagtcccacacaggcaccatctcattcaaccctcacaagcagcccgcctgggagatactcctattatctccactttacagatgagacgatggggctcagggtggttaagaacttgtccaaggtcacaggaagatgcaagccaaggtctgtctgatgccaacacccaggtgccctgaatcaactgctggcactgccccttagttcggctcggccccacctcagctgacccctggggcctctcctaaggctctagaggggaggggcgttgaagctttgcacacacaagaagccacacagccaagcaaatgagcgatgtggctcccaggggaactgggctcatgcccctggactgctaatggcccccaggtttacatcttccactccaggcttgggtcatcaaatccctgacgtcccactcaacttatctgagatggggcctcccccgcctcccctgctctgccctctgttcccaagccaccaccacgtctcagtgggttctggcgacagcctcctcactggtcccccacctcccacttactatccagaattcctgctgagtcctgcagtgactcccacaaccaccacggtcactcagagcaaaaaccaaagcccccaggaggccccccaggcccctgggtgacacagaggctctgctgactcctctcctcccaccctccccctcacctgtccactccagccacactggcccctttgccgtccctagaaccccccaagcatgctcccacctagggacctttgactagctgcgtcctcagcctgggcaccctgcctccagagaatgacatctccagcctctcatccttcaggtctctgctcaggtatcttctcagtggccctccctgagaggccatgtaacacagccctccttttcccctcacgctgctgaatttcgttccctagcatgcgtcactatgtgccatattactaatggcttgtctgtttaatgtctacctcatcacagaggacacacgcttctatgaaagtagaagcctctcccgccttcttatctcccgttcatgcttggagcctagaacagtgcctggcacaaagcagaccctcgagaaacattttttgaaggaatgaatgaaggaatgttggcatagtggtggggctgaggattgggaaggaagggtggagagaagcaggaaagggaaatgtatggaagcagacatgaaaaagctgcgcagaagtgtgcatgtgtgtgcaggggtggacacgacacacacacgcacacacacacaggtgtcagtacggtaaccatggatgaatcgcgaggccaacaggcagagacacaaatgcactatctactaacaaacacagacgcacaccacacagatacgctcacacacaaatacacacacacatgcacatccccagatatacacatacgtcctcatacatgcatccccaaatatacacatacatgcacatacaccctggcgcgcacacacacacacacacacacacacacacacacacacacacacagagctccttaccagaactctgctctggccccacatccccctcaccccaactctacacccggctcccaggcagggaaggagcttttccaggtgacctcactgagcgggagttaaactccaccagctctttttcaaagcggatttggctccagtctcccttgtaatctgctcctggatcagtgctcacaggggcgctggccctggcctaaggtcaggacctctcaccttctcccaggaagtcccactgagtcctcccccacccccagacccccaatcagctgcttcccctgaccagtataacctgctgagctgaattcttgctgggtattttcaaacaattccagttatttggggggaggggtggtactgtgatccccaggaggggtttggtatgggggtgggggctagggagcagaggggatgcccgtcagggtgggacagcctctaagttgcctgtgctgcaacagcgacctggccccaccccactctctttttcagcctcttccagcccgactccagcctctgtttcccgaaaacatgccacctttcaaacctccaggcctttccacttgcagggccgtctgcgcttacttccccagtgagtaaactcctccacatccttcaaagcctcagtccgatgtccttgccacttctaggctggggctgccaccgccctctgcccgtcctggtctctgtgttatcctggcctggctgagtgtctccctcctgtctagatggaggtctctgagagcaggaggcacagtgatgccgccaatacctagtgcagatgccagtgcagggcctgaccccgagcacaggcccaggaaatgcttatagaatgtgaaaaaggggttgggggagggtaatgcagaggtctggacgaggcacctggatccgtctctcccttgcttctgccttgagccagacatgtaccctctctggcctgctgttcctaggagcctgggctcactgaggcctcagaagggctgaccccagaaggaagaggtggggcctagaaggagctgccatggccaggtgggggctggttgtggccctcagggtcgagagagggagggctgctgctgtctcacacgtctt

SEQ ID NO: 1879710 - DNA, 4001 bp, Homo sapiens
aaaagacaggaaaggtaattattataggctctggggtctcaggcttggcagcagctcgacagttacaaagttttggaatggatgtcacacttttggaagccagggtaagaatttcattttgagtttagaggcttgacctattggaaatatggtaagcaaattatctgttgcaaattaaagaattatacaacttgaactaagctaaattgatttgtataatactcagagtattttggatagtgttatttatatttttaaaaagcttttttttttaatgaatgctttgaaaagtactctgtgaagagggttttagagtatttcttttcctgactgatattttcagatcattatttcttgtagttagctctcaaatttggggccttcatggacatatcctttgttaggaggcagttatttttgatggtggaacagagtgaattccctgtttttgataaagaaaaaaagctgcttctcaggcaggaaccatcttttagaagccaagatactggtttttttcctgttagtcctagagagagaaatggaaacaggaggagcaataagggataatggcacacagtaggaaaaagagcatcatattaggatgctactattcaagctattttcatgaataatttttgaaatctaatgatcttctaatggctttgaactgctaattttttaaaagagtatggggaaattgaaattaaatattttcctgatatactattattaaaaattttatatatttagaaaacatctttgtgcactttgtacattttgtattaaaaaatacaataaggaataataggaccattttgattcctacccatgaggagtttgtaatctagtatgtaggtttttgttttgtttgcatttttgtttgtttgtttggagttccagagtactcttacattatttataatcattaaattatcgctacaactcagccatacttgaaaatccctcgtcagcagtgataaacctgggcctatttagggataaaaggtattgtgaacaggctatgttcagtatggactctctgcccctgggcatgggggtgcactggagaaccatttgtcagaaaaattatccatcagatttttccccgctaactttggggatcagggtgtaagagtcagattacagtggtagaaagttggtgtttaaatagtgttgggatttgtgaacaaatattttctatatgggtggccctgtacattaaaaggtattatagacaactggatagagtggtacctgtgactaaatttatcttccagctgtcaagactgttttatatcacatcatttaattctgtgtcgtttagttatatgacatttaattatatgtcatttgttgcctgcttctccttcaaatagtcttcaagttaaacttcatttgttctttgtgcccatagtactgttgattgcattccatgtaaactctacatctttatttttaaattatagaagacagagccgtggtatggtactatgccaggtttgtggttaaaacagaattgatgattttggctacttaatttctgaaacaggatcgtgtgggtggacgagttgccacatttcgcaaaggaaactatgtagctgatcttggagccatggtggtaacaggtcttggtaagtagctattggtttgtgctatatagtacatggtctaagactcataaaagaaatttaaagccagagatgctattttaaaatgtattggtttagaatagtcatcttccgtttagtgagaggtatagcagtatgtggaaaatgtaaattgtacatatcttttgacctagagtacctttttctagttctaggaaattatcatatgaagataagtagataatgttgtgtttgaagctttttttttttttttttttgtgagacagagtctcgctctgtcacccaggctggagtgcagtggcgtgacctccactcactgcagtctcctccctcagcctcccgagtagctaagactacaggcacacaccaccatacccagctaattttttgtattttagtagaggcgaggtttcactatgttggccaggatggtctcgatctcctgatctcatgattaacgtggcattgtttttgtttgtttcgagacatggtctcgctcttttgcccaggctggattgcagtggcatgatctcagctcactgcaacctttgccttccatgctcaaaggatcctctcacctcagcctccctaatagcttggagtacaggcatgggccaccatgcttggttaatttttaattctttgtagagatgaggtctcactatattgccaggctgatctgaattcctgggctcaagcagtgctcccaaagtgctggaattacagcactggtctcaaactcctgacctcaggtgatccacccacctcggcctcccaaagtgctaggattaccagcatgagccaccatgtatggcttaaactagcttttgaacaagcttataggacaagtacaaagaaccccactaatttatgcttgtaattacaaatacgtttcatggctttagaaatctaaagagataggttagtagctttatgagccacaacgcccggccttgtttgtttttaatagaaacagggtcttgctctgttgcccaggctgatgttgaactcctggcctcaagagattcttctgccttagccttccagaaggttgaggttgtgggcattagccagcttgcccatccctggtattgtttttcatagcagaacattagaaaccacagattagaatattatacgatgagaaatatacagccactaaaaatcatgtagctccgtattagcgtaaaacgatgtccacaatatattgctaagttgaaaagatattataaaacaatacgtattatgatacttttttgtgtgggtctgtaattttatacacttaaaatctagaagaatctgtaatgttaattagtgggattataggtaatttttttgccttcatgtttgtcttacatatttttacttagagtgcttttttttttgagaaataattacatactgtaagcttttgagctttttatattttgagtaaaaatattttttactttaaggtttttgttctctcttcataggtctattgaatttaattgcttgagtttttttctaggagggaatcctatggctgtggtcagcaaacaagtaaatatggaactggccaagatcaagcaaaaatgcccactttatgaagccaacggacaagctgtaagtcgaggacaaacagaactttcaacatttctttggttcacttgaaaacaattttaggagaatggtatggatgagcatatacatatatacacatatagaggtgtatatatatataaactgagggtagagatgatgtgatgttattctggttgtttcttaactcttgagctatgtaggaaaggattattgtatatatacacatttacctgtctgtttaacatttatctttagatatttaatgaaggctagctagacagttaatctttttatttggctgtggccacttactccaagggacttatggaattgaaacctgattcttcggttttttttgtattgtgccttccatcacgtgctttagctccatgtgttctttatgacttcagttctgtgttcataggctaacatttttgatgggctaatagccaaatggtggtacttactcacatgcttagataggctaaagtatttattgaccagaggcataggagcttcctatacttagtatgacaatagcatgaaagtgatgaatggtatggggaattgcacagtttaatgactgtaagataagcttagattacataagtcagtcctaattttttacaagtgagtgaaattcaaaagtttgtatttagcaaaattttactgactgcctttatcaaaatgagagcccacacttctcaggatataagtacatattgtctttatatttgggggaaatggtgatttcctatgtatacggtgggtttagctattcttactaaa

SEQ ID NO: 1879711 - DNA, 4001 bp, Homo sapiens
acacaggcaaaacaagactcctgcccctgaggcccagagagaagtgacttgctgaagaccaaccacgcagctagtgacagtggggcttggattcaaacgcaggccagtccaaatctaattccagacagctggaattagacatctgaacgcaggtggcctttacggattcacatgccctaaatgggctgtctcggaggatcccaagtaaagtcagaggagctggcatgggaaagcaagagaaaggagctaaaagcaggagaggaggcatggaggacacatgtccctgccttctaacagcttggcatgggcaggcctgggcccagcacagcctcaccacccctcccagagccgcagggcagggatccactcaccttgaagataaggacagtgatgaaggcgatggaaaagatgatcatcatcttgatgaactggttatgaggcatatcctcctggctggggaggtaattctgcaacagatttgggggccacatcaatgtctctggacataaggaattccaacagcacccacacatccgggaataatgatcccaccctccacacacacacgagcacagcgtggcacagccgtcaccttggtcgaccgccacagcagccttaggaagcaggtgctaccttcagccccatcccactgacgggcaaaccaagaaaagccaagtggctactatctccagatctgcttcccaggctggcgcaccggcccatccccagctggcaggtgtcagctgcccatgggccacacctatgctcttctctacaagatcattttggctgacagggaccacctaatccactaatacctgggaggttacattccctcccctaggggcagcttgaaaccaatgactgatgcaggggaactcgccctaggtgagactgcctctgtggtcatttgcaaatattaccacacattctttgagacgcctcccttctaaaggtggtgtttatttcctctccccttgagtgtgggctggacttagcaacgcacttctaactaacagaatgtggcagaagtgatagaagtcttaaaagacactgcctttcctccttgcttatctcttacatcactcccgcaggggaagccagcagccatgtcaggagagcactcaagcagcactactacaagtccacaggatgaggaattaggcaaagagcccacgccctgtgagtgagccaccaggagttcatccttcagatctaatcaagccctcagttgtccacagccccaggtaccatctctggtgcagccccaccagagtccctgagtcagaagaacccagctaagccactcccaagctcctgatcctcagaagctgtgtgaaataataaatgtttattgctttaagccatgatgcttagagataattcattagacaacaataaaaactgatattatgtctgtgttgcaattcacatgccaaagccctctctgggatcatgcagggctgctcctacagccacatctttgcttctttgcttggcttcctccttttctcgaacctgccttcctcactcctgacaagtttcttcctgagagggctccctcaataaatcaccagcacaagaatcttcctcccaagctccaactccagggaacctggcctaaaccacagacacacagagacgtgaagtaacctgttcaaggccacacagccagcaaatgggcatggttccctgccccagactcaccatgtggttcatggacttgaagttgagataggtgggcacttccatgtaggagctgcagagggtcaggatgctcaggcagaagtccagcagctgcagcgtcatcagggggaacttggaggagctctggggaggacaaatacaaggaggaggaatgaggagcagcaattaaagtcccagttactgagcggcacatagtaggccctcacttgagagaccgtctcagctacagacatcagtgactctcgtcccctgtgcacagagagacatgaacacacagatgttcataccaagagctggtggcagacccaagactagaaccaaggtctccagactcccgggccagggcccttccatgatgtagccccccggtctcttcaaggacaacagttggggagagtgagaaaagcaggtttgggagactgtgtccttgactggcagcagccctcaagccaccccacagtgggcgctcactggcatgaatcatccttctcttcctttcttcaacttggttccaaagaagaaataatactgggggctgggggctaaaaagcgcacatgtcctttcctcaggtgtcaattcactcccagcagcactgactgagtgctgaccatgggctgcacccccaatgtgtgtgttcctcatgtaaccctcataaggcaggctgatgagatgtgattgcaggtacattccacagaggaagaaacttggggcaatgtggagggactcagagactgggtcaagacaccagccaggaagagggctcctaccctccccagcctgagcacagggcccgtgtctggtcccctcccatctcccatgccagacctgggctctgctgtccggtgagaggtgggggctgggtactcacagcacggctccgggaggccaacttgaggtaggcgggcagctcaatgtaggagcccagcagggtgagcaggcacaggagatagtccatgatttgcagggacaggaagggcagcaggtacttctcccggttctgaaaggtaggcccagcaccgtcaagtgtcccctgcatgcagccaacactccgccacccagcctgatatcctcatgcatccccttcccaccctctcccaaaccttccctgccctcctcagttgaggtcacctccctctgagtgacactctggggacagggagtggataagacccaggccctgaatgagaggagtcttggtgtcccaggagacgtaagggaaccatccccatctatcagggctcaaagagcaggatttgactcaatttgctcacaagaacccagcaaggaagggctttgtgcactttttacagaggagaggggaccagagaggacttgctggaggtggggacaccagggctagatcggggaaggagactaggagtgaacaggagggaggggcggggcactggaggcagaaagaccaacatgagtgaaggcccggaggcagcagagagcccctcccccccaccccccactccccaccacgccccgcatacaattggaccttcctccaccagccactcccaggggtccaaagtcacagtaagaggccctgccaggaagaggctgaagtccctcttcttcaattgaaagcaagtgaccaccatgaccagtattcattcatatgctctcacagctggggacaaaatcactgcaacagtggtttcctggtgtctcatgtggtcgtctaaaatcactcaggaggcaaccagaacaatcttgactgatctcagagtcttcagggaccacctgctccatttctccatttctctagctgaaccctttgagtttctgcacaagcacccacagccaccctgcacaaggcaaacggcctccccaggcagcatgggttccaagacagagtgagtgttagcaaggggagtgggtgctggcatttgaggcagggtggacgcattccaaaccagcaccaaatcatcgccccactcctccggccctgcaagggccaggcccctgtctgcacaggaaggaccctctttctggatcctactcccatggctatgtggtgaggccctggcttcctgcctttctggggacccagggaccgcgggttcctcttctgcaggggattgagctacagcccatctcaactctcccaccagatttgcctcgggcccaggagcccctcgttgtcacactagactgtccctgtctctctgaaggcccatcttccccaatcagatcatgagctctctgggggccttccagggcgtaggtccccctcagggtgctggctcctgtcactgcatggatagagctgcatgcatcctacttt

SEQ ID NO: 1879712 - DNA, 4001 bp, Homo sapiens
tcagaatgattccagctccatataaaaatatttatggaccatgacaaagtggaatttattccatgaatacaggctcagcatacattatcatatatcatattaatagaataatggacaaaagccaaacagtcatgtcatagatatgaaaaagcacttgagaaaattcaacacactttaatgattaaaaaaacaaacaagaaacctggaatagaaggaaacttcctcagcctgataaagggcatctatgaaaacacactgctaatgtcactttgtggtgaaaggcttgaaaaaattatcccatcttagtctgtgttactattaatataaaggcatacctgaggctgggtaattcatgaagaaaagaggttcatttgtctcacggttctgcaggctgcacaagaatcatggcattggcatctgcttctagtgaaggctccaggctgattccacttatggcagaaagtgaagaggagctggtatatgcatatcatatggtgagagaggaagcaagagagagactagaggaggtaccaggcttttttcaacaaccagttcttgtgggaactaaaagtaagaactcactctcgtgagaatggtacagagctattcatgaaggatccacccccacaacccaaacactcctaccaggccccatctttaacactggggatcagatttcaacatgagacttggcagggccaaacaaatcatattcaaaccatagtaccacctaagatcaggaataagacaaggacgttcactcttaccatttatattcagtgttgtaccaagggctgcatacccatcagtcagaatccttgtgtcatggcatcctccaggtgtcacttttccagttggaaacctctgtggccagtggtgcctttgccagagttttgctcaagcctgctgggcttgttccacccactcggcctggcaggctgcactcagctcatgctactggcctggctcccacaccttcaaagaatgatccaggcatggagaggagaggggtgcacaagtaagcaagcatggggtctggctgctgcacacagccaagcattggctgctgtggtggggtgggcagttccaggtgccaccacaggtgctggctctgttcaagcctgtggctggatcagatgcactataagtggcttctgctctgggcactcacatctggacaaggggaacatggtggcacttggaagctccaagacactagaaaccacagagccccaaagagggtgtcacagccctggctgggggagcctgtgcatctgagctccctgaagggctgcagctcttctctccttctcattgcctgcagtgtgacgagtggggtggaggcaggtgttttagctctgtttgtgttatagcactttcagtcccaccattcaacaggtcctgaatttttgtcctgtgtccaggaagaatgaggtatgcagaaaactggagggtgagcaaggcagaaaggaactttcttgagcaaaagagtgacagaacagctcttgggagacctggagttggtagctcctttccacaggcaggtcatcccaactagttcagccctcagtagagaggagccccagattgggtagctccatttcacaggcaggtcatcctgacaagtgtccagctctctggggagaggagacctggagtgggtagctcctttccataggcagttagtcctgacgagtgcatccctcagcagagaggagaccagagtgggcagctcctacctgcaggcaggtcatcccaacaagtgtccagctctcagaagaaaggacacctggagtggatagctcctttctgcaggcaggtagtcctgacgagtgcagccctcagcagagaagagacccagagaaggtagctcctagctgcaggcaggttgtccagatgagtgtccagctctcaggggagaggaaacccagagtaggtagctcctttccacagacaggttgtcccaacaagtgttcaactctcagcagaaaggagacccagagtgagtagctcttttccacaggcaggtcatactgacaagtagaggagacctgaagtgggtagctccttcctgcagctggtagtcctgacatctgtatgagtctagctaggtaacatagtttttatgggctcagaaaggaagaagtgtgttctgattggcccatgggtggccatgggcgggcctggaaaaagcaccataagttctcactccaggccgcagactccacctggagctgacagcccagcccccaggcttcatgccatccatggcttgaaggttgcgtttcactgggaacctgcccctttctgcccaggagcctgtctgcctcctgtcaccatcaacatgttgtccatgccgcccaggctgttcatgctgaggtttgcctacaggcccacactgagccaccctgagcaaccccttggtctccctcttgtgctcttcagttcccaaagtctggatggcctgagacagcagggggctggcatgtcagcactgccctgagtgcttgggtacccagctgggtcacaacagtgcctgggctctgccacaactttgctctgccccagagtgggggccaggagcagggagaggccaggcagtgggagcaggcactttcaagcctacgggaacaaagggcttccggggcccctgagacctcagggatgcctgggtctgtggctacagctgagaagctgcagctgtgcctgggagcatgtggctcctgctccactgacttgttagggggtggggctcccacctgttcccggcacccgtgggctcagcagagtgtgcagccccagttgtgcttcccctgctgaagccggcatcttcacagtggctactccagacaggccactgctgccatcacttgcaccaacctgtaggtgacagtcttcctccatgaagccagttcatatgctctagaagttactcctccatgaaatatgcaaagaaacagcccaaggctacaagaaatacgcacacacgaaatcaaagaaacaggacaccaccaaaggaacacaataattttccaataaccaaccccaaagaaatggatatctataaattgccttccaaacaattagaaataattgtttttaaagaagttcagcatgcaataggagaacacagttggacaactcagtgaaaacagaaaaagagtctacggccataccacctcgaacatgtctgatttcatctgaaaacagagaaagaatacatgaacaatacaagaagttcaacaggaaggtagaacttataaaaaagaaccaggctgggagtggtggctcacacctgtaatcctagcactttgggaggccaaggtaggcggattgcctgagctcaggagtttgagaccagcctgggcaacacagtgaaaccccatatctactaaaatacaaaaaattagctgggcatggtggtgtgcacctgtaatcccagctactcaggagactgagacaggagaatcacttgaacctgggaggcagaggttgcagtgagctgaggtcatgccactgcactccagcctgggtgacagaatgagactccaactcaaaaaaagaaaaaaaaaaaaaaaagaaaaagaaagaaattctggaaccaaaaaacctaatgactgatattaaaaacacaatagagaacttcaaaaatagactttattgagcagaagaaagaatttgtgcccttgaagacaggttatttgaaattatccagtcagaggagaaaaaagaatgaaaaagagtgaagaaaatttataggacttatgggacaccatcaagcaaaccaatatgtgcataatgagagtactagaagaagaaaagcaagagaaagaggtaaaaagcttttttaaagaaataatgggttaggtgcagtggctcatgcctgtaatcccagcactttgggaggtcgaggcaggtggatcacctgaggtcaggagttaaagaccagcttggccaacatggtgaaaccttgtctctacttaaactacaaaaattagcca

SEQ ID NO: 1879713 - DNA, 4001 bp, Homo sapiens
ataaaaaaataataataaggaaaaaaagaacaaaagagacctctctcaacttgatacaggcatccatgaaaaacccacagctaacatcattctcaatggtgaaagaccgggtattttccccataagatcagtagcaagacatggatggctgctcttaccacctccattctacactctactggaggttctagtcagggcaattaggcaagaaaaataaataaaagacaaccagattggaaagatatattatcttatatatcattaatatacaagataacaacatgatcttgcgtattaaaaatcctaaggaattcacaaaaactattataaataataaacaaattcagcaaggttgcaggttacaaaatcaatacataaaattcaattgtatgtttatacacttgcaatgaacaattcaaaagtgaaattaagagaacaattccatttataatagcaccaaaaggtaaaatatttagaaacaaatgtcctgaagaaggacaagacttgaccgggtgtggtggctcatgcctgtaatcccagcactttgggaggccaaggagggtaaatcacttgaggtcaggagttcgagaccagcctgaccaacacggtgaaaccccgcctctactaaaaaaaaaaaaaaaaaatacaaacaccgggcacagtggctcacacctgtaatcctagtattttgggaggctgaggcgggcggatgacctgaagttgggagttcgagaccagcctgaacaatatggagaaaccccacctctactaaaaatacaaaattagccaggcgtggtggcaggcacctgtaatcccagctactcaggaggctaaagcaggagaatcacttgaaccctggaggcagaggtcacagtgagccaagatcacaccattgcactccagcctgggcaacaagagcaaaactccatctcaaaaaaaaaaaaagtcagatacttaatacttattactaagtattagagaagatgtgtagaaatcaaaaccctcatacacagctggtgggaatataaaattggaaaacaatttggcagttcctcaaaaaattaaatatagaattaacatttgacccgcaatccaagtcctaggtttatgtccaagagaaatgaaaacatatatctacacaaaaacttttacttaaatgtttatagcatcattcataatacccaaaagttggaaacaactcaaatgtccatcatgaatagataaacaaaatatccatataatggaatactattcagccataaaatggaatgatgtactaatgcatgctacaacatgaataaatcttgtaaaggtatgctaagtgaaagaagcagactcaaaagatcacataagattccatttatatgaattttctagagtaggcaaatctatagagaccaaaagtagattagtggttgcttatctctgggggcgttgggggaaacagggaaatgggagagtgatagctaaaggctacagagtttccttttaggtgatgaaaatgttctgaaattgccaacagtgatagttgcacatatctgtgaatgcattgaaaactagaatcgtacattttaaatgggtaaattgtatggtatgtaaattatacatctcaagaaagctgttaccaaaaaaagtcaatactcaattagagtattcaaggtatgaacattgatgacaattttctggttgccttttttttttttttttttttttttagaaaaaacaaacatatagtatataatggatatagatttgtatccatcaaaatccagtacattaaatatcattttactttgctttttctgaaactaattaaaactcacctgaaccttcatttgccaaaatatcgagacattgaattacagttttaattagggctcccccacttaccttccaggaggatttattcaggttgcagggctcctctgcaatcaagagcatcaagaagggcccactggtacatggtgggtacttcctgatgcttttgtctgcagaagaactggttaactggttaatactggttaacagtgaaaggacaacagtctaagcttgcataggctaaagtactttgaggaaaggtggttctggggctcctctgccctgccctgctagagactgagggattttctgagactagaagtcctgggacccaaccagtcacttctctttgagctctttctactcccctggccactgtgagccagcaatacagatcagcttgcttaagaccatccctcctactgagaacaactagaaaagctgggaagaatacaggaaataccagtttgaaggcactggaaagtttctaagaaaacgtgaactcaaaggaccaatcccaaagagaaaggaagtacagagaggtgaacccatcatttggtattgcttttcctttaatgtttttgctgattcctaatcagcaactgagaagcccaaaagctgaagagagcttacagggctgagatgacaagaattggagatcaggagccattaaagaggaggtactctggtaagcaccataggatttcatttgatatggtaatatgttacatagctggctgctagtgaaccaaaccttccaggatttatgcctatgggtggtcctcttcacattggtttcgggcttagccatataatttgttttcttttgtttgtgtcttgagagatgggggtctggctacattgcccaggctggagtgcagtattcacaggtgtgatcatagcacactccctcctcaatctcctggcctcaagcaaccctcctgtctcagcctcctgagtaggtgagagtacaggtgtacaccactgcatctggcttatgtgatttgtttttatcaatagtacattagtaaaggtgaaacaaacaaagattaaatatgaacttgctcactgggacttgtacttttggatttctccctgttagaatctagcctccatgcttaagtcaaggttatcccagtggagaaataggccatgtggagaggccctcggggatggaatattgtatagagatgccatgtgaaaacttactaaaatgccccagccaagtgcccagctgaatgcagctttacgaatgatcccagccaataccaaatgaagaactgttcagtcgacccagataattgccagaaatcactattgttttaagccacaaatattgaagtggtttgagatacagcaatgaacaactaaaccagttgggaaccctaaagaatcctacaagtaagatgggccaaaaatagactagccctcacaaagactgaggtccagaaacccacagaaaccctcctaatccctgattgaattaagttgctttttttttttttttttttgaggcggagtcttatgtgttgcccaagctggagtgcagtggcacgatgtcagctcactgcaacctctgcctcccagattccgagtagctgggaatacaggcgtgcgccaccacgcccggctgatttttgtattagagacagggtgttaccatatttgccaggctggtctcgaactcctgaccttgtgatccacccaccttggcctcccaaagtttgcttattttttattttttatggcagtaagtctttatttttcatacagggttccactgcaggtaaccatcagagaacaccttgctattttcaaatatacagactgaacaaaagcattttagcatgctgccttactgtacatagaaaactggtgaacatcttcagacactaagaccaggaaataaaatgggttaatgctatttgttgatacgtttatgaatcactcagcagtgttaatataagctatctttacctgaaaacagaattacaatcactcactctggcagcactgggcaattccaaaatgcaggtctagtgaaaggtaggtacaaccagcaagcaagcaaggatcagatgccatgtctgcttctgaagggagtgactgatttggaaccaggctctgcagattttaagaattgatgcagccatcttaacagcttaatattgagtttcccctac

SEQ ID NO: 1879714 - DNA, 4001 bp, Homo sapiens
cattttgtatttgtaaatcaggcaaaacatatttactgcttgccgtatgctagccactatactaagctttatatttgctaaccctaaggcagacacttattcaatatccattactccagtcctttatgctaacaacaccctgcttttatttgagacaacaatgtgctcagcctccagtcatggtttatgacactcagttatgacacacctgttctctgtagtcccagcttcttttcattgaagagagggagactgggttatggaacacacttctagaagactacaggtgaaacccctcacctctttcaggccttgttcaagtgtcaccttccctgaccatcctgtttaaaatggtagaccctggcacatagaaggcattcaatatatttttttaaagtcaggtgtggtggtatgtgtctgtagtcctagctactcaggagcctgaggcaagaggattgcttaagcccaacagcttgaggctgcagtgagctatgattgcatcactgcactccagcctgtgcaactgagtgaggccctgtctttaaaaacaaacaaaccattttttagagtgaactcgtgaaaataaaattagaaaaatctctggagaaagtactgaacagcaagcacagatgcccagggagaggaagatgcctggcatgtttggtgaacaggaggccagcatgactgggatgggtgtgatggaggggagaggaaggagggatgggaccaggtgacagtggaaggcctgcctgtacaagggcttgcagggcacagacaggcattgggaacatactctgagtgatcatactatgaggttgaggaaggattctgggcagaaggatgacagcatctgacagcatccatttaaaactaccatctggctgtggctgaaagtgactgaaaatgacaacatagaaacagggagaacaggaggctgctgcaaaatccaagctgatgatgatgcagcttggaccatggtggtagcagtgagggagaagagaagcgatcaggtttcacatgcatactgaacgtgtagtcaacaggacttgctgacagattggatgtggattgtgaaagaaaggagatgaaggatgaccttaaggcttttgccccaagcagcatcatggctgggaggactgctggaggaatggtttttgaagggaaacatcaagcactcaattttggacatgtttaagtttgagatgcctattaaacatccaagtggagatacaaaaggtcaaatagatacacatctcttgattttagagagaaggccaggtcagggacagaggtagtatctaaagccttgagagtggatgcatgcacctagaaagtgagtgcagaaaaaagaaagaataaaagaagttcaagtgtaaggatgagccctgggatatttcaatcatgatgacaataatatgtgccaggcacaggccccttatctgcaggggctcatttgccccttacataaatgctgcaagttaagttctctcaacctgacttgatggaaggggaatctgtttcacagagctgggtcatctgttcaagggcacacaggtggttaagagctaaaatctatccgacaaagttttctttcctctagcaatctaacttataaaccttggtattatcctttgtcttcccttccccatccaaccagcctttgatttctatcttcacattaagctttagtacagggcatcctaatcctttgccctgaacaattcctcctgcctcctaataggatttcttgccatgagactctcccctgctctagttcattccttgtttcctaaaaataaagctgattgggtcaacttcctgtttagaccttccattcattccccataaattctaatccagctccttagcttggtaaacaggagccttcacaatctggctccaagctcttttgtgtctcagtttcacatactgttgttgctttttggtgcctatgctaggcttaaacagcatgggaacaaaaaggcaactgcagtacatgatgtcaggcacctgatggtgtgagctgtgtcttgttccacatctcaggggaaagctttctgcttgtcaccatgaagtaccatgtttggtgtagtattgttttacacgcccttcatcacattacaggaattctttctgtagatgccaagaatgtatcattattatcatgaattgatgtcaacttttatgaaatgtttttctgcatcgacttggcatcataatttctctcttttgattaatcactgatttattttctactcttaaattaaccttatcttccttggataaacccaactttgtcttcatgtgttaacctctttaaaatatatatatatatatatttctggatttgatttgctaatattttgtttagcacatggccctacagtttgtacagtggccaaggggaagcactttttttggaaaggtggccaaaagcaagctgataagtaggagcagtttgatttccccttctgcctggaatgagggcctctgtgtggacagcaaggattgggatggaagggacatccaaagttctctattattataggaaaatacaaattttgttattgaaaacattcattaaaaaagaacactttcatattcagtacaaaatttggtacatacatggtacaaaaactgaaatagatctcattgctaaaattcaaaagttttaatagcagggaaataaaagtctataaatgagcctatatatatatatgttcagcatgccagttcacctgacataaaaataaatagagggaagaagtccccaaaacaccccttcaggaagcttttttacatcacctccatgtatgaccccttctctgtgactttgattaggccaaggttgataagaacagtcttttccagttccagataactctcatagtccatttttaattcagcctgcatttgttcttttgacttctgatatgttttctggggggggaagaaaaacaagacatccctataaaacactgatatctaaaaataccaaaggatgagaaggggctgtttgtgaatagttgacctggctgctgttttctggaaagggctggatggagggcaggaaggcaggagggcaggtgggcaggaggcagtcagatgtgctgggaaaggagggagtggggggaaacatggtccccaaccactgtctctcaaaaaaaagtccctttttccggccttcttccctataactcttgtttcccttatgtagactggagggtgactaatagcctagaggttgcagaattcttttgaaatccccctcttctgagtccatatggatggcatagcttgtggatcacacggcaatgactactgtcccaggctgagtctccagctgaaattctggttaggaaaattcccatttcatatgcaactagagcagtgattattattgtccattgaggagtgagctgtttccagattttatgtttgcaaagagacaggtgcatgattttcctgaaatctgtgttgaactgtacagcctcaacctggcacctggtgagcactcacacaggccagccttgctggacgaacatgtgaacactttctatgtgccagttattggctaagtgctgtaaatattttaactcatttaagctccattgcaatcttctgaggttgttactgttgccatttccccctttatcagccgttgcttagaaggagacatttctgactaacattagttgtttttccttagtgactttttttatgttctcaatgtaacagaggaaccctttcaaattcattcacatacccacaatctattcatagttgcagagaaaatttgagaagtggtggctttacttaaaagagggcaccatatcaaatggaaataaagttacaagaagttgggaacgttttggaaattgaaaagtataatacaatttaagatattattattataatattcaggtgtttaaaaagtatttcacatgcaaattatttttggattatccacaattctactcgctcccactgatgtagataat

SEQ ID NO: 1879715 - DNA, 4001 bp, Homo sapiens
aattccctggtcatgtggttgaaataatggagtcacatttgggggaaagtacgtggcataaacattatttttggtgagaatttcagctggcggatgagaatgagcataacagttgtcaaggaataatgaaatcttccaattgccatccagcccagcttcccagcagtgagcacatgccactggtacaaaatgtttgtgaaatcaatcagaaaagatattcctggtgatccatgcctttttcttaatataatcatagattggtatgaaattcactttttggaaacagtgaggatgcaagcttttccctacctcagcaagtttacacttatgtaacttatgcatacatgctgcattggaacatcccagcatagttattctgtccttggcatccttaattcctgtaggagctgtccgattagcagtggtcagtgtctttctggggcaacaatgccaaaatagcgatgtctcattagcattattgctatagtttggatgtttgtcccctccaaatcttatgttgaagtttgatcaccagtgttggaggtgggaactaatgggaggtgtttgaatcgggcagtgtggggcgggggtttgcagatccctggtaaatagattcatggcttccctgaggggaggaggcatgagtgggttctcactctattagagagagctgattgttaaaaagagcctgggacctccccaacccctgcttcttctcttgccatgtgatttctgcacaagatggctctcgcttcactttccactatgagtggaagcaatctgagggcctcaccagaagcagatgctggcaccgtattttttgtgcagcctgaagacccatgagccaaataaacctctttactttgtaaattccccagcctcaggcattcctttatagcaacacaaaatgtacttagacaattacaagcttgttctggcatcagattttcatcagtgatgaccttgacaaattcatcaatgaatttctctactgctttgtgatgagcagatgctttaccacaaaaaaacttcaaaaatttaataccatatctttttaaaaatttctgcaaccagcctattgaatattcacagctccctccaattttcagttcactgtgatagatgtttgcttgtttcatgatcagcataccattaagtggcatgtgttcactgcaatgctgacagatccactctttcaatacataatcgagatcttcatttttagctttatgcttttccatttttcataacttctattcatcactttaagcatagaacttcaacagcttatccttctgtttcttcaggtcttatatggtggccattccaacacaatactcttctataagacatttcacacttacactgctgtccagtttctccaatagcttgactttctttctttcttttttgttgaaacagagtatctctctgtctctcagactggagtgtgcaatggcgcgatctctgctcactgcaaccctcacctcccaggttcaagcaatcctcccctctcagcctcccaagtagctaggattacaggtgtgcatcaccatacctggatacttttttttttttttggatttttagtagaaacatcatttcaccatgttggctgggctgatcttgaactcctaacttcaagtgatctgcccaccttggtctcccaaagtgctaggattataggtgtgagccactgtgcctggcctgcaacctccttctcccaggctcaagccatcctcccacctcagcttcccaccatcatgccttacaaatttttgtaattttttttttttttttgatggagtcttgctctgtcacccaggctggagtgcattggtgtgatcttggctcactgcaacctccacctcccaggttcaagtgattctcctacctcagcctccagagtttctagactacatcacacacagagttaacttgaaatggactaactagtggaaaaattagtccattttgagttaactctgtgtgtgatgtaagataatggtccaatttcattattttgcatgagaatattcagttttcctcatgccatttattgaagagatgatcctttccctattatgtattcttagtgcctttattaaagattagttgactatatatgcatgtagtttttcctgggctctctattggtctatgtgtctgtttttatgccattgccatactgttgattcctatagttttgtaatattatttgaaatcaagaaatgtgtgcctctacctttgttctctttggccattcggggtctttcatggttccacataaatattcagatagtttttttctatttctgtgaaaaatgtcattggaatttcattgagattgcattgaatctgtagagcactttgggtagtatggctatcttaacaatatgaattcttccagtccgtgaacacagaatttctatctttccattttatttgtgtcttctttcatttctgtcatcaatgtcataattttccgtgtacaaatctttcacttccttggtttaagtattttattttttctcatgctattgtaaatgggattgttttcttctttttcagatagtttgttattagtgtatagaaatgcaactgatttttgtatgatgattttgtatcctggcactttactgaattttaaaattatttccaacagttgttttggaggagtctttagggtctgccacatataagatcatgtcatctgcaaacagagacaatttcacttcttcctttcctatttggatggctgttacttctttttcttgcttaattgctctggctagaacttccagtactatgttaaatagaagtagcgagagtaggcatccttgtcttgttcttgatcttagaaaggaagctatcagttttccaccagtgaatatgatgttacctgtgtgtttgtaatatatggcctttattatgttgaggtaccttccttctatacctaatttgtagagaatttttatcataaaaggatgttaaatgctttctctgcatcaattgagatgatcatatgatttttacctttatcctgttaatgtggtttattacatttattgatttgtgtatgttgaaccatccgtacataccaaggataaattccacttgatcatagtgtatgctccttttaatgtgctgttgaattcagccagttaatatatatttttttaatttaacatttttttttgagacagagtctcactctgtcacccgggctggagggccattgtgcaatctcagctcactgcaacctctgcctcccgggtttaagtgattcttgtgcctcaacctcccaagtagctgggacttcaggcatacatcaccttgcccagccaatttttgttttgttttgctttttgagacagagtcttgctctgccacccaggctggaatgtagtgatgcaatctcggctcactgcagtctccgcctcctgggctcaagctattctcatgcttcagcctcccaagtagctgggattacagatgtgcaccaccacacccagctaacttttctaattttagtagagacatggtttcaccatattggccaggctagtctcaaactcctgacttcaggtgatccacccacctcggcctcccaaagtgctgggattacaggtgggagtcaccgcacctggcccaatttttgtattttcagtaaagaccgggtttcactatgttggccaggctggtctaaactcttggcctcaagtgatctgcccaccttggcatccccaagtgagccactgtgcctggcctcagcctgcaaaaattttattgagaatttttccatctgtgttcagtataagcctgtaagtttcttttcttttagtgttcttatctaactttgatgcaagggtaatactggccttgtaaaaagagtttggaaatgttcctccctcttgatttttttttttagaaaagttttagaagaattggtgtttattcttctctgtttggtggaatccacctaatcttttgtatttttg

SEQ ID NO: 1879716 - DNA, 4001 bp, Homo sapiens
ccagccatctccagtcctcatgccctctttctctgcagcatcgctctgtagtaataaagaacacacccaaatgacagaggccggcagctagagctccagccgacttccaaatccccaggcttccacattcccagacttctttgagcccctctgtccttgtctgtggaaccgggatagcagcagactctgctcacaggcagggtaagccctggagggaggaggagggcatgagaagcagtctgaggacaccggtgtccagggtggccctccttctccccactccccccaggccccgtgcagcggcccagcctctctcttgccatcctttggcttcctgccctcagtttccccctcgtgcctccctggcccgtgctgcctcttgctaggcctctagggcaaccaggagaaccccacagaagaggcagcagtgatggcaggtggtgggcaccgaagcccaagcccctcaaccgtcctcagagcatttgatgtcagaaggcagtatttgtttccaaggccagctgcactgctgcttggtgtgcccctgctcctctgcatgattcctacctggcgtggctgctgctgtggcttcttccgtggtcatctatcctttccccccttgctggcctggctgcaccccctgaacactgcattgcccctgttggcgtggctgctgcagccactgtagcccttatgtgggcagaaacggcagcgcctttgctggcatggctggtctgtggtcagataagctgctccccacccaccctggcatggccactgggaagcacgctgtggtccactgatggcctctgctgccaggatccaggtctgaggccacagctgtctgcatcaatggcagtgctcgaggcactcactggacatctctagatggcggctgctgttccttcaatgggggcagcccagcctcactttgaagtccatcactcaagggaccccagctcctccaagaccctggacccccaagactctctgtgcccacctcttcccagaacctctctctggccctggtgatctttcgactcccaaggatggagctgagtggtcctttcttacgggacttcagggtagcagagagtggcagcaggacaggggaccttcctccctgctcccataatgctccaaggccatcacaaatagcccgggatctccaatagcccgtggcacagctgccctgggagagtaggctactctgagaccgcctgtctcccccaaaccctcatcaggcagcagtttcaaggcctgtgttctccagggggcatcaaagggatttctgtataatgacagagaagcttctggaaaattttcatggccattggtgctccaggcttctcccagcctctggccaccttggtggtacttattcagtccacaaaccttggggacctactgtgtgccagagactgtgcttgccgtggggatggggcaatgggaggccagacccatctctaccctggggacactcacagtctgggtgaggacacaggcggaaacagtgatttagctgccgtggtagtgagtacacagagactcgctgtgcgtcaccagggtacctgacagagacaatcctggaaagttcctggaggaagtgaccttccagcccatctctgagccttggggaggatatagtcaggcaattggggaagggtcagtgcttcaggcaggggaagagcatgtgcaaagcctctgaacagaaggggcatgccctttatagccttgagtccaaatccttattagttacgtttgccagggacaggttggcacagtggctaaaggctggggctctggcatcacatggcctaggtttgaatctcactttgctgcttactaactatgagacaatgtataaattacttgaccccctccccatccttcagtttcttcatctgtaaaatgggaatattactttacacgaatggtcctgctgaatcccaacaacacttcgcaaagctgttgggattcaatgggaccattcatgtaaagcacttagcacacaataaatgctcaataaatcttaccacgaatctcacctactgagcatctgtgtgtgttccgcagtttatcttcacacagatctgtgaagcttggacccactgctccatttcatagataagaagactgagggttagaggactgaataaggtggagatcgactgaggttttggaggaatcagggaggcttcttggaggaggtggtggctgagctgggtgttgagaatggccacccctgccccacccaccagtcaggaaggctcactctaagcagagtatttcagcttcaggggctccactggtcccgggctccctgggtctggggatggaacaaaagggctgccctgggcactcccaaggcctcccaggagtctcagcagggaaggccccatcgggccaggttctcaggctacagagcctccagcgagcatcaaacaacaaaaaggcttttctcactctggatgagtcaccagagcgagcagacgccccgtccctgtgctgaagaagatgaaaccacacatctgaagaagtttcccacgccaccacttgctttaaatagctgcagagagaagtggaggagggagggaaggggagagggggtagggaagcagggctgtccgcaccaggacctggctggggtctcccccataccccaggaccctgacacgcaccccttgaagcaggttgttgatgagaactcaggccccatgggtgccaggggagcccagcagaggcccagagcccacggtgggccagggcacagcagacagataggcagacagcaggagacacatccagctgggccgtggggtgcacacccctgtgtcagggtgcaggcccaggaagggggaagttgacctcactgtgcaccccggtgcagcctctaggcccccagccaagcttcctcgcaggtcacctgacacccctgagtgctctggctgtgcccccctgcctggctaggttcgtgactgagccctgggcggcatttccggaggcaggccgggagctggggctgcttacgcacttgctgtccccccccgcctccagcagggccgggtgagaagagagccccccatcccccccttcccgtaaatgagctcacccccaccccagggcctcacagggattctaagaagtggaagccaggcacctgctcctcgcccacagcagggggtgggggtggggtaggagggggaggggcaagggagaggccaggggtcctcataacccctcagctcagccctcaggcctaggccagggttcaggggcggccccaggggttggtaaatattctttcccttaggtgtggaagaatgccctctctgttgtccatgcgagagcagtgcagttcaggatgcctccatggcccgggcccatttttcagaaggcaaactaagggaatcccagagatgccttggaggccagtctggttccctcccacgctgggagtaagatcacctcctggatgttcgggcagcccttggtgaccatcagtggctcactaaatatctgcctttggagaccctctaagccaaggcccagagagggcagtgatttgtccaaggtcacacagcaggccgggggaggtccaggcatacctctaggtgagtccataccctgcccaacccaccagtactgccagcaaacattcatttggcatctactggatcctttgcagggacatgggattaaataagacagcatcccaccgacggggtccaaaaaataatcatgagcagtcgccagaacctgggccaggggatctcagtgctgccttctcatccaggtctcgaggctttgaaaaaatacagattccagggctccagccctgagattaggattcagcagactgggaaggagcccaggaacctgcattttataaagttcctctagttgatctgatggattgagaagcttggaacagactgtaagcaaattgagggcaggggctgccccgaaggaggggaggggttttccaagggcttccagtgaga

SEQ ID NO: 1879717 - DNA, 4001 bp, Homo sapiens
tcaaattttttgaatgctttaagatatttttgtgacttaacatatggcctactcttgagaatgacccatgtgctgaagagaagaatgtgtattctgcagctgatggatgaaatatttggtaaatatcaattaagcccatttggtctgtagtgcaaattaagttcaatatttctttgttaattttctgtctggaagatttgtccaatgctgaaagtgaggtgatgaagtcaccagctgttattgtattggaggctctctctctttctctgataatatttgctttatctatctgagtgttccagtgttgggtatatatatatttacaattgttatatcctcttgctgaattgacccgtttatcattatataataactttctttgtctctcttacagttttttgtcttgaaatctcttttgtctgatataaagtgtagttactcctgctctttttttgtgtgtgtttgtttctgttggcatggaatatctatttccatccctttatttgcagcctatgtgtgtctttgaaggtgaagtgtgtttcttgtaggcaacagatcagtgggtcttagtttttttgttttttttttttaattcattcagtcactctatgtcttttgagaatttagttcatttacattcaacattattattgataagtaaggacttactcctgccattttgttatttgttttctggttgttttgtggtcttccctttcttctttctttccttcctatcttccttttagtgaaggtgattttctcttgtggtatgatttaactttttgctttctattttttgtgtatctgttgtatgttttttttatttgaggttaccatgaggcttgcaaatactatcttgtgatccattactttaaactgatgagaacttaacactgagtgcagagacaaacaaatgcaaagaaaactaataaaaactctacattttgactttgtccccacacttttaactttttgttatttctatttatagtttattgtgctgtttgtgttttgaaaagttattgtatttattatttttgatcagttcattgtttagtctttctacttaagattagtttatacaccacaattacagtgttataatattctgtgtaccattaccagtgagttgtgtaccttcagatgattcttattggttgttaacatttttttccttctgattgaaaaacttccttcagcattttttttgtagaacaggtctagtgttgacgaaatccctcaatttttgtttgggaaagtctttatttatccttcatatttgaaggatattttcaatggatatattattttagagtaaaagtttttttccttcagcactttaaatttttcatgcaactcttctggctcataaggtttccactgaaacgtctgctgccagaattatttgagttccattttatgttatttgtttattttttcttgctgctttcaggatattttctttatctttgacctttgggagtttaattattaaatgcattgagttagtcttctttgggttaaatctgcttggtgttctataaccttcctgtacttggatatttatatctttctctatgtttgggaagttctctgttattatccctttgaataaactttctttctttttttttttttttttttagttcatgtcttttattaagtcatacagttacttgtcttctggtttgttgaaacagtaagtcagacaacatttgccacaataatgtctgtcaaagtggcttgccataaacaccccagcaccacattcatcagaagggcactctcgatgaaggcaactaattttgccattctcatccaccttataatatttcaggagagccagcttaaccttctttctcttgtgcttattcttcctgggagtggtgtaagacttcttcttccttttcttagcaccaccacgaagtctcaacacaagatgaagagtagactccttttgaatattgtagtcagacaaagtacgtccatcttccaactgcttgccagcaaagatcagtctctgctgatcaggaggaattccttccttatcctggatcttggcctttacattatctattgtatccgagagttcaacctcgagggtgatggtcttccccataagggttttcacgaaaatctgcattttggtggcggctccactgcagatggcggatcgaaaagctgaataaactttctactcctatatctttctctacctcctctttaaggccaataactcttagatttgatttttcgagtctattttctagatcttgtaggtgtacttcattgttttttttttttcttttgtcttctctgactgtattttcaaatagcctgtcttcaagcttactaattctttcttctgcttcatcaattctgctgttaggagactctgatgcattctttagtatgccatttgcatttttcaattccagaatttctgcttgattctttttaattattccaatcccttcgttaaatgtatctgataaaattctgaatcccttttctgtgttatcttgaatttctttgagtttcctcaaaacagctattttcaattctgtttgaaaggtcacatatctctgtttctccaagattggttcctggtgccttatttatttcatttgatgacatcatgttttcctggatggtactgatgcttgtggatgctcttcagtgtctgggtactactgaaaggttaggcatttattgtagtcttcgcagtctgggtctgtttgtacccatccttcttgggaaggctttccaggtatttgaaaggacttgggtgttgtgatctatgccatatctgtatcagtgggtactcaaagtccagtaatgctatggttcctgcagactcatagaggtaccactttgtcagtcttggatagggttaggaagaattctctggattaccaggcagacactcttgtccccatccatcccttgctttctcctgaagaaacaaggtctctctctctctctctctgttatgagccacctggagctggggttgaaatgacacaagcaaccctgtggctaccaccactgggactgtactgggtcatacctaaagccagcacagcactgtgtctcacctaaagcctgacataaccactccctggctactgcctatgtttgctgaaggccctaaacctctacaatcagcaggtggtgaagtcagccaggctcatgtccttcccttcagggtggtgagttctcccaagcttcaggtgggtccagagatgccatatagaagccaaggactagagtcaaaaacctaagaaatctacctgcttctttattctaccaaataagatgaagttcttcccactctttcctctcctttccataagcagaggagcctcttgctgtggtcaccaccatgacggaacaatggtaggtattactaggctatcaccaatgtgcacttaaggtccaagtgctcttcagtcagtttgtcatgaatgctgccaggcctgggacttacccttcagggcaatgggctcccttctggcacagggcaagtccagaaatgccatccaagggccaagtcctggaatcaggaaccctaagagcctgcatggtgctctacctcactgtggctgagatggtaactaaggtgaaagaccaagcctctttaaattttccctctgcttttctcaagtagaaggaatctctcatagtagctaccatacctcagaatgtgctaggtctcacctgaagccagcacatcccagaatctctccccaggcccacgacatgctatttatggtattgctgctggttctttagtgctcaagtgctgtttagtcagcaggtaatgaatcctgccgggactaggtcctttccttcaaggcaatgggttccttcctggcccagggtgtgtctagatatgttatccaagaggtaggctgctcgactcttgtccattgccatatttttctgtggggaagctggtatccaagatgcaagacaaagtcctctttattcttccc

SEQ ID NO: 1879718 - DNA, 4001 bp, Homo sapiens
ttttctgagtcaccgagaggcatcggtggtccgatgaccccctgggtcatcagaagagcctccttttagtctcagcctcagccttgccctcctacaccagccagagtgaacgcgttggaacagtcagtcagattgtgtcaaccctttgctcaaaatctcctggtgcttttcccctagctcagataaaagccagatgttttgcagtggcctaggacatcctacagcatctgctccctccccttcttcctgacctcatcactcccctcttactcagctccagccacagtcactttctagctgcacctccaataggtgcctttgttctggaacacagctccccagaaaactgcataaggcactccccacctcctctcactctttacgtaagtgccatcttctcagtaaggctttcacgggcaactttatggaagactacgatcctggactctgcccccttcaccatacactaatcacacactccccatctcctttgctctgcattgttgttcctgagcacctatcaccacctaacatcctgtgcatttcccttagttatctctttgttcatgctggagctcagaaaatgataacccaaaatcaaggtcccagaagcaaaagtttttctccgaccttctcctgccctcctatctctcacccctcatcctcccccaggctagccataaaatctggaatacctcttccccaaggtggatcctagagaccagaaccccatttccccaaagccagccataaaaccataaaacttttcctccacctttctatgtaaaactggccaatgaaattatatgacccatcttgtttgactgtaggtcataagaatccccattccagagagggtgctgccccacacccagaaggaaggaatacatgctcagagaggccgagaagattccagacaggccttgctgggcttccccgcttggtcttataagatttagatcattcccttttggtccaatcctattttttacacacctgtttatactttgttgaacctaagcataaaagtgaatggtttcccctgtgtttttgggtcttcattctgaaggctcccatgtcacataaactatggtcaagcaactgtatatgccttttctcctattaatctgccttttatcaggtgattttcagtgaaacttcagagggtgaaggagaagttttctcttggcccctacaattgtatctccgatcccaacccagactgacacatccaggagggcaaaagtgatttttgtggttttgttccctgacatatccctaagtgcctggagtagcacctagtaaccaaagtgctccacaaatactcagagaggaatgaatgcctctcttctctttatatcacttagggccttttgtggtgcaccgagtacacatgaggccccccagatatcattgtttttatatgaatagcttcaaaacccattttggcaatgcaggcctctgtttcctcatcaagagaataaagttatatctaaggtctcttgaatagaagtaacatctttagaaccttcttcatttttcagaaaaggcacagattcagacatatgaagaaatgtgccttaagttgctccttttgagcacctgttgagtgctagggatgccaagtgaggccaagagaggtgctatgggaaccaggtgccaggtgaggccaggtgaagacaggtgaggccaggtgaagataggtgaggccaggtgaagacagatgttacgggaaccagcaggtagaaagctaagtgctgtggagaaagagcgggaagaaatggaggaggtgtctgggacaacagaacttgaaaagaacctgcttctcagtagccccaagtcctgtgtgtgcctggctcagcgcatcctggggagcacactttcctgggatagggcacttctgccgcctccctcctcagtgcatacttccaccaaagactcttcagactctattcagacgaaatgatgaaaccattgtctaaataagccccaagaggcttcagtgaagcagagtgaatagggaactggggcatcgacttgagtaaatagcttaactcaggtcacagagccccccacataacaagagatgaccgtaaacaactggagcctccaactccaactctattgatcatactcagagaaatgaaacctaacatgttttactctctctaaatcccttagaaacattctacctgcttttgttttgttttttgacttgaatagtttcaggtttactttcttttttttaaagaaagcttttttggcaaggtgcggtggctcacgctacctgtaatcccagcactttgggaggctgaggtggatcacctgaggccaggagttcaagaccagcatggcaaccaacatggcaaaaccctgtccctactaaaaatacaaaagttagccgggcatggtggcatgcgcctgtggtcccagttactcaggaggctgaggcaggagaatcactcgaacctgggaggtggaggttgcagcgatctgagatcacgccactgcactccagcctgggtgacagagcgagactccgtctcaataacaaaaaacaaaaggtttctttcttctttttaaaactgacacgtaataattttacgtatttatgaggtacacagtgatacctcaatacacataatgtacagtgatcacatcagggtaattaccatatccatcatctcaaatgtttatcatttctttgtgttgggaacatttaatacctttcttttagtgacttgaaactatatattactgttaactatagtcattctacagtggtatagacaaccagaacttattcctcctatctagctgtaattttgtatcctgtaacaaatctctccccatcccccctccccgtacccttcccagatgctagtatgctccatttacttttcacttctataaagccaaccttttttttttcttgctaaccatttccatttgttttcattatcttccattgtttctttttgaaaagataatcccagaagttagtgcattagaaaaactgtttgagattaactttttttagcttccacatatgggtgagaaaatgttgtatttaacactctgtgcctggctttctgtcctctgaatgcatcagccatgatttcaccgactctctctgagttccctgagagctttctgcctaaagcccttccatgggtactaataactgagtctcagaggcagcagcgggcaggcttttatttcacaaagttggtcaatcccagtcagaggagctaatgcaaaaagttagactctgatctgggatcaagcagacggtagcaaattaaaaacactcccatgtctaacctaagcaaattaatctcatcaatataacaatcagctgttttccaaattaaagaaggcaaacatgaaaaccagtagaaagtcacagataagcccttctgatctgactcaagttcaaggagacaatcccacagtcctttcaggtgcacaaactctacatctccaactccctattctctttcttcctccattcagcctcagatcgggggcatcaccttgcaatatgctgctgacagagagtgggccaccaactttggggattgaacaaaaaataagggatccatgcaaaagaaacaaagaaagtcagagtacagactgagtctaggagatagaagtatcacaggagtcaataaaacacctcaaaagttgcttgctttccaataaagtgacaacctttatctcctgccttgaataagccacctgggcatgacacagtcaatggagaacttcagcaccttagtatttcacggatttgtcaataatacaattggaagatgtctttggagaataaaagccagcaggtgcaactctgagtatgtcagagtatatgaggcagatgagatttctgtccctgaaaccaaccttgtagtaaactgaaccttctggaattgccatttttatgggtcaaaacaattgagtgtcggcaattcacatgctccaaagacaatagacactcacac

SEQ ID NO: 1879719 - DNA, 4001 bp, Homo sapiens
ttacaaatattaatcatttaatccccctaacagccctatcgggtagataacactattgtccctgccactaaattagtggtagaatgtaaagaataatggaaaaagcaatttaaaaaaaaaagtaaaagcaaggtggaaaaaataattggtgttactgttcattagaccctttcttctctatcctttgggtctaatgacttcccatttgctatttatcacaagttttgacaagcaattccctgtcctagagaacccagtgttttactctttttctttcctctaatttgaactccttggtcaccaaagtaaacagcggtgtacatatttctacagcctatgcgtgcaaagacatatatacatattacacagggtttttgccccttctttcctcttttcatttatttctttctactttcatcttcacttttttttttttacaaaaatatatcctatcacacattctaaaaatgaattttcacttaaaaatatattctaaatctatttcaggatatacatctaaacaattctttgcaatacctataatatagctgaaaatgttgttgtaatataatttaactattcacctatgattcatcacttcatttccaatgttgttttttaaggcaatcctaggcattgttctgcatctggcaatggtaaacgaggtgtttcaggccagccatcaaccaaaacaaccaaggcactggggacctgccaaggcagtaaagactagaatggtctagatcccaggaagacaattaaccctacttttgatcccttttctactcaagaattcttcagtttgaatctgcagctagggcactaacgagatgaggagagtgtgtgttcagcaacgtcagacttattacagagaggaaaaaaatgatgcatatgtatgcactttgtaaagagcaaagcacaattgaaataagttatatacatacacatgtgcatctcatcattgttactgcctctaaaaactaagcaacaccacttcctctggagaaaaaacagttcattaaaagcataaatgttaactacagtagaaaaaattgttcagcaaaatatattttagatacttaaaaaacaagagctacaaagtatcatggtcatattgcaagtctgatgctagggagctgagttttaaccttggcagtaacaataatttttctaagattttgagtcagtcatttaaatgttctttgcctcagtttcttttcctctaaagtaagaatgttagattaaatatactctaagggtccttctttcccttgactttcattatgttatctctgagcacagggcttcccttttcattaggaatgcctgcaatcaacagattgactggaaaaagacaacagcaaataataatttgtatctgatgaaactgtgcctgtaactgacaaaactgaagactctgaaaacactggactgtacttggttgaccttaaaggatgcttggctctgttcatgtcttttctctctctgttttccagttaagcatttcgctgtgcagttgattcagccagtgttaacactctgctctgaggctgccctgcacctatctctttacagataccactgggtccagcagaagacatgagcattttttaaatgtcttctgtagctttccagtgattctggacacttggccctaaacatttatccatttttgtaatctatgccaccatcttgttactgatacaggagttaaggagaaattatttaggcagatagtgagggtacaggagtccttggtaaggtttaccttttaatgaagagcagtcccaaaatcatgttcttttctaacaaagagcagcctgcaaaatcgagctgcagacatagagaagcaagttggaagcttccacgggtgaatgccagcagttgtgccaataggaaaagaccacctgggactaggcatgttcaaaatggcggctccatgttcccgtctccttgccagccacgtgtacagtaaggagcaggcaacatggcacctgccaagtggaaagcctgtttgcataagattagggtggagcagccagccttcctggccagccttcctatgcaaatgtcataccgagtccaaccaatctttgggccctatgcaaatcagacactgcttcctcaagcctgcctataaaatctggtgcactctggtgcaggccagatttctcaatcgtgatctctctctgtctctctctctctctctttcctctctctctgtctctcctctctgcccctatctcttcctctctctttccctatctctccctctctctctttgagacagctgttctcctttctctttcttttgcttattaaacctctgctcctaaactcactccttgtgtgtgtgtccatgtccttaattttcttggtgcaagacaatgaatctcaggtatttaccccagacaatgactttgcttcagtaccacttatttggtcacttctttatgctagaagttacaggtttttccttaatatattctgcaattaatgcacagtcactacattcatgttatgatactcttaacaccctcatctcataattatttttgtttttattacaacaatctccatttctatcttacttctgctgcccaacgatctagcagtgcccaagaactcactatgactcaaatttttgtcctccactatctaaactctacacatttttgtcctccactatctaaactctacaaatttttctctgtgacttaaaattactctctctgatcatggttgtttctctgtctctattcaattccaacaaacctgtccctgagtgggtctttatcatgcaaaagtctcagaactattttgtatggacagtggtattttttgagtgaattttaatgttcatccatccattcattcaacaaacaatactagacacctataggtgccagatggtatggtagatccggaaagaacaaagatgaatgaaaccatgcccctatcttcaagaagttcattactaatgaaggaaactgagaggaaaaataagtaacataagagggcattagtgataaagaaaggcaaataatgaaatactgtgcaaacagatggaagagcagtagattcatttgggtgtcactgaggcaatctatggcactagagaggtcaattatgtgtgagctagagagctctaacaagttcaaataactgatttaatactggtaagtccaaaatcactgataagtcttcacagtcattgataagtctccacaatactgaaataaaactaacatcttattagagatgtgtgtatcgggttgactgcctataaatattttactattatacagaccatttgttagtatttactaaatttcctttaaataaaatattacactctaggatttggaaaatgaactgtctccccaatctatccaaataatcttttgaatacaaggaaaacaatgagaactccaaactgatcttcttatttatagaatagactagcagtaatcaatttgaaaaagaatgagaattctggctctttagtggttttcagggctttataaataggttttttaagatataaatggacatgatattgttagatgactattcagaaatgactaatgaaaatactaatgatttttcaagaaataaaaatacttaacataatttaaaaggaaaacacttatattacaccaaacatcagagttttttctttttgttttttaaagatggggtctcaatatattgtccatgttggagtgcagtgaccatagtgcactacagcctcaaactcctagcctcaagtgatcctcctacctcagcctcctgagtatctgggactcagtacacaccaccacacctcactcaaagttgtttttttttttttttttttttgtcttaaaggatacgaagcaaagaaaaataggagtgatctatcacaacaaggaaaaaactagaaaacatacctgaagaagcttccagtctttccaatctgctgatcaaccagtcgagggagccagaaaattgagcacagt

SEQ ID NO: 1879720 - DNA, 4001 bp, Homo sapiens
gaaagtaatggattaaattgaaattcatctgtaatatgctagagaagcagaaaccattaagaaagaaatttgactgggtgcagtggctcccaacactttgggaggtcaagatgggaagatcactggaggccaggagttcaagaccaacctgagcaatataaggcgaccccatctctacaaaaatttttttaaattttaaaaattagccaggtattgtggcacacacctgtggtcccagtgactcaggatgctgaggcaggaggatcccttgagcctgggaggtcaaggctgcagcgagctctgattgcaccactgcactccagcctgggtggcagagtgagaccctgcctcaaaaaaaaaaaaaaaatagaatgaaatttgatagagacaagaacaggatattatgcttggagacagaaaacaaactgtaagacacgaataaggaaatctcagttgcactttcagacactgcagcaagctcagcccaggccatatctgggcctggtaacaagtctcttatttaaggggccagacatctttagggcaggtttgcacagcacatttcccatgcctgacttcatgcagaccccccaatgtccagtgcagaagaggaggtgtcagtaccctctccatccaggggtcagagagtgtaaatgacccacatggaccacaaggctgccgggactcagcccaaggcccagggcagggcactctgtgctggcactcgagattacttggacacaaagaccttggccctctctgaaaacattgatttatgatccttttgttcctgccgtttgatatgagagcacgaagggagaacccactgagctgggcagctatcccttcagagctataaaggggtgaccccatggaggggtgttcaccatatcaattcagctgacatttgcacaaacacacacccagagtttaaatgagaaaggtcttatgacttcaaagtgaactccatccttgaggccctctaatgggttggtcacactaatccactgtcctttcaaacaatcaggaaatagctttaaagttctgggggagtatgcttccaggagaggaagaagggagtgctggtcagtgaagggggcttcagtgggctacaagacagaccccacactgggagcaacaagtgggggtggtggaaaggacatggataattcaaaaaaccagcttcagccaggcacgatggctcacgcctgtaatctcaacactttgggaagccaaggtgggtggattacctgaggtcaggagttcaacaccagcctggccaacatggtgaaaccctgtctctaccaataatacaaaaaaatacccgggcgtggtggcgggcacctgtaatcccagctactcgggaggctgaggcaagagaatcgcttgaacccagtaggtggaggttgcagtgagccgagattacaccattttactccagcctgggcaacaagaatgtcaggcctctgagcccaagccaagccatcgcatccccctgtgacttgcacgtatatgcgcccagatggcctgaagtaactgaagaatcacaaaagaagtgaatatgccctgccccaccttaactgatgacattccaccacaaaagaagtgtaaatggctggtccttgccttaagtgatgacattaccttgtgaaagtccttttcctggctcatcctggctcaaaaaccaccctcactgagcaccttgcgacccccactcctgcctgccagagaacaaaccccctttgactgtaattttcctttacctaccctaatcctataaaacagccccacccttatctcccttcgctgactctctttttggactcagcccgcctgcgcccaggtgaaataaacagccatgttgctcacacaaagcctgtttggtggtctcttcacacggacacgcatgaaatttggtgccgttttttgttgctcacacaaagcctgtttggtgtctcttcacacagatgcgcatgaaatttggtgctgtgactcggatcaggggacctcccttgggagatcagtcccctgtactcctgttctttgctctgtgagaaagatccacttatgacctcaggtcctcagaccaaccagcccaaggaacatctcacatattttaaatcaggtaagcggcctcttcttactctcttctccaacctctctcactgtccctcaaccactttctcctttccactcttcaatctctcccttctcttaatttcaattcctttcattttctgggagagacaaaggagacgcattttatctgtggacccaaaactccggcactggtcacagactgggaaggcagccttcccttggtgtttaatcattgcagggacgcctctctgattatacacccacgtttcaagggtgtcaaaccacgcagggacgcctgccttggtccttcacccttagcggcaagtcccgcttttctggggaaggggcaagtacctcaaccccttctctccatgtctctaccccttctctgcttttctgggagaggggcaagtacccctcaaccccttctccttcacacttagcagcaagtcccgcttttctatggggcaagaacccctaatcccttatttccatgccgcaacctcttatctctgcgccccaatcccttatttccgtgccccaacctcttatctctgcgccccaatcccttatttctgcaccccgacctcttatctctgtgccccaatcccttatttccgcgccccaacctcttatatctctgcaccccaatcccttatttccacaccccgacctcttatctctgcgacccaacccattttcccacttttctggaaggtaagaacccccgaaccccttccctccatttctctactctctcttttctctaggcttgcttccttcactataggcaaccttccaccctccattcctccttctactcccttggcctgtgttctcaaaaacttaaaacttcttcaactcacgcctgacctaaaacctaaatgccttattttcttctgcaatgctgcttgaccccaatacaaactcgatagtagttccaaatagccagaaaatggcacttggaatttttccatcctgcaagatctaaataattcttgtcgtaaaataggcaaatgttctgaggtgcctgacatccaggcattcttttacacatcagtcccttcctagtctctgtgcccagtgcaactcctcccaaatcttccttctttccctcccgcctgtcccctcagtcccaaccccaagcgtcactgagtctttcaaatcttccttttctacagacccatccgacctctcccctcctcaccaggccgagctaggtcccaattcttcctcagcctccgctcctccaccctataatccttttatcacctcccctcctcacacccggtctggcttacagtttcattctgtgactagccctcccccacctgcccagcaatttattcttaaaaaggtggctggagctgaaggcatagtcaaggttaatgctcctttttctttatcccaaatcagatagcgtttaggctctttttcatcaaatataaaaatccagcccagttcatggctcgtttggcagcaaccctgagacactttacagccctggaccctaaaatgtcaaaagccatcttattctcaatatacattttattacccaatctgctcccaacattaaataaaactccaaaaattaaattccagccctcaaaccccacaacaggatttaattaatctcgccttcaaggtgtacaataatagaaaaaagtttcaattccttgcctcctctgtgagacaaatcccagccacatctccagcacacaagaacttccaaacgcctgaaccgcagctgccaggcattcctccagaacctcctcccacaggagcttgctacaagtgccagaaatctgacccccaggccaaggaatgcctgcagcccaggattcctcctaagccgcgtcccatctgtgtgggaccccactgaaaatcggactgtccaactc

SEQ ID NO: 1879721 - DNA, 4001 bp, Homo sapiens
ggtgacctggcccagcccgctgtcttcttagcctaatgggctcatcagaaacagcagcaaggagaccatctgcatattcaggtgaattgctgaccccacctctcccctatccaggggttttgtttggttttgttttgtttttgagataggacctcactcattgcccaggctggagtgcagtggcacgatcagagctcaatgcagcctcaaattcctgggctcatgtgatcctcccacctcagcctcctgagtagctgggacaataggcaccatcccacccaaataattttttaatttttttatagagatggagtctcgctgtgttacccagactgacctcaaactcttagcctcaagcaatcctccagcctccttggcctcccaaagcactgggattacaggcttgagccactgcatccagcccacgcacttagggattttgaatgatagcaccaggtgtggggagaaagcagtctcactgccacctgtatcccaggacagggcacagggtccagccccccgtgggctctcagtaaaaccatgggagaggaagaaagagagacagaaagacaggcagacagaaggagtgaatgaatgagacttcttgcgacttaccaactggaagagcgaagtcgccagtgctcccttcagctggggggctggggcccattgggagcaggaaggaggtgcttggagcagtgctgggttctggagttggctgcgtgtgttgggatcgtgtggacactggctggggtaagtgtactgcccctggggccatactccgggtgggggacgtggacgtgcagactgcatccatgcttgcattcccagggatggccaccacgttacagctggaggaggaggaggcttggtcaggaggcagcaggggacagagtggctggggtggctgggctcattcacgggccccagcaggcaggataggagagtgacgatgtgtgccctctctgaggaccaccccctcctagccctcccccacctccccatgcacccacccagtcctgccttccagggcaaggtcctgcccaccatgccatttatcctgggagccaccctcagataaagcagtctggacaatggtggttggtgagctgctctgtgtcctggacccacagtcacccagggacagcccctccctgctcctccagaaccaaaggactcagctactcacatctggtggggcctgcaaatatccgtggatgaagtcgtgttggagaacgtccccggggcacagggcttgcacaccacgtctgatgtttcagttccttcagggaacaatccgaacttgtcaaccactcagacactctgcgggacagctgggccttggcactagagccctaggagaggtctgaggggcccaaggagctctgtctgcacctccaccccttacacacacacacacacacacacacacacacagatgcctgtacacacatgcacacacacagattcctgtacacacatgcacgggattgggctgtagagttatgtgagttcatcttgcagcatcacataactttcctagcttagggcttggtctgatccatctctgggtctcctggttccagtacataagaggtgcctaatcgggagtgctggcaggaagaatgaacggtggacaggtggacagacggatgggtagcaggcacctggccaccactaacagtgctccctgctggactaattaatgggttgatgcccgtgacactgcaaggatgtctacaaaggagaggcccatgggcgtccccaaggacctgagccccaccccgtacctggtctggccacgccgaagcccgggcggcacttgcgcagcggcgcgcacagccggcacccctcctgcttgctcagcgcgcagtaccagccgggcctgcaggtgcagatgcggttctgttcccgagtgcaggcttgagtttccacctggtctagagcagcgagagggcggcaaacggtcacgcctgcctccgccacacccacgctgccctcccagacagcccagcactctcagacagcggatctccaggaggctggcggaccgcctcagcatggggcacacacaacaccggccagagtccaggggcaggaccggcagtcctgctactctccgcagtcccgctactctccgcagtcccgctactctccgcagtcctgctcgtcccccgcagtcgcgctcgtcccccgcagtcccgctcctccccgaagtcccgctcctccccacagtcccgctcctccctgcagtcctgctcctccccgcagtgccgctcctccccgaagtcccgctcttccccgcagtcccgctcttcccagcagtttcgctcctccccgcagtcctgctcctcgcagcacgagcatgcgcaccactctcccacgcaccacctcctcaaccctcacgtgggcacagttctcccaccgcctgccccgtggggctgtgaagaggctttggtgagacagaggaggaaaatgccagtggtaggggtaaacagctgcacctgtgccacttccaacaaccagcctggggtaactccagacagctggaagccaaagaggctggagttgccgggggaagttggaggcaggggtgtaagggccccctttttctctgaacctactcaccagagctacagcgggagccacagctcaagcactcgggaacccagttccagagctgggtgtatgtgctgtcctcacaggagtcacacacggtgtccgaggtcttggtacagaagacttttgcatgttggcctgaggaaacaagggccagaggtctcagctgggcgagccttctgccaggaccctgggctcatccactgtccccacaaagtccagagttctaaagcccagctgggaaggctattctgtggagttccaattcctcagaatcatctcccatctagtattgtaccagctatcacgtcatttctgaaccccttctgctcaaaaatagattcctctctgctctttccagatgcttgaacctccaccactggagccctattatcagtcaatcacactttagtaagaactagcttgccagtttcttccttcttgatagatggctaatattctccagctaggggcatgaatgatagggggaacaggtagtaagaatgtagtccctggtatcctatcaaggacaagggcatgggcctggaaagcaggcattccagggacagagaacaccaacggaaaccttaaaaaaaagttgactcagtagctgcttttttttttttttttttttttgagacagaatctcactctgtggcccaggctagagtgcagtggcacaatctcggctcactgcaacctctgcctctcaggctcaagcaattctcctgcctcagcctcccaagtagctgggattacaggtgcctgccattatgcccagctatttttttgtattcttagtagagacgggttccaccatgttggccaggctggtctcaaactcctggcctccggtggtccgcccacctcagcctctctagtaacttcttaaagagacccttccagttaataaaagaaagaagagagtcactttccctaggatgtcttaaaatggctagggacggtgacaggtactcatatgcccacctacatctcaaggtaacggctcaaagccctccattggctcccagacagaataaaatctaaactccttaccatggtccctgctcactccttcctcctcctcccctaccgtactcgccttcgctcatcctgggccacacatgctggccctgctgttcctccaactcaccaaacaggctccgacttcaaggccttcgcacatgctgttgcttcctcctggcacactgttccctgtatacatgcatgacctgctccctcacctcctgcagggctctgcccaaatgtcacctcctcagagagaccttcccagaccaccctgtgtaaaacagtatgtcccgttctgtctcccccgccttacctgaccttgtctttctacagcacttacagatagacaggac

SEQ ID NO: 1879722 - DNA, 4001 bp, Homo sapiens
agttggactgacagtgcaatgccagcaacctggtttcagcattaccagccaccctgcaccttcaaccagcaacctccaagcaagcggcgccagtgtcagaccaatccccagctcaaggagaacttccctgaaaactttgtgaattgttctaagctatacagctaaaagaaaataaaaacatgtttcaatttaaaaaggagccatattccctcttctctcactttccccttccttttccagctggcaacttctcagacctttggatccttggtaaacaaagagcgagcaggacaaccatcctgtagttctggggagtgtcccttaagcttccttcttgtctgggtcattgtagagatcagagagtaatatatggaaaaacctaataccaaggagttggcacagagagggggaaagtaccagatctggaatcagaggcctgcagtttggtcttcgttctaacacttagcttctaatctctggtaaacaataaacaaggaagatatgatagtaatgcaaaatgatagtcattatggaaaacagtatggaggttcttcaaaaaaattaaaaatgggactaccatacccagcgatcacatttctgggtatatatcccaaaaatttctaagcaagatctcaaaaagatatttacatacctatgttcattgcagcactattcacaacagccaagacatagaagcaaccaaaatgttcatagttaaatgaatggattgttttaatgtggtatatatacactatggaatattaagcagccttaaaaaggaaggaaatcctgtcacatactgcaacatggatgaaccttgatgacattatgctaagcgaaataagccagtcaaaaaaaggacaaatactatatgatttcattcatatgaagtagtcaaaatcacagaaacagagagtagaaaggtagttcccaagggctggcaagagggggaaggggaattgtgtttaatgggtatagagtgtccattttgcaagatgaaaaagttctagagatctgtgacacaacagtgtgaatatacttaacactgctgaacttcacacttaaaaatagttaaatttaatgttacacatttaccaccataaaaaatactgaaagcacattaaaaaggaaaaaaagcaaaatacgctcaagacagataacataaattcagaaagaccatcaagagggtgagagaccaaatgagaaatagagagagggaagaggaaagcaccagtgaaaaacaaagtccagatatttagctcagagtcctctctggggtaaggaataggagtgcacacaccagctagagccccagctcaaagaatgaatggggcacatcacacagatcccttcactctgaatgcttctctctctgggaaacagatgatcttcactgcccatcaactaactgtccctttagtgctctagacaggatcagggaggttgacatctcacacacatgtgatccttatcataactgctgttttccaaggtctacccactgctccagccaagctgtaaggcctgtgtcttctgaacccatcagaacacccagcaaccaaaagcctgcccaatgttagcctggcaccgttctacataaaaagacaaagtcaagaatagtcctttacacagaaatcccatgccctagttcttgacagctgtaattacagccaacagcttttaaaagggaaagaagaaaagaaaatagcagcctggacctagcagtgaattgaggggtttagggtaaaacacataccacggcacttgctattaatggtggccagtctaaacaagagactggacagccagaccaaacagctttctggccaattaattgctccctctaatttaatgagctgctcattaagcactggaagcagcacataggaagggagccacaggaagaggcacatgggccataagggctggcagatgatgagggaaaaggagactggggtcacattccaaccccagatgcctccagatcccacaaccagccagccccataccatgcctcggccttcccttgcttccaggtgatgttttcctgtacctctgtttgttccatgaagttgtatctctgccactggctctcttactggggaggtcccatgtcccagttctttggttcctcagctggggtaatgactcatattagggtcacaaagagccttcagcaggattacaaatgggccagcacggtcctgaatatgaatcccaactcttcctactaacagcaacttgacctagaattatttaacccacccaaggttctatttcctcatctataaaatgtaataataacatcctcatctagagtagttgtaaataataaataaaataataaaatattatttcaatattaaaaagcctaacaaagcacctggcacataagtagctattcctaatagtagctactattaacagagatatcactttcataatgatagtgatattactgacaacatattccctatctcttcgtcaaaagtgaattaaaaagggactttttttggttgaaaccccaaggacaggccagctgcaggtccagtccttatcacagcagcaaccacaactgtggtgaaagtagcagcccatcctaacaactgtaacacctccagatgttccccagccgaggcctctgtgctttctatctgagctagaaggtgaaggaaaagaagaggcctggaaacactcgaaagttgcatgttctcatgagactgagtgaagaaatgcattcaggccacatgcctgccccttcccagacctgcgagactcctcaccctacccctctgagcctcagtttaatctagaaaatgagggtaactggttccccacttcacagcctgctgtgaatgttgaatgaaacaactcaagtgaaagtgctttgaagctacttcttactgtgtccatgaaaaacagtactgttgtatttaatagcagtctcaataaatttaatttaacaataaaaaaatgctgaaatactgcgaagatcaaggcaatgaaaagattttattaggctgatgaactgctcagagaaacagccccaagcatgcaaattttcttcccaacgttgctgtcattgaactcaagtttctgttgaccagaggaaggactggctgaaagtaaaattaacaaagcaaaatgaagctacagcatcacctacatgtttttccatttaggtgagtagattattctacagaacaattattctaaagaacaaaccaggctgcatccagggatgaccaatcatgccatctctaatgccaattatctctttaaaaaaacacttaaaatccatttcaccaatcccaaacctacctttgaaatgcacaagtacaaggtaatttattctgttccagtgcagagcacatggacaaattccttcacaggtatcagaagagaatttgattcttgctcagtctcagcttcatgtaccacagagtcagaaagcaacaagttcacagactgaaccatgtataccagcgagaatgtatagtgaactttccgaaagtagacaaaatggcagaagaaaatgcgcttacactcccggagcctacggcatccaaccaataaaattttgttcaaatctcacatttgctcttaaaaatccaagtaaatcttatattcgatacctctctctctctctctatatatatatatatatgtatatatgtatgtatataggctctatatatatatatatgagctctctatatatataagctctctctctatatatatatacacatacatatatacacacatacatacatatacacatacatatatatatacacatacatatacatatatatgtatatatgtgtatatgtatgtgtatatatatatgtatgtgtatatgtatatgtatatatatatgtataaaggcttcacactgtgtatggactcaatcccaaactccttcatactgaagttcaaaccattttgttaactagctccaccctccccatataacacatcgcttacccaccctcgaa

SEQ ID NO: 1879723 - DNA, 4001 bp, Homo sapiens
caagtcttagagacaaaattaggcttcttgtttgtaacggcatatttcccttagaaaggctgcgttcgtcttgtgttggccacaggcaaagtcagagagggggcagtacaggcgattgcgccatggatcccatccaaagatctgtgtgtggcttacgccctgcgcgcgaggagcgtgggtcacctccgggaagatcttgtgccacgtccccgcccccagtgcctcctggcggctgagactggaggacgtgctcactgaggtccggggttggaggtgagggggttatcgcgccgtctgggcggaggcgcttgggtccgttcttctcccgcccctttcctccctccttagccacaactagacactgtgagcttctagccaaaaccatttcagcagcgttgcgcctaagcagctctttatgccacgccttcctgcttgaaacatcaaaacagcaggctcacagatctccttatcactcagctaaaatttccccaattaagggattctcgtattttacccccaaaatgtgtgtgtgtgtgtgtgtacgcatattacacagtgaaagattattttgaataatgcaaatatagtgctttttaaaaaaaactccagcaaatcataggaaaaataagtatgatctctggatgacacattaaaaactaaggcatgcaggcctgactggggcccaggctgtcctccccctaaaaataccccataccggtgacaccccaaccacgaatacctgagagctacccaccctctaagcaaaaacgttgcctggaattagaattcggtttccaggctcagttcccactggtagaagatgcactctacccaggctcagttcccactgcacactcccaacacaatgacagccacgcatttatcaacatttaacctctctggcctcataaagtaaatccattttcttgggttagtttcttcttaaagggagttttctttcctccaaattctttttgtaaataggctttattttttagagcactttttcagagcaatatgcttttttattagtagtacgtaatagttgtacatatttggggggtacaaatattttgatatacgcataggcttaacaatcaaaccagggcaactgggacatccgtcatcatattcacaccctctttaggtcgagatcattccaattcctctcctccagcaatacaactaattattgttaactacagtcaccctacttttctaaccaatactagatgttaccatttcttctaagcatatttttgtacccattaatcaacttcatctcctcctttccccaccactcttcccagcttctggtaaccagcaatcaactttctacctccatgagatgcatgttcttagctcccacgtatgagtgagatcatgcagtatttgtctttctgtgcctgatttgttttacttaacataatgtcctccagttccatccatgttgctgatgacgggatttcattttttttaatggccaaatagtattcgaatgtgtaaatgtaccacatattctttatccatatatctactgatgggcactaaggttgactttctatcttggctattataaatagtgctgcaatgaacatgagaccgcagacatctctttgatatactgatttcctttcttttggatatatacccagcaatggggttgctggatcatatggtaagtctgtttttagttttttaaagaatgcccatatttgtctctatagtggctgtactgatttacattcttaccagcagtgtacaagcatcccctttccctgcgttctcaccaacatttgttattttttgttttttaatcaaagttggtttaattggagatgattccttccaaattattttatttactgcataataattagcaaatctgacttgaaatttccatctgagatgggtgaggggcaatctcttaaatacatgtcagattgtatgccagtctggagggattttgtaggcatacaatctgacatgtatttaagtgattgtcactcacccatctcagataggtgagatgaagcttagtttaaaaatttggcttagtttaagaatcttggcatgtctctccaacccagaaaatgcttccattttgttgagtgagtcctaattcccttagtctctgtggattctcacatatttgatgtgcactgccttcatttatcattaacatttgtctttctctgttgtaacactataattagagaaatgggttctggacacgattgctctgaattttctccattataaaatcttagtagcaaggatcctgttttaccttctttgcctctcccttaacagatccctgtcctaggagagacggacaaatcccattcattctgggcctgggggtgctaatgtagcaggaaaagacagcctgtttctacttcaagtttgtgccaggggaatcagaaggactgagacatgaattgactgacgtttgacattatccatcacaaaatgccttcttagagaattacacttggaaaatgtcatgaaatgttcatcttgtgccttgatttgatctctggcactaaccagtgttgttgccttgtgctaacacaatcattcactctctctactggagactggtttcactttattaaacctatgttttaagttcattaaggtggagaactatatgggtctgtgagagtagtttcacagctgcaaatgtttaaggtattgacttccaatccatgctggtaggaggccgagggcttggatgttccagtcattgggcacctgtttcatagtggagaggactggattcaacagcttttcatacaaatcctatatttcttgacagtactaagggtgttgacaagtcccacttacttttgatgatggatcactgtttaatatttggattataactagggatgcaaagaattgaataaagtgcctatgacaaaattgtcattcctgtgtattttttgtaaattttttttggagcatatatcaaaacaaaacagaatggaaatgaccccgtgcactgctagcattgtaaccatatggaaatgatcccatgctgtgctaacactgtaacaatatgaacactgcatgtgtgcagtcattgaggtggaaaggagaggagagaagagagtgggtgcaccatccagctcattaagagtcagtttcactaaaagtttatctgtttgataacatcaaattatttatgttttgaacaattgtgtactgtcgagatgatttttcttaacagtgagagactacccagaggtatgcttaaatttcaatgtagacttttttgcagagaacaatagacaaaacactattaaacatacaatagatatattatggtagggtgaaattgtaaggcaaatggagaatggaaataggcattcaggaggaaaaaaatcatctgaaacatcgcattgacaaagaaaaatttggtcatgtattttatgaattgattatactatcatattgatattccaaaaggcaccttgagactgatgtgagaattttgatttttaaaaagttccacgttggtatttgtatctttgcaactattttaattgaaaataaaaatattttagatagctttaaaacatgcgaggttctcaaagattcttgtagaggaatcacgcaggaaaaaaaaggtggggaataggggacaaagccgttttggtcgaggatgttcacggtgacctttctttccccatcccaggcacgcgacgggttccctttggagaaatgacttgggggaaaaatatttttcattgaattttatttaaaaattatttctcggccaggagaagtggctcacgcctgtaatcccagcactttgggaggccgaggagggtggatcacgaggtcaagagatcgagaccatcctggccaacatggtgaaaccccgtctctactaaaaattaaaaaaattagctgggcgtgggtggcgcacgcctgtagtcccagctactcgggaggctgaggcaggagaatcgcttgaacccgggaggccgatg

SEQ ID NO: 1879724 - DNA, 4001 bp, Homo sapiens
gaaatcgcaaaaaaaaaaatctcataatgttttaagaaagtttacaaatttgtgttgggcctcattcaaagccagcctggaccacatgtggcctgtgggacgggggttggacaagcttgctctaagagaacacattgaaacatagttttaaaaaatgttgccctcagttggaattatctttgtgatcaggcaggggcagtcacttcttgggtatatctaatacattttggctatgatacaaatagtgttaactcgtgacctattttctccctgaggccatttttagggtacctattccaccatgtggaagccccacttctctaagacactatctagcacaggaagaataagcagatccaaaagttcagagtctaacgcgggaatgagatgaggaaacatctgtagaagaaagtcttttgatgccgttctagagtctagggggaaggatcacagatagttcaaaaaatctttaagaaaattaaagccagtcttctacatgcagaagaaggaagtagaggaggccgtggggagctcgggtgtggagaaaggccactgagaaggcttggttgacagctgcctctttccttgactgttggggagtgaagatcattgctgggttgggcccgatgagctaggcaaggagatggacaagtgaggaggcactgcttcatggaagtccctgtccaggctcatggacatggtgctgcactgccacagctggggatggcctgccagccaggaagggagtcagcctgctagtgatctagaaatagactcagtcccaaatgaactgccacgagaacaaaagaaaagacatctctagaataaaccaaatgcactaggttgggggaatagctctggtctgtgccacttaatattaaaatgcagagaaaaaggaggaaaattaaaaacaagagtcaaaggggattgggtaagattttaaatttaattttactgtctagtcttcctatcaatctagaaggaaatctgtctttgttcatgactcaactatgggatgtccatagcaggaacaggaaaactccttagagaaaggcatgagagcctgggatattgagagaggagaaacacacttaccgttttgtggagtctggtgcagtttggccacctctctctgtacacagagtcctatgttgcttctgaacaaaccggggccaggtaaaacattcacttcactaaatttatcatgaaaccgattcaactgaattgattccattttggctttatatagctgcaaccctcatctaactgagaggctgatatttctgtttgccatgtaattttcatacaatattccagctacattttctatggggttttcccaagcccctgtttgcagaacagtctgttcccccaggggcagtgaccgtgaatgatggcttcctttatgtttgtgattatggtggctacaaagtgatgctggtccattgagtatgaccaaaataaaatacaaatattctttctggccattaatgtcaatctatctccactatacttagaggtttccctttctaagagaagaacatcatgcaagcagaatttccaagttccacctggctcactgtcatgaaaaacaattcatcttctggaaggggccatccaaggctaactgggcaacctacttcctctttgaaaatccatatttgactcctccaaagcctgatcattgtagatgggatggagaagggaggtagggcacagatatggcttggtattgatggcccaagttgctggaaatggggagagagtggggatcccatcctggagatgaaaaaggtgagactctgaggcctggcagagtcctgctggccctttaaggcctcatggccaggagatcacagcttaggttggtaggtcttggttctaatgagaccaagacaattggccccctggactggtgagctttgtgatattttgagaccaaagactatgcactaatcttcagtgctaagagattagcgcacagtcttcggtcttaaaatagcataatattggccggcagcggtggctcacacctgtaatcctagcactttgagaggccgaggcgggtcagctgaggtcaggagtttgagacaagcctggccaacatggtgaaaccctgtctctactaaaaattcaaaaattagtcaggcatggtggtgagcaccggtaatcccagctactcgggagcctgaggcaggagaatcacttgaacccgggaggcggaggttgcagtgagctgagattgcaccattgcactccagcctaagtgacaagagtgaaactccatctcaaaaaacaaacaaacaaaaaaacccagcacaatatctcaggatctggctggcccatgtacgtccttgattgcaagggaacccaagacagatgatgaacatgaatccatttctgccagagacctccctcttcttggtatacaaatggagcacagtcaacactctcttgactgacgcccacattactgacgggacagtctaacacccttcattccttctgctcactgatgctgctggcaggcttaagactagagggtggcaggttacttccagaacactcaagtccttctgttcctatggattgagtcacatacaaagattagatgtatttacttctgatcctgcttgtgccagttagctgttcttggtatttcaattacacggtttaattaagtatttcataaaccaatgaaatatgagtgggaaacgaaaactttttttccatgaaatctaaattgagagcttcaagaaagacttaataaaaataagcaatactaggctgggggtggtggctcacgcctgtaatcccagcactttgggaggccaaggtgggtggatcacagggtcaggagatcgagaccagcctgaccaacatggtgaaaccccatttctactaaaaacacaaaaaaattagccaggcatggtggtgcgcgcctgtagtcccagctacttgggagactgagggaggggaatcgcttgaacctggaaggcggaggttgcagtgagccaaggtggtgccactgcattctagcctggtgacagagcaagactctgtctcaaaaaaaaaaaaaaaaaagcaatactgctactgaatatttaattattcaatagaattattcaaagaaacatggtaaaagaaaaaatggtaaaaatctataagttctgcactcatattatttgacaaatacttacatacttatgttcttagtactctttaaagaatcctagctgggatagcctgtcttgacttcatattctaacttttctatgaatttctaaaatttggttatatcacacatttagggatgaggatggcttatcatttaattcatatcaacaaacactggtttagcacttgccattcccacaattctagacaaggccttgtggctgatacagaaaagtaaacttttcaagctaaggaagcttttcttttaaactaagatgaattatttcttttgtaatttcctccacttcagtttttctatttagtttttttctatttcagtttttctggtgcttcttttagtttgatattggatcttttggtttgatcttctaattttcttttttccttcttgctttctctatcttattttatgggagattatcttgactttatattccaactcttctattacattttaaaatattggtatcctacatttaattttcaagagcagcccctgctcatgagaaggtgtaattggggagataacatttatccttccataggaggcaatgcaagcctaacatattcacataggagatagatggtgtggaatataatgatgctacagtggagagttgggctgactggataagtcctcataaaaatgtggattttgagctgaaccgaaggactaaaggacaggaaggatttatataggtatgtgcgtggggtggcagagagataatatccttgcagagataagagaagatattgtatctatgaaacaagaacaaatggttattaaaaaggatataatcttg

SEQ ID NO: 1879725 - DNA, 4001 bp, Homo sapiens
gtggtcccagctactcgggaggctgaggcgggagaatggcatgaacccgggaggcggagcttgcagtgagccgagatcgcgccactgcactccagcctgggcgacagagggagactccgtcctaaaaaaaaaaaaaaaagaaaaaaaaaaaaaatgcatgtccagcctgggttggtgagggaggaggggcaaggagagagagactgaagaagaaaggaaaatgttttatattttagttctttttaatatcacttctttcctgctttctgaacaaaagggtcctgtattttcactttgcactgggccctaatcaaaggttagcggctataaagaatcgtcttctcagattaatttaccaaaagggaagttgacaaaaaaactctatttctgcatcactcatttcaggtcagctcatccttgtcatgttagggcctcctgcaacatgtccaaatcttaaatacaaggctgtgaaattaatgctgaatttggggtttcggatgcgaggaagctccttttgggatatgattatcaggaatgctgcgtggtagccatttccttcacatactttgctgtaggattaatttatacctctttagaatgacaatgaggcattttataaaaataaagcataatcaaaacattatgtacaaaatttaacagacaacaacaaagaaagatgaaattttactaagagttctgtttatttcctattaaaaagggtaacaccagaaaattggacatacaaaaacatacttgttctcctaatttgaataaaccaactgtaaaatcaacatttttgagacaaagaaatgtgaatataggctgggtgttatttgatattaaagaagtattgttaacattgttaggtatgataatgacatagtatgtaaaaatatccttcatagatccacatgggtatttatgagtaaaataacataaggtctgagatccatttaaaatacttctgcaaaagaagaaaaagaggtagaggaagaagacagaagaagatgaagatgagaaggtggagcagaaaaaacatgacaaagaagatgaaggtgacgatgaggacagaagtagagagaaaaaagtgagatagatggaataggattgaggaggaggactggcaaaatgatgagtgatggaataggattgaggaaggggactggcaaaatgatgagtgatggaataggactgaggaagaggacgggcaaaatgatgagtgtaggtgatggaaatgtgaggactcattacaatattccctataccctcatacatgtttttaaattcccctgatcgagtgtgtgtgtgtgtataaccattgcctaaaaaaatttctcataaaaatcaaagagcatatttcacattctcctccataccaaatgcctctttttctggtgcaagaagcatcctctgaggctgacaggaattctctaagctgaagagatacaaaggagttgatgggaaggataatccgcccatcggttcctgacacaatataaagaagaaaagaagaaagtgggtggaagcgactgccattgttactctcctaacctttccttctaattatgccagagccaaggctcaggtcacaaggaaaattattttggtggttaaccatttgccctattttgtatacatcaaaaaagctgttgttctcacacattccaatctcacagtttcccacccactttaaaaatgtatcaagtggtcagatgaactaaaatatgaataaaatgactatattatgaagaacaccttgtttgcaaacctacagatagcctgcttgtgatgctgaattgtaagatacacaacacttaaacatttaatctactttatattattgtaggtatttcagataaatgctcaacatgccccgcttttaaaagttaaatgtaaatttctctcttgagtgcagatggtggccaagcaaagtagttctttggtctcacagacagaaggtcaggtcatggctgaaagaccaaagaacaattgctgctttgctactccaaatcatccatggaatgagacaccacgacttcttttctgaaactgtctgttcaatacaaaacagttaaaaagagtacctataagatttcctcacattccgtctgggaaaaaaaaatggtaacaagcacatcacttcacaacacatcacaaacatcttgtaactgttcagaggttttattcctaaagctgtgacctcctaaaaaggcacatctctatctaaaaacataccactaaacgtcattatgaaaactactattgtttcactattatcagaaaacgtttacaaatgaaaactgctccttgtaaatcctgcaactttagcctccataccatcacggattaattaaaatgagatttaatactgcaaatacttctaatattgcaaatgcttctaaacaagttattcctttacaagtgatattatactcctattgtccctgatcttttttcctctagaaaattataatggaattttaaataactgagactctttcctgatgtatttttgcagttagtccaaaatattatgctgtcagaatgctgtagaataatacgaaaggccaaaagtatgccaatatattgattcctttttaaaaaattacaatatatcaggaaagaaaagttatctgtgataaacttagtagacctaggccttcagtccctgacagaaagcattttccattccactatcaggcacgcccccaactggatgcaataaaatgtttcattatttgtacatgttaataattaaaagtcttctgaaaatgtaaaacccattacaacaccaaatatagtggtacaaaagcagaattttactttggttgccaggattttaatttagtactaaggatttcagttatgacttgaaaagctttttgttctagtcttcattatcactttcattttcaatacttttcccaattgtctttgcatcatttgttgtaaagacttcattggctcaaaagagaaaatatgttggaaaatatgatgaaaaacctcgaactagaaacatatttgaaaaaaaacttatttggagcgacctacttctaaattctaaaacaattattttaaaatattgacactaagaacccagtcttactattttaattgaataaacaacctgctttcattgaatacaaagaatgaaaaccttcaaggtcctgtactgtaacataaaaatagaaaatcaaaagtcagcctattagaactgcctctctaaaaactttatccatgttgtcaactaaaattggagttatctacttcatctcaataaagatataacataaaacatctgttcaaactgaaattaaagtacgcagcttttatccactaacatttctaatgtcactgtatttaggcttcatgaacaaacgtattcatggttatcttagttaaaactggtttcactctgccaacaatcaatttgattgacatatttacatatcaactcatctcatcttacgaattttaaactttttcatttaaaattggattcaagttggcatctttcaagaactttatgtatgtatattttaggttcaaactgtgcattagaacatttctttttacttttgtaagtaatagatacacatatccaaatgtatatttatgacctgtcagattggaattttatatgcatgctgttgtattctcaccattcatgtgaaaggtgataattttaggcaactataaaagaaattttcctaacagtgtaaactggatcatcccattagttagaaacaatacaaataaataaattaggaataaaacaacatcaacttgagaaagaatgttactcatatctataattgctgcaattatgctgtgtcctctcttacctgatctttaatttcaagatccctgttagtttttgctctgaactctctgtgctccttttctgcctcatccttctccatgttggttttattcagctgatagcgcatttctccacacacctgttagattgtaaaaaactggatgattacctgctggaa

SEQ ID NO: 1879726 - DNA, 4001 bp, Homo sapiens
ggacatgcgctcttactgggggcactattatacttccaacagtcaagtcacctcactcattcacaacgcaggccagctcacaagtctggagtctctgatcaagactcttgtgatttattcccggtattacgttaggccagatttcctggtctgccagcaaacagaaggccaatttcttgctcaatggtttaatgcgtcaactttgactatgtgttgcccaggtccccctcaactgtctttggaagcaacgctcagagctcagtggtcccacccactcacttcactgtttgtacacatttccatgtgctctggggccagcctgtggtccaaacttaatttgacaataactggcccatgcctttagaattttttcttttcctctaatgcttccccactcctgcgatgacctctggccaaggtgggagtgacaaccagtcacccccttacccggtctttcatagtagaatgaagaacacagttactcctcggcacagccttctgtagtgcctgaaattatgatgcccagttcgctgataaggaaaatgaggcctagaggggtgaagtgacctgccccaggccacaggagcaccagggacccatcttttcagttcaatcccaccagcccaaggcccctttctctggcctcacacctcatactaggtcttgaatatctacaactccaggctgccatttttcatgaattttaggttcgtttattgcacaaacatctatctaatatctatcatgagccaagccttgtgctgtacatagtgaagtggaaagtccctgccttctcagaagaggcagataacactgaagacaattcgggggtaagtgctggggcgggggggggggggaatgagatttctggcttcctgttgcctccccaccgccatccctggactggacgataaactacctgtgagaggctgtctccaaatatggctgccaacaattcctccccctactaaacacgaagccactcctcccagtaagggggcgtctagattcaagtttggaccacaggttggcccaagaaacatggacaacaacagggtgcaggggcgggcactgaactctgagtgtcacctgattcagtgggtcaggacatgttgagtgggacgctggataacccaccattaaattttccatgctgaacagctgagcaagaaatgggacttctcttcaaggataaaacaaaaaaatcaagcccagtatattttccttttccttgaacctgatgaggaagcctgggatgaatctgagctggtgttgtgactggctttgaccaccacagaaggctgcaggggtgacactttgtgacattagagcccagcccttaagaagccttgcagtttccatttcaccatcttgggagctaattgccatggatagaggcgcagtctagactagcaaaggatgggagatagcgaggagcgtagggggaccagccttccagccttctctatgagggcctcaaagatgtatgtgaagccacgatggaatttccagcccaacctagctgagtgcagcctcctgagtgatcccaactgacaacccggggaacagaataagcacccagctgagcccagccaatccactgaatcaggacaactaagaaatcattattgttttaagccagtaggttttgtggtggcttgctaaagataagtgatatgcttttcaggagtggagtcctgtactttttgtagctctcccttcccttgcctgaacccctgaaccctggcaatgggcactgaatcctggagctggaagaggcctccaaaatcactgagtctcacccctgtcattttatagaagagagagctgaggctcgggaagccatgcaattgactccaggtcacacagggtaacaggggcagatccaggaggcaaactcaagcccttacaggggttgagcaccaagggtacgtctccaccgacttgcaacacaccaagacaaatgtatgttgcaagtcagtagagaggtacccctggtgctcacacattctgtcttaagaggcagtcactccagccaactgtggccatgtgggaatgtgggccctgtgaaaccagattgtctgacttttcagaaacgccagaaacaggacttttctgtaaaatctcttgattttcaaatgttggctaagaatttgaactggatagatgagctattaagattggccctgggcttcaagcttggtcccgctgctggctttgggcgagtcatattatctcccagacctcagtttcctcatctctaaagtgggccccgtggctcctgcccctttcaggatggctgtgaaggcctgatgagctattgtatttggaagtacaagctgcaaatggccctgtgactgtttcgtagtctccattctctgtggaggcgccccttacaacataatgagttaacacccgatttgtctaagttagaacaacattattctgaccattatcacagagattgcatttttatggcaggtttgtgagttgtagaaccctcccattgcattatctcaggatgttgatggagctggaagctggacagctgccttagagaccctcatcagagccaagcctttcctctgagcagggaggcacattctagaagtggagaagagcatgagctctggagtcaccagacttgggtttcaatcgctgcctcaccactccctaggtgtccttgggccagtcactcctctcagagctttggttttctcatctgtaaaatgggcacaataatacaacgacctgtggggctcttggggcaactgcacaaggcaacacacataatgctgttagtacaatgtctggcacaagaattgacagctgctgggcgcggtggctcacacctgtaatcccagcactttgggaggccgaggcaggtggatcgcctgaggtcagagttcgagaccagcctgaccaacatagtgaaaccccatctctactaaaatatacaaaaaattagccgggcatggtggcaggcatctgtaatcccagctactcagggaggctgaggcaggaaaatctcttgaacccgggaggcagaggttgcagtgagccgagattgcaccactgcagtccagcctgggcaacaagagcaatactctgtctcaaaaaaaaaaaaaaaaaaaaaaagaattgacagccattcccatgatcatggcagggaaggtggtgcctggcaggcactgggcaaagaaggagggtacagccatgaaggagtctacccctttcccagattagggaggctgaattggagtggggagggggcctttgagaaaacctggatggtaccctgagtgggcaggctggaggggcctctcagctacttggcaagccagtcagacccttgccctgtaaggctcagaacacagtgggtgggggagagctggagatgaaaaacctggtacactggccccctgttcccctactgtgaattgagcttcccattggtagaaagcaaggatagcaaccgttcacatttattgcaagcttagcacacctgaggcacacactcagcttagtcttcctcagattaacacatccattgctcacaaccatctcaagagctaggaacaatgattacccccatttgaaagatgaggaaaccaaggctcagagaggtgaaaacacaagccagaggacacacagtacggagcagtctgactccacacacatttcctgtaacccccaggctctgctgtttatagaacaggagagaaagtgatcagggctaagcaaagcctctgtaggacttcagagaaagggacaagtcattctggccaggggcacgagggtgctgctgacatttaatggttacggaaactaataaagaatggacacagctgagtgccaggcagttctgccagtcatggtacacagcatctcactgaatcctcgccatgagcctctgacacatgcgcggtattctccagtttccagatgaggaagctgaggctcagagagtggatcacttggtcaaggccacacagcaggca

SEQ ID NO: 1879727 - DNA, 4001 bp, Homo sapiens
attcagaggccgccttcaagaaaaagcaacatggagaatcccaacccagatgacaacagggacaagccagagagatatcattactccgcacaggtacatgttgaaaagacacagaaacaccttaagtgactccttcccccctggagtccagcctccacctcactccttcagtctttccaagccagctctggcgtggacagaggccaacctaggcaaccataggaaacgaacacaaggatgcaagcagagaaacgggtccagcttccggacagtaacttttcagaaggagctatgtgcctcaccccagcttccagctgactggaatggagcggtgatggcagcggctgcagcagccatctcaggatacaaggtggaagcaacgtggtaagaacagcacaatggtaagacagaaaaagacgggagcacagtgatggtggagctccacgccagccctacaccagctacctggatttttaaatgtgagagaaattaatggccatcttgtttaagacagtgttattttggattttcaatcactcacagctgaacaaaatatagcctcttctgtccattctcccatcatctccctcccaactactgcagcagcctctcatttgcctacatctgggcccactccaattaattctccacattactgcccccatcttacccaaatacacccatccttgcataaaacctttcaaaggcttcctgacgctttttgatacagataaaagtcctcctcatggcctgaaaggaccttgttttgcatcagggatggcttctcagcctggtggccttccttaggactctgggcacaccatgccgctggccccgggcctcagctcccatggccctctgcccaggtctcccctcccctattcacccactcagatcgactcgtgggaagcccccgccaacctccatcctcctgtgggaggctgcacctcttccttcccactccgggctggcaacagctgagtgtcccaggtaccatgggccttccctatgttcctgagcctctgagagggtggagaccacagcaggcatgtggtaccagatgaaggagtgagggagtaaaccaacgaccgccatggcctccaatggatgtctccagcagcccctagaaggcagacactctaaagcagggagagtgcagctttacaaacgctgaagggacacgtccacaggaggttttctagcccatggatggatctcctttgctgctgtggtttccgcttctgcatggacatcctgcaagcacaggccaggcactttcttgcagtctgtaggcccacccagcctgcagggcccacgaggactctccaccccacagggcagggctggatggaacccacatgtggcttcctggactccccggagcctcttccatgaggactgaaggactggacatcttacaattgttcccttgcctaggactcagccttggggcctgtgagaaaatccagctccctcaaaagaaaactgtgtcagccagtcctgtccagctggagagtccgtgggaagggagggcagactgtctcgtgagaagcagcaccaggatacaaacacactgcccgaggaggcatctccactctctctctgcccctggcacagacgcaggaaaaagccacagctctgaccttcagggtccaactacagtgccagtgaaatttctctctgaaggatggggactgcgtcaggatcagagcatgcagacgcagcagagaccacccaccgagactgatctctgcaaacgaggaccgcacctcactgcaaggaccaatggggccacgtgctctctgcaaccaccgctgggtgcagcccaccctccgctcaggggcacaggaccctccgcccctcgcacttctacccgactgctgccgtctcagagccggggtctcagcccccacccagggcaggcttgagcggcctctccatgaggacacatggcatgggctgcctgaccggcccccaccatgtctcctcaaggagaaaccgggcttgtgctgtagacaggaagcctctgacactgcgccagcagacactcaagaaaactgccaagggaagacgtgtaaaagtttagtattttgttcaacaatttaaaaaacagatataataccagcataaaatattgcatagcaaataatagattatgtttgtacaaaatccagtaagaaaaacataattttctcatttaggatgattcataaaatacattttgagcaacagcgataacgagggtcccacatgcgtagatggcagcaccagagccagacccaccaccacggagttcgcgctcacggaacccaggcctgctgggtgtcagcagcagctaagctggatgcaggtactacaaaatgaccagcgctcggtctctgcttcctcagccaagtgcacaggtcagccaggtgggcactgaagtgaaaggctgcagagaggcggggaggacagcctgcagggcaggaggggcacagacaggccccagctgggtgccgcaggaaggacgtcaccctcaagccctcactggtagatgaccttcacgcaaaatgcctcttcgtttttgtcctcatggtcattgatgtagatcaggatctcctcctcacccactctctgactaggcgcaaactgcaagccgatggtgtaggtctctccacccccgacctggaaataagcatccaaatcccagcatccacccccgggctgtcccacgctctcaccagcaacctctctgcatggtcgtgtttatttccaaggggagctgacaaggcaggggagccctgcgggtgcatccaaggcctgcctttgacttcagcgcccggtacaaggatgggaaccagtgctcagccagtgtgacgcgttacttggactcgaaggcacacttatttccgagactgagctgtctaacattaccatgaaaagccctgggcacaacaccctttcccacactcaggagaaactttgctaaatctccagctactaaagatacaacgggcccacccaactatgggatggtacctgtcaccgccctggggcttttggaagactgctggtgatttgaggaactcgctcctaaatgcaggctaactgccctccattcaggtccccgggtcttcccctaggagtcccaggcacagccccaccacacctggaaggagtcctctctgaaccgcagcagctccgggtggtcgctgtgcaggtggaatgtcctccgggaggggtaggggttggtgtaggtgatcctcttgttgacacccttcccttcgcccgcagccaacatgatctcaaaggcctgtggagggaggggacagggagacgctgcggccactcacgggaacagccactggcccttcctccaagtattccctgagtctcctgtgcaccgtgcacggggacccccacagagataagacagacgctctctggagcttccatccgggagagacacagcacaggagcaaacactcatgcacccggccctgctgggtcagaacactgtatccagtggtccgagtcacagggccgaggtgggggtcctgcagtgccctggtattgagcccccatcccctcagcctgtgcctgccacacatacagaccttggagatgagcggctggcggcagcagaggcacacgagccaggaggccaccagctggtggcaatccacgtccaccaggttgagatggacaaagcggctgccggccctaaggggcctcacgccaacatgcaggtcctgcaccccacgaggcggcagcacgaagacacctttggggtctgtcttcaagagcgagagaggcgggtcagagcacagcctctcaggatgtgcaagcaaggggctcctgggcgcctgcagcccaatcagccaggggagcccaaggtcatgggtggttccggggcggccaaatctgaggccacaaccaaccctgacatgactgtggccgcgacttgggtccacaccaggcaagtccctcctctcacacggcgactattccctaagcgctgc

SEQ ID NO: 1879728 - DNA, 4001 bp, Homo sapiens
ttctcctgcctcttcccctctgcctggccaactcctctgcttagatgtcacctcctccaggaaggcttcctgactcctccagttcattctgtgctcccctgtgccctttccagtagcagaggtagcactgaaatcaatattacccacagctgtagggtgcacttccagtctgcgaagctctttcctgttcattaacatgtttaatccttgcaatgactctgcaaattaaggataatcactccctgtacaggtgaagaaatggaagctcagagaggtgaagtggctcactcatagccacacagcaagtaagggagtagagtccgtgcatgacccctgggttcacagccccatccccaggcagacagcaggtgagcaggtgaacgtcccctagccaccacagcctacaccatccccagggacttacggcacactgcctgtgaagttgatgccacagaggtgctctgagctggtgacagtgtccccaaataggggcccatcagctggcacaaactggatgatgttggggggcaggccagcctcccgaaggatgcggtagacagcatagctggccagcatggcagtgtcactgggcttccataggaccacgttgccctgcccgggaggtgtttcagtgatgcatgaggatggcgccaccagcccccaacccccaccccaccctaccctacagcatggttgtccctcacctggaaccaccagactctgtgccaaccaggacatcccctacccgaccccactcctccaaggcgtctggccctatctccaaaagtccctgccaaggaggccacggcacagcccaatctgccccacgctctggccaaggctccctttccccagaagcctgcaccaaccggtcctgccatcacctaggcaggtctgttcttactgctagagtcactgagtgctcaccgggcgcggcggggcaagtacacacgggctctctcagcacatgtcctgggtcaggcatgtgcagcagccaggcacgtgggcgcctggccatgcaccgtgtttgtctgtgcacagatgcatgaggacgtccccatccatgtccctagtacacactccggcatcagcatccagtgcccctgtctggggctcggggttcccgacaactatgtggacctctcccacccaggctgtctgggagctgggctgcacctcccccacaggcctgggacttcatccagtaatagccaacctcactccgataatggcagaggagtgacttgaataccatcaaccccgagagagactacatccaaatctttctctgctccatcatttatttactagtcactcagtcttgccaagtaagtcacggctgtgtgtctcagttttgtcatctggcaaagaggcagagtcacaactccctctcgaagctgctgagaggatgaaatgagatcatctccatgccgtgcttgacagcagcaggcacgtggtgagcactgaaggtcagcggtaatgatcatcaacagagccaccaacactcagccagctccgggccagccctgcctgctgctggatgtgtctcatttgagcctcacaacccagtcatggaggctttcctattatttccactttgcagatgaggaaactgtgcctcagagaagttcagggattgccagggtctcccaggcagagaggcacgacgctgggattcaaactgggtctctggtcccaaagcctacccacagccccaagctgcctccaccttctgtgcctctccccatgactaggctgagacccaaggggctcagggtggcctctgtctgtctgttgggaccaggaggacaaccagctgccgctgtcccacctgtgcccacatctcaccatcagggccggtgcccccgccaggttgccgccgattgcagtgaagttaaagggcgagatggccgccacgaagccctggggaaggaggcagcggtgagatcaggcccatggcattgggctgccccgcctgctcgcccactgcctcctgcaggtacctccagaccccggtacaccgtgctgttggtgctcgggggcacgctgatgggctgctgcccctccagctccaccgcatacttggcattgaaccggaagaagtcgatgagttccgctgcagcgtcaatctccgcttggatcacggtcttaccctgcaaggcagagggccgggggtcaggagcagccaacagcctcctgtccatcctcttctcacatctgacgctgtgcccaaagcgagcactgagccgggccccaggagggaccaggaaacatttggagggctcaccaggtcccatcccaggggctgagggggaaaggattctcaagcccctgagctagcacctcctgtagccggccctctgggctggacggggatcagaagaattttagtgatcctctgtagcaggccaggtacttgccatgcactgtcttcatttcatagcaactctgaatggtggtgcatggcaaaggatctatggtcaagcctcagactaaattcaggatcagagccttccagacagaagggcagattagcatgagctggagattggtcactggaaaaccaggagagagactcggtgtgtgggaggtggatggctccttccccaggaatgatgttcggccttgctggttagtttgggccaaaaaccaagaggcgagtgactgtgattcccttaaaccgtcaattcttaataacagcaaatgtgagctgcagggaaaagaactgtggacagccaagaacggggcttttccagattgacgtggcctcctcttggcacccaaggtcactggcaggtgcacgacctattagagacacacagcccatgaagctgagctaagatgtgtaccttgcttcctagaagttcctgagtcttaggccaaatacagagaaagcctaaactgatcctagactgtcttcccagcaacgtgcggctcaccaggaacacgcagagctgacgcccaccccagagggctgctgagccaatctaagaaggcatttagcaggctgaggggctgtcataccagctctgtgcagcagagggggcgctcaccatggggaccgaggagcaggcagtggcaaatgcctgatccagaaagcagcctgggttctggctcctgcaatttacccttcaggaacccaggttagttggcagcgtagggctcaggtcctggaggtggtgaaataaccctttctccctcgactcctgtcccccgcacactctgcctgctagagccactcctcactcaacttgcatttagcagggtgaggagctgtcatgccagctctgtgcagagaaaaccattgatcaggggcttgctatgcctcctgaaaggtatcatgcaaagcccagaaaaagaccgagaatgtcaagacatgtttactatgtccaaaaagcttgtaaaggggcagtacctaggaactcaatacactccagtgcaatctgagctgtaactgatgcaggaacaacatgctctggggaaacagaggcaggaatagtcctttcggctggagaaggctcaggaagtctcacggagggggtgacatctgggctggaccaggaggtaagagttcactgagcacggaagagacagcaggcattccaggcaggaggacacgtgggcagaggcagagaggatgcctgccatggccggggagtcctgctaagtgccaaatggctacactatgggcaggacagcttggcagggaaatgcagagcagtgggcgagctggacagaggtgggcagaagggccctgggtatggggctcaggtcttgggacttgcctctcagtggtggagaggtctgggtgggtcataagccaggagtaacatcctggaggtgttggaaagaccactctgagggcggcgaggggctgaccaagctaggaggcagggagacagtgcaggccaccaccagtccaggcaaagcatgacaaaggcctaggagcgaggacagagggatggaggagaggggacatttccgaggcaggacacatgggc

SEQ ID NO: 1879729 - DNA, 4001 bp, Homo sapiens
tctttaaacctcagcccagtgaggcagactttcccggaatacttcaggcctcttcaaaggcctattgtggaaagtgtccagatgtgcgtggaaaacctcactgggaagcttcccggtgaagaggccttttaagcatgaaccgagatgaaggaagctgacgccatgagtcctatcaggtggccttttttctgaaggagcccagattttcccctaaccttaagaaggttgtagggggttgggtgattagccagttcgtattcctttgattacaggaagcagtggggttagttgttttttgttgttgtctttcctttttttgctgaagtgagaagaggagatgggggtggggggcattctccatatgatttatctacctgtaagttgttagtgacagtctggtcattcctccagcataccttgtgagggccaggagggatttctggattggataaagttgaggcactgagtaagtcctgctagtttctatgatgatgcctctgagtgttctaagagtcagaatcccctggaatctggctctgatcccctgctccgaatccctgtttaagctctcttcccaatgccctgtttatcctaggtttgaggccccatcttcctcttgctagatacagttaagccagagagacccagatttaaatcctgctctctcattagctgtgtcatcttgcacagagtagcatcagcctcaccgagcctcagtttcctcatctgtaaaatggaggtaataccagtcccgtcatcatccagttgctgtgaggattaaatgaattgctgagttgccgcacacaaagcatctggtccagttcctggcacagagtgagggttcagtttattttcattccttttctctttaatccagttgtacaaagaggcagagctgtcccatttgaccagagaattttacttctgtagctctttaaattctctccccgccatgtacatatgggcttagctaagtattttgagatcacagtgtatttaggggaaagtccttttggctacagctaaaattaggcctctcttgtgctcctctgtttaccaccccccttcctattttaactaattagaggcattgacactaagaaacacttaagaaaagttggaagaacagctgggagttgttctagatacaagcagctgctccctgtcagcatgcaggcacagaaaaggatgatcctgaatggggaagtgcagggagggcacctcagagatgaagatgaggaatggcaaagtctgtctatgttgtggcaaactgagcagggtggagttcttatcactctgtcctctaccttctgctgagagaaaaggggggtcagagataccaaagcagatagaggaaaggggggcaagaaaggggaagggaaggaaggtattcaggagcttagctagttggttagttgattactttatgcagaccactgtcgcccccacctagaccactgcggtatctcctaactggtctcatgctgccggctgctttcctgctggaaccagagacgtcacaggaacatgcaattcttgcaccctgaaatccccgcgacgagcttccaccatggaatttagacagaattccaaaacccatcacatggcccccgagtacctggatgcaccttccccctgttccccgtaattgttactgctcagtcctgctggcttctgttcattcgctctgcttcaaaggactttctctcctggagccagattgcctgagtttaatccaggtttccctactcgctactactacttacaggcctctccatctcccttccagccttaaacacctactgagctcccctggaattccctgtccacgtcctacacactctcctcatggagtccccgggcctgtgcacccccaaataaaagtttctgtgtttccagatggccatggtgactgtgcataaagcctagcaaatgtgcatcaagccagaagacacgagacctttccaaagggctcatgtcttctggcctgatgcacatttttgtgtcccctgccccatctcctcctcactaccctcgggaaactgggtgatgtctctgtgggaagggctgagcctcaggctctgtattgattgtccagtgctgcatttaaacttcctgactggatattcagaacttatgctgttgttttgttttgttttgttttgtttttttgttttgttttgttttttaaagcaagcaccttcacatctcaggtgtaaatgccagatcttctaacacttacaaggacaaattcatttcttactaaatagtcaagcttaaaacccacatgactggctgatgtaagctttggccttgtctgtgaggaatttttgcaacattatttctcttgatttctttctttgttgctgctgttctcagaacaaggcaaggctgaggttctccttctcagttactccatgtccctgaattaagccctgtgagatctaaaaacaggagctctgtgcacacagccgtaaggacaaaccctcactctgcatccccctaagtgggccacatgcctaagcccagaaatctaagagttacttctaacaactttctctccctaacaccctcatctggtctgtcactgaagcatgttttctgcctcctgagcatctctcatatctgggtgataagagagccaccttgatgtcccctggcccttgctgacctcagcagagcctttgggtgacagtagctctggcttcccagggcccttggaaaggagactgtggggtccgcgtggtatggccctgcctgcctcttggttctgtttcacccacacttcccttcactcttatctgctccaacaacacagcctttctcattcctcaagtatcagttttcttttctttttctttttatttatttcagtagggttttggggaacaggtgttgtatggttacatgaataagttcttttctgagacagggtcttgctctggtgaccagactggagtgcagtggtaccataacagctcactgcagccttgacctcctgggctcacgtgatcctcccatctcacctcccaggtagctgggaccgcaggcgtgcaccgccacacccagctaattttttgtgtttttttgtagagacggggttttgccacattggccagactgatctagaactcctggctcaagcaatccacccaccttggcctcccagagttctgggattacaggcgtgagtcaagtgtcatttttcgtccttccgtatggccctctcctctgctagacacatgcttccccctccttcagccattaatacctgtgcatcccttgaatctcagctaagctatgacatacatgaagcatacatgcatatagacacagacatacataccattcaacctaacatgaggtgattgaggaatgccgagaccctcctctcccctctcagtgccctgaagcagcccctgggggaggggatggccctggtccctctgactctgacagggactgccctcccacagagagaggaaggcctcgggagctggttgtgggctcacctctgtggtactgctcttcctcctgcttctgagcagagaaggcctgggggccaaggtgcccaggggctgtggacaagatccttttatgctctgtccttgcctctaatgtgacagattattttgtaattacctggcagagataagtttggtttctgcaaataaactagcaaagattccaaggttattaaacacaaccttgcctcatctatctggtcatatccaaaaaccttaaaagaatttttgttcttctgaatttcactctccaaggcacaaagaccaggtgatggtggggcaggggtagagagagggatgggaagacttctcacagtgattcgagaacgttcacacacacatacgcacacaaaaaccttcactctccccctctccaaccccaccccactgactgcacacatgtcttggcccccttgagaatcccttttccatagacaagccctctgaggtaagaggtttaggcctccttcctgcttt

SEQ ID NO: 1879730 - DNA, 4001 bp, Homo sapiens
acagtgcttggtgaaacactatcaataggtaactagaaaacttagcagacaacaaaatgaaaatgtgtatatacttagaaacaaagacagttgaataagaaaatgataatcataatactcattactcagttctgagcaaaactgaaatagtcatataatatgcatacatggtattgctctaaacaaaaataattactgtattggaagaatggggagtgagatgtgtgttgtgatggtatagttagactgctaaatccttatatttcatagtaggaagtcaatgaatactccctcaaattgagaaactgtgaaactgactatagagaataaaagcagggaaaaacactcaaaaggcttcaaagtgtttctttctgaaaagtacatcatggaaaagctgacaaggtgaaggcaggggccagatggtttttgttattgttgttttacttgttcttgttttcttgtaagccttctaataatagctgatttttgagctatgtacaatcattattttggcaagaacattttttaaagaacaggtaatttcttctcaagaaatcatcttgactatagctgctacagctatttacaaaacgtacagtttttttttcagaaaattaaacattgaaatattagtatatatgtgatatagtcattcttttagcatttttacctttctgtaccacataggcttagaataagatcacataaatgctaatctgtggcaagaaaatatgggtcagattgtagtgtttcgctttttttattgtcatagaaaaattattcttacatgatacttgaggagtaggaaatatttattcttagaagttaattttgtaacctccaaattccatatgcctataaatatctagatctggaccagtttagtaaaaaaagttctatttttatatatgtgaaatacacatgtatattccaaactaagcaaaaataaaacattaaatttaataaagggttttacttgctctttactgaaaatgaatgccaccgggtgaatattgccccatttttttctgtcccttattccctgaggctattccaaaatttcaatataatgaagttaacacaatacaaagtcctctcagtggccgactcactctagagacattccacaagtatcctaaggagatgggggaaagatggaggggaaactgttattagtaagaacatattttctttcatttatttataaaaactttccaaaaagagaaagaaatcccactcaagcataaattaacttcagttcattttaaaagtatttactaaaagctgtcataaaaatatatcaaattcactttcttccattacttatgttttgaaaactaagtctttcattttgttgttctcctatttaaattatagtagatgtgtacaacatgaatagacagatgacagctggataataggcatcacaaatgcctctatgttcacatttcaggaaaattatgtctttcataagaaaattctgtgggagaaccaataatactgccagttcttcaggtagactttaaaaagtcttatcatatatttcaaaaccaacatgtatgtatttaatatttacttatcaacttctctccatatgccagtacaacgccaacttttttaggaaaatcaacaaagaccctcatctccaccttcccttcctacatcttagtatccccttccagcaagcctaatggccaagaaaaacagggttcaagttcctggctctgccattttctagctttgtaatcaccaacggattacttaacttctctatgcctgtttcttcagctgtacaatggggataatattatgctttctcgttgggcatgtaaagtacttggaagaatgctagtaaaaagtaatgttatatgcatgttctcttaaggagctaaagatccatgaatagatttcaacttgacatgcgcaaaaaatgcaatgtctaatttgagcacctttggtatttttgatgaataccgaaggtgttcaaattaggcactgcaattttatgcaagcagggaagataaacttgcagaagtggagctgagatttttagaagtttggaagggttggttagaatgatagagggcaagttttgtagctgccttataaggtcaagttcccaatttcttcagtcctggccactaccttagtgcctccacaaacacccaagatacagcagcattgacagcattgactaggcttggttcaaacactgagtcctttgaattattctctcaccaccaattcatttacatttcagtgatgcatcaggcaaggatacagatgaaccatgtcacctgcttcagcttgtccaaactaaataaagtagaacaaatagagtacaataaaggtttgaaaagcataaaatacagaagataatacagattgcataggattataaaatataattatacaggattataaaatataattatacaggattataaaatacagagatttgcatagcgaaaaagccttcctaaaatgctgagataaagattatgtaagtgataactggtcaaaaaataggtgaatatcatgtgacatgtagaggtggagtgggatgtcttcagaggttgttattcattccagagagaggaattgtccaatggcagccagaaggaagacctgaggcagaaaaattaaaacacctctcaagagttcagatgagaaaggcaggcacattaattagaagcgtaataattaaaatggactcatgaggacaacaatttgagccatctatgaattgaatcaatgagatctgtagtgaaccaagctttaaaaagaatttaataatccagccttgggtggctggttgcatgttggtaccatatttaaacacaaaaaataccagagggtaaatagtttcaaagagatgacaaaattaattttggacactgtggattgaaatgtctgctgaacatgaaaagacacccagtggaaagcagtctatatagttttagagctctgcacagagaagtaagacaaatatcatgatttggaaatcatcaacatataattacatttattgaagtttaaacaaagcaaactagaaatgaaaagagcaaagaaccaaggaagaatccttgataaaacataatttttagtgctaaataaaagaagggaagactgtaaaggagaactaggataagatgagtaggacataaaacaaagaagaatgatatcatagaaatcaagagaaggaagtttcaagaaagaggaggagaatcagaaaaaaaaaattgttcattggacctggcatgaaaaagatcatcagaaattttaagagaaacgtaagtagagccatagggcagaagaaagaatgcacaagatagaagagtaaataagagccaggaaagaaaagttcaggttaaaaatgggtggaaagcatggaaatatatagggtactgaaggtcttgatgatatgtaaaaatgaatcagtttggtgttagtaaggaagtgtgaacactgaaaggacaagttagagttacatggtgggatgttgccacgtaagtttccagaagtagagcaatcttggtcatactcaggtccagcctaacaagagggtgccaggcagaattggatataaaagtcaccaaactaaaggaactataaaggcagggtctggaacagggtattacctgggcaaagaatgcgaaaacaatgatactagcatctggaattaagataaaataaaataaaataaaataaaaagaatagaagctcccgcccaaaccctccataattgtggaggaatcaccaaaggttgacaaaacacagtgacaagaaaaaagcaaaggctgtaataaataacatacgcctcaaataaggggaaatgtaatggtgtataatttgtaagaagaggggtaacacatttccaaacctgtgatatatggggagcagtatgaaaatgagcagcttttattaaaaagattctaatgttacagtttgtttcctattcaaattaacaaatggatgaactctccttgaaaaaactgaag

SEQ ID NO: 1879731 - DNA, 4001 bp, Homo sapiens
cacagaaagagctgtaagggattctcaggcataattaagagaaagaaaacctaccagaagcaggattgaatagaccatggaagaagacatcttataaacaggaggaatttaaaagcaagaaggcttaacatatttagaccacaggaaaatttaattagaaactaatgtctattatctcccgcgatatattaaaaacagacagacaaaacaaaacaaaaagccaatagagaatctagaagtagtggaaaaaactaaatttcctgactggaaaaaagtaaattcccaattgctacctaaccactcttctttcctcccaatctcatctgacgctgattttcggtagaaagaaagaattgatgaattcaggctgggcgcggtggctcatgcctgtaatcccagcacttcaggaggctgaggcaggtagactgcttgagctcaggaattcaagaccagcctgggtaacgcggtgaaaccccatctctacaaaaatttgttggggctacttgaggggctgaggagggaaggactgcttgagcccaggaggtggaggttgcatcaagatcgtgccattgcactcaaaaaaagaaaagaaaagaaaagaaaagaaaaggaatagatgaatttatatgcttgatgttaaaatctaaatctctaaatgtctctctttgtcccaatccttaaatatgccttattcttaaaggtaaacctcatgtgcactttatgatcctcttatctaccaagatcagttttttgtcaagatagggatagtaaacatcttatacaataaatggaacataacataatctaattccttggtctatcttataaaaccagattcagtatatatttttttactttttgtagagacagtgtctagccatgttgcccaggttggtctggaactcgtggcctcaagcagtactcccatctaggcctcccagagtgttgagattacaggtgtaagccatcatgcccggccaaaaaaagtgacttaaataatttgcttttatagtacctagaaatgtacagtgggtattgaagaaaaatgtgttgaataaaaacttgcaataatttgccactagttaagttcctatcgccttaaaaagtacactaatttttattactgcctcacttatttgtgcttgcatcttctaaacaattcacactttagagtgactttaggcatattcctgtctggaatactgacacttttagattagagaacaagtttattcaaaagggtagtagtaggaagaataatttcagctttcctaaaatcttaagaattatcaaactcaattataactctggtgaccgctgaagaaatactgaagaactaactatagtcaaatctgtccaagttcaggtagagcatcataattaaccttgatttttcagatactaccaacccttaaaaaccatcagtcccatgaaaatacaagtcaacatatgaaagtataataatttaactaaatcttgattagacacatgcaccaaacacactgctacgtggtcagaataagcactgctaatccgtgacaatacatgacaatatggagggcttaggtcattacagaaaaggagaaagtaatacatgacagcatgtgacaatttgtgataatacaggggcttaggtcattacagagagaaattaaccgtgtattggataaatgaaagaattttaacttactaccctgaattttcttggagacatgactgccttcataaattgagatttacagactttaatatcaacatatgtaaactgataaggacacaatttaccttcactgccactagcgatgaagtcttcattatggcctccaaaacatgaatgaattgtataaaacccttgtgtaacaccttgatactttcttactaaaactctgtcttgcaagtcccataaatgaactccctgcaggcaaaggagaatacagatatttaatctgcctcaactcaaacaaattttaaaaagtatctgtaaatatccctttgcctgatgaaatatcttcattttctattatgcaaaataccaacattctgacaaatttatggttgattatacacatttaaggatcaatcacatgcaatcaaatttaagggtaagtagaaaattttgttaatataaatacactgaaaataacagttaaaataaaacttgtactaagccaaatttttcagaaaattatactaataaacatacctgagttgctacatttaacaaagctaatcggccattttttgaaatagtaaaagacataataggatgatcttcttgtactctggaaccagaaaataatttgtcaaaaacaacatattaacagtcaagacattcaaattatcaatacataagatgtgctagcttaagtatgacaattttgcctgcaatcactattacatactatacttcaattgagaagaatctgagttactgattactaagtaccatgtgaccttcaatccaaattaccacgcaaaccaaaacgaaaaacataaaaactgtgaaaaggcaagttccactacacatttgaatataaatcaggtaattgttgtttaatggaaacaaaaaatagttacatgttcctatctgtaaggtcctcgaagttatagccccgaattcgctggtgtgtatctgatgccagaacagtctttccatcactcaagcaccaaaggcattgcactcttaccccttcccaggagtcaaggagattaccatctaagtcctgagtaagaaaaaactactattaacttcattactcaacagcactcagaaagcaaataaagaaccaaaagactcccttcacaatatcttttagtaacaggttttttttttttcctgagactgatctcaacctaattgttctagaagtgtttttaaccatgaaaatttgaatatagttcaaatttcattacaaccatacttaagggaaagcagagagacactttgtagctctatcttcccttcaataactcaccatgcataaataacacaaagaaagaaacagtccctaagttccaagtaaggtcttacttttattcaaaaacaatttaaacgttcctttaaaattcactatactggaatttgtcctaatatttaggagttgtgaaatggaaaaagattctaaaacattttacagcttcatacagactggaggaatctgttaatgacatttttcaaaaatttaccaaatttgtaatgtgctctacagatcaaagctcttatagtcattatctcattgaatatccaaagttctgagaggaacaacccttcccattttataagttagataatcctgtatcttgatggcttaacacagtataggacagcaaactcagcagaaacatacatgatcatcttgcacgcagggaattaagaacaattcataaccatattgagataatataacaccaaaatccatgtgttccaaacgagcttaataaaagaaactgataacctgttttagctaaattaaatgatttattatcttgttttagtttaaaaaattgatctggggtcgggtgtggtagctcatgcctataatcccagcacgttgggaggccaaggcgggaggatcatttgagcccagaagtttgaagctgcagtgagccatgatcacaccaatgtactctagcatgggtggcagagagcaagaccctgtctcttaaaaaacaacaaaaaaaatgtggacgtgcatactgggaccatgtgagtctgtaatatgagacacagaatctagactacactgcaagtaacagagaaagttttatggcaaggtaaacaatgatttatgatataaatgatacttatgatataaagtttaccttgccataaaacttatttttatcattccaacaattcaaaataattagggcagctacttattagaagctgacacaaagattgaaaagtactctggtagcacctgtcaccacttttattattcaaatattaaagggagtctactcataaaattcagtgttttttttttttggttacaaaa

SEQ ID NO: 1879732 - DNA, 4001 bp, Homo sapiens
ggggtcattgtatatgtgttatatgtatgtgtgtgtgtatatatactcatatgtcatatatatggtatataaatgcaatttctgaaataatataaacctataaaaatgggggaaaatacgaaagaaaagcaacacaatttgcaagtcagaaagcagataaatgaatgacgggcaccaaagaaggctaaacctcataccagcagtgaggaaagccaaaaaccaacccagtttaccatagaaacctcaataattactgactgccctagtgcctatgaaaattaaaaagggcagtggggagcctcatacaaggagcactgggtgaagactaaaaattacttagatgcctagatccccacctcacttcaggttggaaggtgactgcccttctagagctttattctctgaagacagtaggagagggctcctagcctgggagatgctaacaactgttgaaggcacaggtacagatgcgatgctgaaattagggggattcatgaacatatctaaccactaagaatcctccaccccactctctgttcttcaactagatcctagaacactggaaaccattctcttaccaccctccagtcaagagattggaactcttttctctggaagccaactagtctaagagaaaaagacctaaagacttcatattatgaattccctaggacatggccaaccagatcacccgatagtgaaactcaaggtcaacaagtgccaaccatatgcttgcaatttccaaatcagtttagtctttccttcataatcataagacagccaggaaaaaaaattcttaatagggaagagctcaaaacaacaacacagaaaaaagcaaattagaggtaactgaaaaaaccaaaaattataaaatcctttgaaagatcaaaatccgaaaggtaaggtattgcatccatctataagaacagagtggtacaaaacacacagaaaacagagctcttgaaaaattaaactagtttaatttaaaaatattcattgaaaggctgggcgcagtggctcacgcctataatcccagcactgtgggaggctgaggcaggtggatcacaaggtcaggagttcaagaccagcctggccaagatggtgaaaccccatctctactaaaaatacaaaaaattagctgggtgcggtggcaggcgcctgtaataccagctactcgggaggctgaggcaggagaatcgcttgaacttggagggcagagattgcagtgagccgagatcatgccactgcactccagcctaggcaacagagtgagactcagtctcaaaaaaaaaaaaaaaaaaaaaaaaatcattgaaaacttaaacattacagcaaaaagtcaacaaaaggattaaaagacaaagcagataaaatttcaaagaaataaaaagacaaaaaaattaataaaaagcaagaaattaaaaggtgagcatattagagtatattacagaaggtataatatcaaataatggctggccaaagaaagataacagccaagtgcagtgtcatgcacctataccccagctacccaactacttgggaggctgaggcaggaggactgcttgagcccagaagtgtgagaacagcctgggctgaacatagtgaaacacagtctcaattaaagaaaaaaaaaaatttggcagggctgggacagtagctcatgcctgtaatcctagcactttgggaggctgagacaggaaaatcgcttgagctcagaagtttgagaccagcctgggcaatatagtaacacctcatctcaaaaatagtaacaatgaacaaaaattaaaaaggagagaacagtaaaatgcaggagaggaaatcatcaagaaaatcattcaaaaaaactgcctagaacagaaagacagaagttgctagaatgaaagagtctagcaagtaggcatcacaggggatgaaaatatatctacacaaggctaaagaaagagaacagccaagtgtactgtggatatatctgttctcttcctttggccttgtgtagatatatttcagagttaaatttctggatacgaaaaacaaagattcaagattcctagcagggcatggtggctcatgccagtaatcccagcactttgggaggctgaggtgagtggatcacttgaggtcagcagttcgagaccagcctggccaaaatggcaaaaccccatctctactaaaaatagaaaaactagccaggcgtggtggcaggcccctgcaatcccacctactcgggaggctgaggcaggagaaacacttgaacccaggaggcagaggctgcagtaagccaaaattgtgccactgcactccagcttggccaacagagtgagattccatctcaaaaaaagaaaagaaaaaaaaaagattccagagacagaaaagcaaaaaataaagaataaaacaagtcacatacaaagaatcaggaattggaagagctctggacttcacaaaagcaatactggaagcaaaaaaacaattcaacactgccaataaaatactgaaggaaaaacttccaatccagccaaactatgaatagaataaagatatttgcaaaaataaatacagatatttaaatgcagccaatctctaaaaattccatctcatgcacttgttctttagaagctactagagaatgtgctccaccaaaatgaaagtatgggggtggggaggaacctgagatgccaaaaacaaagaaatccaagaactacattaaaggagatccctagaatgggatctccctaggaaaatagctgtgcaacagatatagagggaaaccagtccagactacagcagtgttatttccaaagaaagtcatactgcaggctattatcattaagctacctgctaccgcctctctgtagtctttgaatgcctgagtgacccagactggattttaaaatctgtatttatcttgtttcaactatgtgtcaatgaaattccagctctcccttccatgtcttatgtgccactacctagatcagctaatgacatcattttatccagcagaaacattctgacctacttgtgaaaaataggggtaaatcaccataagcctagaatgagaatatatatagagtagtctgctactacgactgagcacactcccacataacatccactgcgaatgtgtcacatattctttttattttattttttttaagatggagtttcgctgttgctacccaggctagagtgcaatggtgtgatcttgactcactgcaacctctgcctcctgggttcaagcgattctcctgcctcagcctcccaagtagctgggattacaggcacccaccaccacacccggcaaagtttttgtatttttttttttagtagagacagggtttcaccatgttggccaggctggtctcaaactcctgacctcaggtaatctgcccgccttggcctccaaaagtgctgggattacaggagtgagctactatgcccagccaaatgtgtcagatattctaactgtagtggacccctaggtttatcagaactggcttatgacctgtccaactgaattctctagaggggcttttgtaaactctcagagaagctaaatctgaaatcagagtatgacttagaatctctattcaggtaacattctcagaaagccttcatctgagccttcttataaaactaggcttatgcttgttactcaatttttaaaaaactaaaaaacaggctgggtgcagtggctcatgcctataatcctaacactttggaaggctgaggcagatggattggattgcttgagtccaggagtttgagacaagcctgggcaacagggtgaaaccccatctctacaaaaactacaaaaaatagcctggcatggtggcacacacctgtagttccagctacttaggaggctgagatggaaaggtcgcttgagcccaggaggtcacttgagtcgtgatagcaccactgcactccagcctgggtgacagagcgagactctgcctcaaaaacaaaaacaaaacaaaaaaacaccctaaaaaaatgaagtaaaa

SEQ ID NO: 1879733 - DNA, 4001 bp, Homo sapiens
agagtttggtagggctcaatcaagtgctgtctggaaaaatgagaaggcattttcagttatcagaatgggaggtgccattggcattaagtgcctgagagccagggatgctaagtatcctgtaaaccaccagcagctccaaataatgaagaattatcttgccccatacaacaatagcaccccttgaagaaacactgatatagttcaatctccacgttttatagatgaggaaactgaggtcttagagaagggactgacttgctactaaagatcacccagttaccagtaaggcctgtttatactctccttcactgctttccaatatgggtctcctaagcctgtgggacatccagaaaaggagtccaattgagtatatgtcaagtactcagaatgctgccttgctcttacaatcctttgcacattttctctagccccagatcctcctcccaccttctgaaacctaggctggaggtgcaggtttggcagttttagcacagaaagcctaaagaatggataatgtcatcctggccaaatacataaaatgtgacagaactctgaggagaacaaacattaggaacctagtggaggaagaagaattggtaaaagaaaatgaaaaagtcagaaatttaagaggcaaggttcaggatgacaaaggggactaagtacaagttgttttgttttgttttagtaaaataattactttagcatttattgggtaactatgttgattgatacattgtatctactctttgcatcttgcttgcagacatcagactgacttcaatgtagcaagagctcattaaaacagcctctttccagctgggcacagtggctcatgcctgtaatctcagcactttgggagacaagaggcgggtggatcattttgaggtcaggagttcaagaccagcctggccaacatggtgaaaccccatctctactaaaaacaaaaaatagccaggcatctgtaatcccagctacttgggaggctgaggcaggaggatcatatgaagccgggaggtggaggttgcagtgagtcaagatcgtgccactgtactgcagtctgggtgacagagtgagaccctgtctgaaaaacaaaaacaacaacaacgacaacaaaaaaacagcctctttcccagtctcagctgaagctgtaaagctgtttgatacagttctgggcagtgtgacagatgtgagagaacagcatcaaagcccaccccttaataagtttgtacagggtaggtatatagaatcatatttggtactttaacattcctaacagactacattttgcaaaagaataacaacgaaggggacttgtcctacgagctagcacacatggtgtaaaccggagtaattacaagggtgtagcaggggtgtgcagaaatttataaatgtaagtctgtacagctatgggcgaaacaaaggaggagtggtcaggtacactttgaggaggaggcataacaagaaataattcataggtctttccacaacagaacctctagcaccaccttgctatcagtcctttgcacatttcctctagccccagatcccctctcaccttcagagattcaatcgtggcctgcttgtaaacctttcctccagaatctttcttctgagggctattctggattctaggcgttcgaatgacgaatttatccattgttaggggactccgactaccttgacgtgcttgcagcgtgttctggtcaagaaagagggcagattctaaaaccccactaaagactgccatgatattttttccccaaagtaacacaattgagttctctggaagaattcatgaattatggggcctcgagtggaattgacaggaagtaagattttctctttaaaagaaagatcttccgaagaattgaaactgtaatcaatcatcagtctacgtcctgagttaggaggttcctagcttccagaagtgcacgctctagcgaggattccaacattgggggaattggcccaatattggaatccccgctagagcgtgcacctaagccctcttccaaataagattgggctgtgaaagggttaggattacattaggctcagtgacgccctcttaacaaccacctcaccacagccataatcccaagggttgccctggtaatcagcaaccgacaaccacctccagaactcagcagagggtctcacaatacgcagcatcccctagaacaaactgctcggtggtcagaggaccctacccacggctgtaatctctggatccccgaacaaggagaaaccccatcctcctcgttcccagcactcaggagcccgggtaggggcacccaacaacggtctgacgtgagacccaccaggaaaagcagccctggtagctgctgttggcgccctccagactgcaacctcgtaggctcccaagcccagtcgtctgtgttgaaactaaacagacgcttcctcccagggcggtagttcctctgaagaaactccgccggccctcgcgcctctgggccacagcgaaccacattccccagaatgcactgcgaagaaatgcgggcggaaggcgcgctgagggcggctgtagttttccgagaccaactttcccgacagcaccgtgcgcctcccgcctacggagaactacatgccccagcctgccccgcgaagggaagaagtcaggaggccccgcttcgcgctaacgcttgcgatggttgaattcccctcctcacgccagcctaggagaagaagttcgtagtcccagaggtgaggcaggaggcggcagtttctggcgggtgagggcggagctgaagtgacagcggaggcggaagcaacggtcggtggggcggagaagggggctggccccaggaggaggaggaaacccttccgagaaaacagcaacaagctgagctgctgtgacagaggggaacaagatggcggcgccgaaggggagcctctgggtgaggacccaactggggctcccgccgctgctgctgctgaccatggccttggccggaggttcggggaccgcttcggctgaagcatttgactcggtcttgggtgatacggcgtcttgccaccgggcctgtcagttgacctaccccttgcacacctaccctaaggtagggcccgtccggagcgggctgcgacccttcccttgcagcccatttctcggctccccacacgtatgtcggctctggcaacctggctgttaaatcggcccttcaatcgctgtctcccatctgtgtagctcctgttttcctccctaatcctgcctgcaccccatttctgctgtcattaccggaagtttgtcctgcactaccctgtgataggctgggggacacaaagatgagaaagacgcgatccctttcctctgggagcttgccgggctgcaggggagtcgagcactcggaggaggataggggaggatatggatgattaatgcggggtcctcacctaagggagcgtaaggggggattgtagaaagggaggcgcagatacgcgagtccacaaatgattgattgataacccttgtttactaagcgcctctcggggccaggagcgcagtcttcggggagtcagacaagtagacgattccactgtggtataaaaagcgtcacgaaggcagctcagggagtagcgagacgctcaggaatgctgtctgcctatgttgagttactgtgtccaagacgctgccaagagggactgggttagagaagaggcaattaggtgtctgcctaccagaaactgaccactcagtgcagaaaacggggaattcgtggagtgggtgaagaaatgagactgtggacaggagggggttcgcagcttacagagaggaatggccctcctctctatgcttcccccctttcttttaattacatacctaaccctcttcacgttggtttttcagcctaagaactctgtttactcaacattctaaattgcttgatgattcccaccacacctttcccatgtatgatttgagtatatgccctcccccacgttgttttatgagagcttttgttgatgttgctggtggtttc

SEQ ID NO: 1879734 - DNA, 4001 bp, Homo sapiens
cattattgtcagcatgacagtgggcattgtgtgttacagagcaacgacaatgactgggagaataaagaggagagacattatctgttacttgtggttctgggttcacggtttttcaagggggataataacagaaggaaaggaaacaacattcagtgtctcctgctacacagtcccaggggacaccattctcagtcttccatgtgaatggcaattccttggagttgtacaatccatataaatgaaatgcacacttagaaatatacttgtgtttggtctgctacacctttaagatgaacaaatgtctttcttaactgctgtgaacagaacacttcatcatgatttactttcatgcaggaataataaaagcaaattggtaagcatactgctttttcctccattgttcccatcaaataccacagcttcatcaaagatctccaaggaaaactgtgttgttttttcttccctttaaacaaaatgttacccaaaggaaatgactgatagaattatagctaattggttttgtagtgctattcattatcatcacactggaggaaaactaatcatctcctttgggtcatgcgtctcacacaatccaatagcttccaggctgagaacatggagtcaaatcaaaatatcttcatttgttattttcaagccaattttaaatcttgattttgttccagggatattctatagctttcagggtctcaattaaataactgaggttctcagccttgctagaaattatataaactataaagtttagaaaaacttccagacataacaaagggatatgagtataatgtttaattggataatgggttgtccaaattcattttatcattttcaaaggaggagttgtgggtcttggaaatgtacaaaatgactcacaatactccctgacctagacttcttactattaaaataaagtaggttttcctcattgaggtcattgaattaaaacatataaacccagtttaatttagacaactgttggttttgccaccctcaggggacatttggagaaaattttgattgtcacaacttggtggagaatgctgcaaagtagatagatagaggccagggattctcctaaacatcctacaatgcacaggacagcaccccaaaaccaagaattatctggttcaaatgccactaatggcccagatgagaaaccttgaaacctcgattgattgcttttttaacaggtgttggaaaatcactttttaagcaaaaaattcacattttattaaggatattaatataaccctttcaggggtcctctaaaaatctttagcagtatcctctgattgcagtcaaataattattaaccagatgttttatttaagggctattcttgggtatgattctgaccaatttattttttcttttccaatttttattttaggttcgggggtacatgagcacatttgttacatggataaattgcacgttactagggtttgctgtacaaatgattttgtcacccagaaaaactttgattgagagaaaaatcagtaaattatcccaatttgtaattcagtcaataggttccaaactgttcttctatttgaattctccacccatccaaaatgataacttatcagggaaaaaaaatcctgtacatttcaacaactgcaatttttttcattctttgtttttccttccccaaagcaatattaaacaggccatcacacgtggcctagatatggagagaggactattcactcattatcaaacgtgttaacgtggtttttaaacagcagcttgcaactaatctaacaaccctcttttcctagactttcacattcagtgggcagtagagggtgtcagagcaataggcccagcttgaaaaccttatattctcataatgccctgcataagccatctcataacacacattaaatttgatgctgttttttttttttaacatctggctatctcatgagactacaagcactgttaggacatacagtctcgtgagatagccagatgttaaaagataacatacgatatatgtttttgttcaccactgtatcttcaggctctagcacactgcctggcattatagacatagaaaaaatatttaatgaagtgataaagattttaaaaattcattcctgagagtcatcaaccttatcttctgttctaataatcaactcttttaaaacatacttatttttaaaatatacaacaatatgtatttctggaagctccatcaagaagcaagttctaccttttctttgtaggtcctgacttctgataaagtaaatatcattaatttcccacataggagtattaagtgcatagtcctttattgcccttgggaataaatgttttgtaacataatgaacataagatgtaattaaaagaactaaattttgaaatatcttcacaaattcactttaaaataaaaacaaaatttgtagtcatatgtccttctctctcacacacacactcttaattccacttgagaaatacccaagggtttcttctacacatttggaggattctaactttgaagagtcagatctagctaaactcaagatattccaatctggtccactgcctctttctacataggccatgagctaagaatgattcttacacttttaaatgttttttaaaggagaatatttttaatatttagtagttacatgaaattctaattttactgttaatatttattggaacatgatcatttgtttacatattgtttacggctgctttcattttacaatggcagattaagtagctgcaagagtctgtatggcctgctttgctataggtagaagccagcggccctaatttatccccagatggaaacataatcccagtgtggtgccataatcctagtgtagtggttttatagaaatttcctacaaattctttaacaggtctaccctttggcaggtggggtctacatgtccccctgtccccactgcttaaatctgggtaggcttatgatggcttctactagtggagtacagagaaagtgatactacgtgactcctaaagctaggtcataaaaggacatgcctgtctcttggaacgcttactcttggtagctgtcagctacgcagctgtaagaagtccaagacacatggagaggccacagtcagtgcttagttggcagctccccagcttagcatgtcttccaagtcatcccagcccaagttgtggcatgaaccaagaaacttccagataatttcagcccccagagtagccccttgatgaagccatggacatcatgaagcagagataagccatccttgctgtgcctggtcaaaatcctgacccacagaatttgtaagcatgtttgtttatgccactaagttttgggtggtttgttatgcaacaacagaaaactggaaaatgcaggatcagctgaattccatcctaggatatacatattgaagcaggtgaaacaaagctcctaaatgtaggcactgcatctaaatcatcaaaattatcaagattgtaccctgtgagttgtaaatctgttgcaaagagatttcagggttcttcagaaaattttaatagctaccaggaccttacagtgtgggtattctcattttatatcaatgagttaagtgatgagcccaaagccacaaagtaagtggaagagccattcacttatacaaattcaaagtctgtgtgctcatgcactcgctgcggtgcctcagacaaaccaaacctaaaagaagctgcaatggtggcttgaaatattaaaatatgacaaatcacacaggctgagaatttctgttaacataatcaaacaaggcaaagagcagaatgttaaaaggtcctcaactctgggctggctgtggaactgaatcttccttgggattgcagggtgactggttgatgggagagcagccctggcagaggtgtgttttactgggggatcggggtagaatgtctgcctttgccttcctggttagggtgggccttcagctgcattcttcatcaatagagacagaaagtaccaagaatacaga

SEQ ID NO: 1879735 - DNA, 4001 bp, Homo sapiens
ccaatggttccttacaccccactgaggcaagcagaaactcagtcacatggcatgtgcatggtcctttgttagccattttccagcctcatccttaccatctcgtgtgcgtatatatttataacttgatgacagctgccatattgaacgacttttacttcctttaaaacaccatgttcttttgtcccttcaaggctttttatgtgccattttcctttactgaaatgcccttatcctagacttcttctcctcttttgagaaacccagtacagtgtgtgtgtgtgtgtgtgtgtgtgtgtgtgtgtgtgtgtgtgtgtgtgtatgtgtatatatacatatatataaaacctagttctaattactttctccttttttgcctcccattgctttcaggtaggattaactgtcctctcttctgagtactctcttcactttatttatattattaaattaagccttatcactgggccatattttcatgtttctaccacctatcacaaacctgacccacagcaggtgggttataaaatgtttttgctgcactgatggatatatccaatccaattcaacaaacacttacaagcatctgttacaggaaaaatccttcactaggcactttggaaaaataaattaggcattccccacccctaagaagcttacagtctggttaatagcgtaaaaagttgatgcattaggagaccttggtatttaaaaggaacagtttcatgctgtcgagaaactaattcattaccatggatttttctgaaacaagactttattaaagcaggacacaccctgctttgattaggcctggattagctgggcctaggttgggtatccactgtctaaaatttgtaataagtatcaagggagattgggagaccctaatccacattctcgcctcacagaacctggccattcaatattagaatacccagagccacaatgatctcttgagaaaaatgatggaaaaacttttattatactgatagtagttaagcctatagaaactggaatttataatcaaaagggcttcttcaaatctctgggaagaacacctgttatgaagggaattcaagtggaggtacgagagaataaaaatgtatatgtctttcaggagacactggttgactattggttgaggaaattgttatggaatgtattacaaggagatgccactcaaatatcctctactgtatcttacagggacgctgcctaaaattctttaagatggggcactgtataaatatggggctgcatgatggagagttctaacagcaacaatagggatttcatagtgctttagcaatctccaaaaaggcacattttaatataatttaatcctgataaagctctatgttctacgcacaaggtattgttaactcatttgacatgtgagtaaactgaaggtcagagaacttgttgttcttatccagtaccacacagcaaataactggtaaagctgaccggcgcttgtgctccgaactccgctggtgtggtggtgatacaagtgaagtcagaggcagtgggagctgtggccggaatagccacagttgaagccactgatcatgacagtgaagtggcacacagtggctgcgtggaaggacagctctgtccacgtggaggagaatggattagccaccttaaccctgccaggggaaaggaaggaactgggaggctcggggtcctgtgattctaccaggcaggggcttaaaggtcaaagacaattacacagattttcaggccatagatcattcctcaactacactgcccccaatccttgcctagctcaaacccaaggccaatgtggtagaggaagcaggggtacatatagtatccatcttttcacatacaacacactttattaactttgtttgtctgaacagcaaaatatgactcctgagtcttccagaagaaattgagagtcatctgaccaagaaatagcctttcaaacaatttggaaacttgtttgagagtgccattatctgggagagatgattctctgaaattttccactctaggctcttctttcttccttaggaggaaacaccagttgtggtccaaaaattcttcttgcagaaactggttttgttccatagagcccacaacccaacccaacacctcttcgccttcccccgcctccctcactcccagatcctttaccaccttctgccacctctatcattcctacctctactacgcctcctgctccttgaaggatccgtgtaaaaggtcagctgggggtcgttttctgcctctgtgccagaatccccttcagggttcaagaaggcggaaccagctgtaatgaaagcagcatggtcaagaaagcgttttcagttctggtttcatgacaccaaacctttgggcaagttcaatgggaaaatcaacaaaaatgaaagtaagctgactgataatctgggagaaatagccaagggggttggggcttcctcatacacggatatgttggagaagtagaccattgggacagcaatcactggagctctaccctgccccacccacttccctctgactagggccatttctggcacctatctgccagagaggacctccagggaaagtgggtggaataggaagaaagggaaatttccctcattacaggttatgattctgttaatatgagactatctaagaggtataggaaattacatctttgtgttttttctggctctagaattatatatatttaatacaaaaaagacagaatagaataaaggaaatgcacaaaactatgtaaagggaacaattctaatgccctctaaatcctttaaatcagagataaactctgctaacatttcatgtgtatactctctggcttttactgacacagaaacaggtaaaggttttttaatctctctttaaaaatgacattatgctgtatcttctattttataacttcattttttttcccatttaatagatgggtgggcaactttccatattaacaaatatagatctatattgtttcaaatggctgcatggtaagtgctggacagcagacagatgtgctaggtagttaaccaattccctgttgatggacatttaagctatttccaatttttcacttgtttaaacaatgctgtgatgaacggccttttacacacttctttgcacacttgtccaattatttcctaagaatagactcttgttggtgaaattacttggtcaaaaggtttgcacatttacatttttttggtaagtagcatttaactggcctccagaaaggctgtgccagggcataccctctccagccacgcatgagagaatgggtagaagatattaatggccctgcctctaccaatatgaaggaatccacccacgagccctaatgtcagacatgcatacctcttgctttgttgttgatccgctttctctggctgctggaggtgtgagagagaagggtggcttgctggtggttggagtccacagggctagtggctataatattatctttatacttgttcatcagtgacagcttggcattgtcacttcctgtataaggaaaagacgaggcaaaaactttaagagaaaagaccaaaagaaagggagaagaaggaaatctgcataaaccaagaagataaggtctcacagaattgaaataagacaccagcaaactgagagactggctgcaagaaactgaaatactccttttttatttctgagggactgcaaagttatgggagaagcagtgaagtcagggaactacaactgaaaatccaattcaactattattatattatgtattataatattctgtattgataaggtcagcacttgtaaccctttggctaaatacagactgcagatttctttatttttggtcagcacagagttttaaaagaatttgaatttgtgtgcattcaggcagaacatgccccttctctttcatcacagtctgcgccattctgtattgtctgacctcttctctgcttcaaatatctgtgttatctgttggcctcctaaaggcatttgagttgataataacc

SEQ ID NO: 1879736 - DNA, 4001 bp, Homo sapiens
ctgaccgggacccagctttctcccccaggctggggcagagggagaagagactgcagttccagaagccacaacaccccgccagcaaaacctcagtcctgccagacagcgtttaatttctgtgtgaaacaaaatcaaaacaaattctagcactgagaaaccggggctgagatcaactctccaccctccccgtggtctgcaaatcaacccagcccgagcccagcttccagcccaagcacgtctgctgtgtccctcagggctgcaacgccaccagggcccagctgcacccaggaggtggggcacatgccgcaaggatggcacgggtggcctgtgcagatgcccaggtgcctgccaggtgaagcatcctcgggcctgagagaaacacccccctccaccctgctgaaagcaccgtgtcccatggcagcccctggaataagccctgccctgtctgtgtctgcagcatccatggggtcccccaaaccagaccacagaggccagcccagctcccccaggctacttgggctgactgcccttttctggggcagggtcctggaccccagaaggggcatggctggtctgtgggctgcaagacaggcaaccaaggctgcacgcaggaccccccgggggaaaggtgaagagcagaagcttccaggaggcctctgtgctcagtgaccacagccccccatggccttcccagacagccgcagacccacacaactggtcagcaggacagggagagccacgcaaccttccagtggccaccagtgtcacctcccacactgtcatcccttctggagctcactctcctgtaggtgtcacagagggagcatcccaaagtccacctggctcccctccccaccccacagtgactccaggtctgcagcctctgtccccatctggccaggagggacgccggccctgacgttctccagctctgggaggctctggcagcagctcctcctgggccagacctccagcccacttcccctggctgcactgacctcaggtatcgctaaaaaaaacaaatgcagcctgcggcttgcctttttccatcgtcccatccggccactggtcctgaggtgctgcaactgccagctggacagctgggcttcctctggcgggcagcggcgcccagccagccaggaccatgccgggagggcaacaggctcctgggagggcccaggctgcaggtcacggggccggggcggcccagtgccacccaggtcagcaggcacagcaagaccatccccagccacctgccaccctgcccggcctggaccacggatgtgcttgaatatgacccctgaaggaaaaccagggtcacgtccccgccggggctgcactctgcatggctgctctggtggggccatcaacacctggcctatcgtccacacacgggaaggtgcggcagcctggcagccaggtctgcactgcactacgtctggccacaagtgtagacacagccctgccagagtcagagtcctgtaggacccggggctgggctgccaggtgaatgagtgacacagatccacctggcagggagagcctcaggcttgagggagtcttgggataggagggcacacagaatgcagcttggagaagaccccacagggacccttctggccaatcccagaattgagcgaccagggagagaaggatgcatctgaggagaacacaaggggaccctcctggctgatcccagagttgagcgaccagggagaatagaatgcatctgaagagaccccacgggaaccctcctggctgaccccagagttgagcaaccagggagagaaggatgcatctgaggagactccatggggaccctcctggcaaaccccagagttgagcatgcagggagagaaggaggcatctgggcagtcactgggcttcctgcaagaagcagcagctggggccgacctcaagggacaggcgaggccctgggagcacaggggagatggcaccactgtgccccaagggcctcacctgaccctaggggtcagccccatcagaggtcaacttccagccagaaggcatggggtctggggaacccccactcgtggctggccttctgggttctgggggcctggctcagtccccagtcccacagacactgctgcgggagccaccctggtcccagacaactgcaccggtcctgaccccgccgcccagcacaatgcacaaagggagcccgtgccgcagctgggatcaggtggcgcgaccgaggcctgtcaacaggtgtcgctttcccgcagcccccaccctcccacaggcatcacctcctccctgccccagggtccagagcctccaggaggtatccgtgcctgtgtgctctttcctaggggaagagtcacccacacgcttctttgatggccaaaccccagagcagggcacccccagcccgggccaccccagcagccggcggaaggtcccaggccagggcaggcactggggccctctgcagcctgcagcagggcgggagcaagatgaggccagctgtctccccaaccagacgtccgccggctgtggacaggacatctgctccctcagctgtggcaggccaggcactgctgctccgtccttaccacacaccctccacaccctccagggagccaggacccccaagcaggtggggcagggagaggctgggggttccaaggcccctgggtgcagagcaggaaggaggaaggccaccagcgcctgcaggggccatcaggctgacactccagaccctcccacttacggccccactgtcagggaagccaagcacctgggtccctctactggccacggggtcccagtccaggagtcctggagaaatgccccgactttccactggccctgtcctctcctctccatgctaagaagtccccagggagtcccctggcccccagggcccctcctctcagccctctgctgaggtctgccccactgagccacttccacgatctctcgaaacaaggcagctccctggcccctttcctccctgcccttctggccctccagagcactctgtgtggcctttcttcctgatgccaggccccacatgcttcctggggtgtcctaagttgttggagggggtgggtctccaggacagtgcctgcccaaacctaagcctgagctctcagctgctcccaaaccccccggcccacagtgctcagagcacccgacccaggccccagccatggggtcaccccagatgccgccttcttgccagctccttcccaggcttctcttgcccagcacacagccccatgattccacacctcaggcccacccctccttctccggccctgccagggacccacaggtgcccctcatccaggcagccagctgtgccccaggcctgatgcacagagaggcagagccatgggaccaggcagggtatgtcctgcccacagccagcagcctccctcttggaccctgcggggtctgatgttggcactaatgtgagaaacacatcccctccccacgcccatgacagcagcctctccgcagcctcctcttgagagtcccctgagcacccagaactgccccacaccaggctctaggcaacgggggatgtcctggctgcccccacccacccagtggggctgccagggtgtcgctggctccttgtgcaggggtaagagcgcccacaggctcacaggtctagagacaaggttcttctcagtccaaggagaaatccaaatatataaagagctctcataaactcaacaggagaaagacaagcagccccactaaaaacaggcaaaggagctgcatggacattctccaaagaagacccatggcccatgaggccacgaaaagatgctcagcgccactggccacctgacaaatgcagtcagagccccacaaggtgccattccacacccactaggatggctgcggtagaaaataaaacagaaaaccagtgtcagcgaggaagtggagaaaggagcctttctgcactgccggcagaaatgtaagatgctgcatccagaagggtttggcagggcctcaaaaac

SEQ ID NO: 1879737 - DNA, 4001 bp, Homo sapiens
tttgagtaataataaacccctgtcctggtccctcagctgcatctgcatttgttaaattctttctctattgtggaaagcctgctgttctcagctccattggcttatctgggcaatgggcagaataaacttaccaggcagttacactaataaaagagaaacacaaattgtaagcatgcttcaaaagaaatgttaagtctttgtatttcttttgaagaaacacaaaaggaggaggaatgataagacaggcaatacactgtcctaaatattttcatgattctcctgcctccttcatatccttcttatcccaacaacttctccccagaaaccttcaacttaaacatggtcctgccagaactgggtttgtccttcccttaacattttcctctcacctgccctacaccccttccaaatctaatctgttcattcacttccaggtcattgaggattttccatttaaaaatataaaaaattcataaagaggaagataactggtcatccatattcacacctcctggaattaactactgttaacatatctacatatttttcttccgaatcatttttaagctattgtcttttttaaaaaaaatttatacatgctaagcatagaccgtactaacagtagagaaaatgtaaacatatgtaaaatttttgatcaccttaagttcaaaaataacttctcataacattcgggcaacactggagtcatggtattgtgttatatctacagagagaagaaagtatattttagctagactgttccccccaggccccacaaaagaaaaaagaagaaaaaaaataaagaaggatatatatgcctgaaaaaattataaaattataaaaatatataaaatatatatttaatatataaaattatatagtatatataattctatatttaaaaatataaaaatatataaaaacatatatgtatgcttttataaaattgagcttagactctatttttattttacaaatattccacttaatagtgcatgaacttaactgcagacaaagagacagaaacagaaatgaaggaattcctgaactccctagcacagttagaaagacatttgtctaaacgactcctctaagggcaaacatacattaaattaaggagaagacattaagatttggagtggttttcttattcctttttacaaccaagttaaggtgtgagttgcctatggtacaatgcatccatttcaagtttgatgactattactctaaaaggtcctcttgtgccctttgcagtcagtcccgccctccccctggccccagcaattaatgatgtattttctgtcactatacaggttagttttacctgttctagaaattcaccttgatggcgccacacaggatgccctcttttcatcactcggcatgatgtttttgaggtaatccatgctatctcatgtttctgtaatgtgtcccattttattgctgggtagttggggtagatcgccgacacattctgccgacaagtcagactgcggttctgacctgaaggcctcggtgaacataagcaagggcacctgggcgcggggagagccgttcccctacagaaagcaagcgtgttgtgtctacaaccgaacagggacactgctttcatcccaaagaacagcacccgtctgcctagaatttctacctggctctaggaggtgagaacacattccccgctagcacagaaatcctacaaacttctgtgggggctgcggttagaagcacaggctgtgtgaaaggtgactccgggggctacgaaaaaacacgaaggttttcacatagggtgagaacccaagacactggagaccatgaagcaatcttgaaaaagcagccccacgtggaaagggaagagaagagcactggggccacttagcttgtgttaagcaagctcatgataggggcggagaggacagtaacacaatactttctctttcttatgcttgcgactgtaggacaacacttaacatgccagcaaagctacaaacccgtagaaagctaagtagaaactaagagtagcccttcctgcagaattcactttttgcactgcaagatttcagcggaaagcactaacgcagttctccactgttattgtgcagccaaatttctcccatttgggttaatcgcaggatcagcacgtccacagtgcaatggaaaagcaacgccctgggaaaacaaccttcataacgtcctctccgatgccaggtaattaggagttcacacgtttccgtcttgctactgctccacacgcctcaccctttttacacacggtcacttgccccgcgcaccccggagcccttccagccttgacacacagctgggactttcaggtctgaacagcggtcctggacttgctcccacagcacgggaactccttcgtagcgaagcagccggtggcgaagcagcagcccctgtgctgcctcatctacatagaagtcgccctatccgtgatgtcactgacagcgcctttcccgtccggctctgcttttccgccccaccttctgccactcagccgaccaacatgctgccagagactgcggggacagtgacgtctgcctttccttcctttccctcccttccccgccccaatctttccaaggaagcaggtgtttctgttgtagttttttgttttgagccgcagtctcgctctgtcgcccaggctggagtgcagtcgcatcatctctgcttcctgcaacctccgcctccagggttgaagcgattctcctgcctcaggcttctgcgtagctgggattacaggagcacaccaccaagccctgctaatttttgtatttttagtagagacggggtttcaccatgttggccaggctgatctcgaactcctgacctcaggtgatccgcccgcctcggcctcccaaagtgctgggattacaggctgagccatcatgcccgcccagaagccggttcttagcctgtgttgccgatgacctctttggcagacagctggaggctgtccacccttcttcaaataatggtttgtaatgcgcagactaaaacatgtaggattacacaagaaactagttctcttcccatcgttattcttctgatgtagcattctacttgaaattggaagccgttcagtatcagagagaaaccatatctatgaaactagagatgctgctcagatgactgcaaaccagccatccttacttgttttaccattagtagtgctataaagacggtggtccaatttcatgaatcttgtaggattttttcaaatacagcaatgtacaaatatgctgccccagcagagcacactggacactcaggcatggtgctggagtttgtcatctcttccatggccttctgtagaccgtagcacttacctcatgttagcactttatattctgcaaagagagaaacaagtggtccaaatttggagaaaaaaaattgggggaaattttatttgaggtgcttaactgattacttttaatttgtagaatacaatcccaaactctgacaatactccacagactccaaatctatcaggcaagtttttcctgtcctttgctttcatataaatcaaatcataaagtgtgtagtgggttttgggggagtataactgcgcagtgggttcctgttgcctgctgcctagacagaaccaatttatcaagacaggggaattgcaataaagaaagttgtttacccagagctggctgtgtgggagaccagagttttattattactcaaatcagtcttcctgagcattctaggaccagagtttttagggataatttggtgggtgggggacagtgagttgggagttctgattggacaggtcagagatgaactcacagggagctaaagcatgctcttgagctgggtcagttcctgggtgggggccacaggatcagatgagctggtttatccatctgggtggtgccagctgatgcatcgagtgcagggctacaaaatatctcacaaaccgatcttaggttttacaatggtgatgtgatccccaggaacaacttggggaggtttag

SEQ ID NO: 1879738 - DNA, 4001 bp, Homo sapiens
atatcctaatgaattgttttaaggcaaacacccttgctaccatcacccaggtcaagaaatagaactttgccctccaccccagaaactcctccatgtactctgtagcaatctcaatccccactctacccccaaagtaattactatcccgattcttacagtaattactctcttggaatatttcatacttttatcacccaaatacgcatccaaagacattatagtttagtcttgcccatttattttaaaaaagtgtcttttaattctcttttaatctacaggcttccctctactactttcttttcctttcaaatacagtaagatgtgtctgttgaagaaccaaagcatttgacctacagtttcccagagtctggattttgcagattgcatactcatgtagttgaatgtgtacttctgttctctgtatttcctgtaaattggcaactggatccaaaatttgattgtacattctatccctttgacaaaactataggtggtagtgtattctttcattaggaagcatatatctgattgtttctctgtgttgttagcagcagagactacatccagcgattctcaaacttcttagtctcaggacccctttacgctcttgaggattattggaaatggcaaagagctttcgattatgaaggttatatctaccaatagctatcataatagaacttaaaactaaagacattttaaaagattttccaattcatcaaaaacaataaatccattacatgttaacataaataatttctatgaaaaataattgtattttccaaaataaagtgggaagaatgccattgtttagcatttctgcaattatctttaattcaggagacagctgaattctcatatctgattcttcattcaaactttagcattatgttgttttagttgaagtctatgaagtacatcatgtgacctaacacagacatgtagttggaaaagggaagagtattggaattgtggatattctttttttttttcaagacaggttcttgctctgtcacccaggctgcagtacagtgccatgaacatagctccctgcagcctcaaactcctgggctcgagcaatcctcctgcctcagcctcctgagtagctggtactacaagcatgcactactgcacccagctaatttttctatcttttgtagagacggggtcttgccatgttgcccagacgggtctcaaactcctgggctcaagtaagccttcaacctcagcctccccaactgctgggattacaggcatgagccactcactagacccaaccgagtgtggacattcctttttttttcttgagacaggaggtttcttttttctttttttttttttttgactgagtctcgcactgtggctgaggctgaagtgcagtggcacaatctcagctcaatgcaacctccacctcctgggttcaagtgattctcctgcctcagcctctcgagtagctgggattacaggcgtccaccaccacgcctggctaatttttgtatttttaataaaaacggggttttgcggttttgccatgttgaccaggctggtctcgaatttctgacctcaggtgatccaccctccttggcttctcaaagtgctgggattacaggcatgagccaccacgccccgccaagtggaggtttctttttttattttatttttttgaaacggagttttgctcttgttgcccaagctggagtgcaatggggcgatctcggctccctgcaacctccgcctcccgggttcatgcaattctcctgcctcagcctcctgagtagctgggattataggtgcgcgccaccatacccagctaattttttgtatttttagtagaaacggagtttcaccacgttagccaggctggtctcaaactcctaacctcaggtgatccgcccacctcggcctcccaaagtgctgggattacaggcgtgagccaccgctcccgggccgacgtttcttaaaagttaggccgggcgcggtggttcacgcctgtaatcccagcacttgggaggccgagacgggcggatcacgaggtcaggagatcgagaccatcctggctaacaccgtgaaaccccatctctactaaaaatacaaaaaaattagccgggcgtgttggcgggcgcctgtagtctctactaaaaatacaaaaaattagccgggcgtgttggcaggcacctgtagtcccagctactcgggaggctgaggcaggagaatggcgtgaacccaggaggtggagcttgcagtgagccaagatcgcaccactgcactccagcctgggggacagagagagactccgtctcaaaaaaaaaaaaaaaaaaaaaaaaaaaaaaaaaaaaaagttagctggaatgtagaatttgaaaccgtctatcaatgaatttttcatactctgttataataaaatattgtatttgaatggatctcttactgatccattcaatggatccataaatgagtggattattatttaaagaatgcagaacatcatccattggtttttttggaaaaatatcggctccatgagttatacggccctttcaaattttgactttatataattccaaaaactcacctttgttaatattacctgtcccgttaaaaaacaaaaaaaaaatttttaatagtaggaagttatgaagcagatacaagttttctaaaattctaattttcacttgaaagcccaaattttatctttagaaacaaacacttcagttgttttccttgacgtgactgctgacttcattcgtttttgagaaaatgtctgtaaaatactcaagtatgaattaaccatcacatgtgtgccatttgttctctcaagtaaaatgtgtttcatgaaaaaaagtagttggtttagctcataatgcaaatcatctcttaagggttgagattcaataaaattaaccaatgttttctgcttcatcgaggtcttaagtgaaaattagtgcttttctttttcctgtgaatgcataagtgcatgacaaatatagtgactactagtttggtgccagtgctttgattcatgctaagatgccaacagtgttacccaccattacttttgcaccatcagtgtaaatgtcaacatacaatgaaaatggcaaacaatatcttagtattattatgaatagtcttgatctttcaggtcccctcaaagggtctcagagactaccccaaggactccacaaaccgtattttgagaacccctgctagatcaattcattggcagctgtcaaaaatgatggtaatgttctgtcatttctttttcagttattacttaaatacgtttgatagaagacactactcctcatctactatttaattatccaatgatacagttcatacaggaaaaacaataaacatatgattgtttccctttgtcaattttcaagacaatgagtaggttccctgttatcctccaaagactataattagttgatttttaaaatattatcacaaactcttgtttaaacatacctgatggggttttttttcttaatttttgatttttatttttttagtagagatgaggttttgccatgttgcccaggctggtttcaaactcctgggcttaattaagcctcggcctcccaaagtgccaagattacaggcatgagccaccatgcccagcctgatgggttttaatcaactgcaattactatctcttttaaagctcaaattttctcaactttggtaagtgagaactacaggttggctcctgaatcctttcggcatcactcaagtaggctttgataacttccttgcaattagcagtgacaaaatattctagactcacattgtacacttcctgccccatggggaataagcaatttctgcaaccagccatttcttctagtagaaaaagatattttaagatcacaatggtatggatgtaacagatttggtcattatttctaagcttcttcagtggacagagccagaaaaacatttaaagatgaaatactaattaaagtttatactaatactttttcagaattacagaattt

SEQ ID NO: 1879739 - DNA, 4001 bp, Homo sapiens
ccttggaacttacccatcaagtctccgctcataacgtccttctcgtgcatgaagtgacggtgggggaccataagcaggccctccaccacctcctctgaacccagaaacctctctactacgagatgctatggaaactgtatcatccaatccccgagcagcactcgggatggtgcctggttcattataatccgtgcgtaggtctctgtcacccattttgttgaccgagttgtgagctttctgtgcacttttgatgtccacaaaatccacaaaggcagccactcctccttcagatcccctcttgggaagaattttgacactttccacgcggccatatctggaaaaaataaagtcaacgttattgctgcatatcaataattttccaaaatgagtttttagattttttttggacaatttgcgttatgtatgtaggagggacgacctgcaaaatgactttttaaatggctctcttttacacttaacgtttttctctctggggaaaatatctgtatcgcattattacattactctcatttcttttttttttttttttgagatggagtctcgctctgttgcccaggctggagtgcagtggcacaatctcagctcactgcaagctccacctctggggttcacgccattctcctgcctcagcctcccgagtagctgggactacaggcacctgccacaacgacaggctaattttttgtatttttgtatttttagtagagacggggtttcaccgtgttagccaggatggtctcgatctcctgacctcgtgatccgcccgccttagcctcccaaagtgctgggattacaggcatgagccaccgcgcccggcccattccttaaatataatatttacaaaactccccttcacctttctagaacccttagctgaaatgcacttttttttttttttttttttttgagacagagtctcactctgtcacccagactggagtgcacttactgtaacctccaactcccaggttcaagtgattctcgtgtctcagcctcccaagaagccgggattacaggcatatgccaccacacccaactaatgttttttgtatttttagtagagatggggtttcgccatgttgcccaggctggtcttgcactcctgacctcaggtgatctgcctgccttggcttcccaaagtgctgggattacaggtatgagccacagcacccggccttgaaatacacttctcagaagtttttacaaatatttatagtctaaaaacgactactgaacctaagatagaatcaaagtaatttaaaaatctgtaaaacttatattaaaataaaaactatacatagctattttacagatttcattttaacttaattcattaagtgacaatcgtactggaaaactgaagtactcaaacactccttacttaaaggcaaaagtaaatccaaatatttttgtgtccatttgcaagtgacagtctaatttttttaatgtaatttttttgctacttaattttctttctccagggagttaaaactgttaaactttataatataggtacaattaaaattatttatacaggctgggtgcagtggctcacacctgtaatcccagcactttgggaggcccaggcaggtggatcacctctactaaaaatccaaaaaaattagctgggcatggtagtacacatctgtaatcccagctacttgggaggctaaggcatgagaattgcttgagctcaggaggtggagattgcagtgtgccaagatcgtgccactgcactccagcctgggtgacagagcgagactcagtctcaaaaaagaaaatagaaaatacatgagaaaagtgactagggttctaatcccgattaggttattaactatatggttttaaaaggcactgttgaggccaggcgtggtggctcaagcctgaaatcccagcactttgggaggctgaggcaggcagaccatgaggtcaggattttgagacccagcctgaccaacatggtgaaaccccacctctactaaaaatacaaaaattagcaaggtgtggtggcacacgcctataatcccagctactcaggaggctgaggcaggagaatcacttgaacccaggaggcggtgaggacgcagtgggccgagatccaccctgggcaacagagtcagactccatctcaaaaaagaaaaaaaggcattgttctaggagcttaacacatcctgggaacaaaacatagatccctagcctcatgacatttatttacaattttcagttcgttggtatgtgaaaagaagacccctcccattctaaaattgttttcatcaactgcataagaaactcactccataacttccaaagcatcaattacacaaagctttaaaatccttagtatgctaaaatccaaggaattctctcaatactcctttctagaagtgactacattcaacctttattggctaggctatcaataggaatgcaatgattaattttaatcttagcttttgcaactgacctaataagcaataggaaagaactgccacacacttcattctcacacaagtcatgctactatagaaaacaattctctctgagtcattcttgaagcaagacaacagaacaccaatgaaaataacacattcaaattttgcatctaatccctctttgcccagttaatttctagagctaaaaaatcacatctgagtcgttttatgatcattaacattactgttctatttccagggaatgagatcccatctttactagctctcaaagttttgaaatcctgctatgggagaaaaagttattatagaattgtaaatgaggacgagtgtcaagccttttgaagatgcaggcaaattacatagccacccacccaactaaaacccaatatataacttccaaaagatcacatttttatcaaactacccatggctttgtgtactgcctacttttccacctttccatcccatcatcaccacagctgtgccttattcaaaagcaaatgatcggctgggcatggtggctcacacctgtaatcgcagcactttgggaggccgaggcaggtggatcacctgaggtcatgtgttcaagacccagcctgaccaacatggtgaaaccccgtctctactaaaaatacaaaaattagccaggcatggtggtgcccgcctgtaatcccagctactcaggaggctaaagcgggagaatcgcttgaacccagaaggcagtgaggttgcagtgagacaagaccacgccactgcactccagcctgggcaacagagtgagactctgtcccaaaaaaaaaaaatcaataactatagacagacaaaaagcaaagagcaaataaacacaccataagggataagaaaaagtcatgagagatgaatatattcaagtttggctaggctacctgtaacagtagagacaacacgccacgtggtggcacacacctgtaatcccagtaatttgggaggttgaggcaggagcatcagtgaaaatggccatgagtgagtcatggccatgccactcacctccagcctgggcaatagagcaagaccctgtctcataaataaataaataaataaataaataaataaatacagtagagacaataaatgtttgtgctggttttttacattataaaaagattaaaatcattcctcttttgaactcagttaaatcataaatgtatccattacaaccaccaaattatgggcactaatgtagtaacattaatacttatattaccttttttgtaacaaaattttataaatgaattactaatttataattcaacccacgtgagtttatatttagaccaaaagggccgggcacggtggctcacacctgtaatcccagcactttgggagggccaaggcaggcagatgaccaggtcaggagatggagaccatcctggccaacatggtaaaacctcatctctactaaaacgcaaaaaattagccgagtgtggtggtgcccgcctgcagtcccagccactcaggaggctgaggcaggggaatcgcttgaacctg

SEQ ID NO: 1879740 - DNA, 4001 bp, Homo sapiens
ccatgttggccaggctggtctcgaactcctgacctcaagtgattcgcccgcctcagcctcctgaagtgctgggattacaggcgtgagccatggcgcctggcctatagttttttaaaatgtttataatcttcaatagcaaggtcccccaaagtctactgaagctagacttgactgaaaatttatatacacaaataagaaatgtgtgcatatagcaatgcgtgtgctaaaactgaagggataggccagacacagtggctcacacctgtaatccaagcactttgggaggccgaggtgggcagatcatttgaggtcaggagttcaagaccagcctggctaacatggtgaaaccccatctctactaaaaaaaaatacaaaaattagccaggcgtggtggtaggcacctgtaatcccactcgggaggctgaggcaggagaatctcttgaacctaggaggcggaggttgcagtgagccgagattgtgccattgcactccaggctgggcaacagagcgatactctgtctcaaaaaaaaagaagtgataaaactaatggaaattattctgtattaggaagaagatggaagttcatcattttaaagataaaatggctcagtgtgaaaatgcaacatattttataattacccaaaaattattttttctttgagaaccaagagatattctttttcacaaaaacgtgtatgaattttcccaaagtaaaatctaagttgaaatctcctattttgagtttaagcctgtggagctaacctttaccaatcttagttgccatccaaaatctctaattaaatttttctcaaaaaccaaaccaaaccaaaccaaacgaggcaaaaagaggcaagctctttactgccacctaccgtcagaaaaaaatagcccactaagtgtaaggataaatgacttgcatggaaaacttgaggcgtggacagggagaccatatggtctggtttgcagatagttcctgttgtcttgacatttatccattttagcatttgtcctgccccctttttctctcaaaaccttgatttagattacaaattatatggttgttactggctgtttccatacatcacttaaaatactcaagtcaggcttatctctcccatctaaatgcacacacacacttcttcaatcagagccctcttcccagctcccattctttctcgttctgatcttcatgaccaaacttctcaaaatagtaatgcacacaccatttccacttcattacttctcattcactcctcaactcacagtactctcccttctgctctacctattcctcgaaactgctagttacctggccactctcaaatcagcagacacatttctgccttgatcttgcttcatatgttgtcaacaggcatgagccaccacgcccggctaatttttgtttttgttttttttagagacagtgtttcaccatgttggtcaggttgtacgctgtcgtctgcactccctctgccatcttacatcttgtcttgggtgacacatcctcctgttttcctcctatagtctggattcttgtcaatgtcctttataattttaacttcctctgctcacacctaaatgttggtgtctcccttcatcatcgctctacagactatgcctgggtaatctcaccttgtgagttctactgcaatcaacttgctaaagattcccaaattcattgattcactcattcattcactgtttgttcaataaatatttatggagcacctacaaaatgccagtgacttctccaggttctgggatatatcagggaacaaaacgggagggaaaatttctgccctgtgtagacagtaagacaataaaccgcaaacaaaataaataagtaaattgaacagtatgtttaagagtgataagtgacacatggcaggtcgcagtggctcacgccattaatcccagcactttgggaggccgaggcaggcggatcacaaggtcaggagtttgagaccagcctgaccaacatggtgaaaccccacctctactaaaaatacaaaaattagctgggcatggtagtatgcacctgtaatcccaactactcaggagggtgaggcaggagaatcgcttgaacccgggaagtggaggttgcagtgagccgaaatcacaccactgcactccagcctgggcaacagagtgagactgtctcaaaacaaaacaaaacaaaaaaagagtgataagtgatacagaatagagtaatagagattggggatggtggagcagggttttttaatagaagggacagggaaggcctcatggaaaaggcaacattttagttgacttgaagaagaagaaggaataagctatgaaaatatctggaagaagagcagaagaaacaaagtgcaaagatcccgaggaaagaatgtacctgtcctattctcgggatggaaaggaggccaggatggttctggagcaaactgaatgagaaggaggggaatagaggatgaggttagaggggttcaggcctgcagatgacaacggcctgcagatgacaatggcctacagatgacaacggcctgcagatgacaacggcctacagatgacaacggcctgcaggccactgtaagggactctggtttccctgtgagagaacagaactggagagccatttgcagggttttaggtagagaaatgacatcatctttcatgtcatttaacagaatcgctgtcttaggtcaggttcccatggaaacatactctgaaacacgggttgtatacaggtttactggggactgctcttgggaatgccggtaagggagtgaggaaagcagaattgggcggagggagaagttggactgtgacgcagttgcaagagaggccacgggatggctcttcagagttacccacatctttacaccgttccttgagtagtcactggatgcaggttgtctctcaggagggagctgtacccttgggtgaggcagccaccttcagccaagggcagttcccagagagagagattcaactgagactcctttgcagtcaacattttccatcctgaattggggagatgcaccacagcatcttagagtcggcctctgcaccctcagatagatcaactccatatagaagcacccaggatccctcttccatcttctggttggctcttgctactgcagcttttctcaagacttgaatgatactcatcatctcctccgctactccacacggtagatttttccccacccccagtcagtctattcaccacacagcaatgtgagtgttcctgctaacacataagtcagatcatgtcactcctttgcttaaaacccaccatgtaggctgggtgcggtggctcatacttgtaatcccagaactttgggagctgggccggcggatcacttgaggtcaggagttcaagaccagcctggccaacatggtagaaccccatttctattaaaaatacaaaatggctggccatggtggtgcacgcctgtaatcctagctactctggaggctgagacaggagaattgcttgaacccaggaggcagaggttgcagtgagctgagatcgcgccactgcactccagcccaggtgacagagcaagactctgtctcaaaaaaaaaacaaaaaaacaaaaaaacaaaaaaaaacaaaaccccaccatgtaactactcccctttcatttcggagtaaaagcccaaatccttatcatgatttatatcatattcttgctagggactacatcatccccgattattctcctcaccactcactctgttcctgttacaccaacctccctccttgagcacatttttgaaggacagtttggcagtgtctattttcctactcttcttggagaagcccgagtcaagatgctttcagactgaaatgttaatgattctgtctgctagtgtaaaggttgtcttctgcaaagattatctggtcgtcatatcacaggcatttaatttaaaagaattcaaccattggcttaaaaaagaaagagaagcaatcatttaaatagcacgcattactagggcagcgtgta

SEQ ID NO: 1879741 - DNA, 4001 bp, Homo sapiens
caaggtgggctctgaagaggggcctagtctttggccctagggcacctgactcagaggttccagctgctgtgggggctggctctggacaacctcagcccacagtgatgctgaagccacaatggaatctgttgcgccagtgattgaggaaggctccaagggctagggtgacaggcagagggggcatcttcttctccagcacagcacctacacaccagttactatccaccaagcctgttgggggagagaatacccactagattatttaacagggattggaggaaatagtcaccagaagtaaggtcgagcttccctccctcctctgcatcccccattcctcaggatagccaaatgtctcccaataaccctcacctctaaataccatgttggcctggggcagagtcaggtggtaaccaaaggagaatgttgtgtcttgtagccttgtgtttgcctcaaactccactccaacctgaacctgagaaccatgggcaaggatgagagagagatcagtatcagtgaagaccagaagggtcctgatggggaatcagcagaatggaggcatgcatgtaaatatatacacagcgtggtaggaagaaaaataggtcagcagggcgatagaggtccagatgaacagaagttcatgactgacttgctgacaaggagggaatgagatcagaggtctcacctgttcatttgccctgtggtagtaacttgcatgggccccgcctgatcccacattcaatgtagctacccagtgtacagctgtaaaatccaaagtacagaggggaaggagtgttaactgtagtatgacacaggccaggaaccccagaaaagtccagaattgccccccaccaccaccactacttcacttcgccccatacccgagtacttcccagccagtgtcaagatggccccctcttcgcctggccgccggtgataaactagctctcctcccagcaccagccgatgagtgaggctctgcaggaagtgagcaaccatgatcactgtgggggaatggggagacatggagtcagtcatagagacaatatccagacctgctccctcactcccaataaccgccaccccagcctgcccaagaagttccttttctaaactccaaactgtacagaagatgaagaggcatagtaacattagcaaatgggccgccaagataaaaagaaccctgtcccagttcctcacccgactccccaatcaggtcaggatttcctagggtcagagtggctgtgtagtcatctccccgatactcgccatcaaactgccatgtcaggaacttggcctgctgcgtctgggtggcaagagcaagaagtaaaatctccctccctctttatgatcattatagactctgctcctccttccaagccctcagagcaggaaacccgtggaggagaaagaggaagtgcctcaggggatggaggcaggaactgtggtcacctggaagacagccttagctcggagccgctctgccaagaggagcaagacctgggcgttcaggctgccactgctgtccatatcccctaccacagtggggaacacctgtggaagggtgtacacagtagtaaggctgagccggatggcaccactcagcctaaacccaaatatagaacttcattaagagtgcacagcgccccctggtggagtcacaaagacacactctgggctcttcacagaaaatgtttctctaccctctctcattcagaaaagacacagagaatcaggttacggcccattcctccccataacacacacaattcctcttcctccagacctgggtcccagattggtttttagggagatgacccaggtgtgtggagccctcacctcagtgggactgagctgccaatcccctgcataggccgcatggaggtgatatcccggcaagcccagggcactcatgtgtatagtgtgcgccacctgaggaaaagaggattcagtggagaaaagcgcattcctgctccacttcaatccctcatcccacccttagtcttttccccatccagagggcctctcaagaatcctaaatattccaacatatacagagaaggtcatcggattaaaagcaacaagtcccacaggcacggaggtaaagagaaccccacatcctccctcatttgtcccacatagactggctagggctggagtacaaaggaaaggagaagatgatccagggacaggaaagggggaatagtaaggaggggccagagaagtgggagcacctggaaatggctgctcagaaccttgttgacaacgagcttcactccctccatctgtgctgggaatacatctgaagggggtaggggaagggaaggaataagcacagacaaagaacccctaccccaaaagatagtctcccctttcaatcccatagggaacactttggaggaattaacctcctttcaagtcctgcaatgaaatgctccacttcatttgggcacctgatcctccctgaggctgcatgacccagctatgatctcccctttcctgctcccatcgccggacatccggcattcaagaccctccactcctctgccccttcatcctgagacacccaagtgccaagttctcacctttgcatagacggtgcagctcatcgaagctcccagggttgggcaggggttcctctcggcgggggctccggcggggcaaagtccccattggtgccaggcccaatgtgttccccattttagtccagaggactgggaagagccgaggttagcctgtgaaaggacgctattgcccctttaccccccaacgggccccaccccccattatccggctccccagcctcagaaacttccacatggtccgacgctacacctggaacaggaagagtagggaaggagagcactcatggagagacaaccctaggcacactcccgccccatctttgatctctcacccccacttgtcacccttgtcctctctccctttctctgatcctagcccccaccacagacttcacctagctccctagcctctctattcttcattcccaggccccaagaccaggcccgcaatggtgcagtatcccttaccatctcagaccatcatgctgcccctttccccccggcacaccccggtcatcttgatgggggcagccatcttgagtgatggcagaactgcagcttcacgctgcattcttagcgtggccgtaagcgccatctttgaatctggcaaagaaagctgtcaaagacccaacccaaccctgattgggccccgcccaatcaatgaaaaaaaaaaaaaaaaaaaaaagcctcgctatttaccatgggccaatgggaagggaggaagaaaatgagtggcaggtctgacggcccaagagcttcaaccctggagctgcagaggcgggcaggacttgattggtggccccttagacttaagtggaaggctttagatcactaggcctctccaaggtcggaaaaaaacttgtgagcgtacaagacactagagggagcatcttgtagcttgggccactgaagctccttccacccatgtagtttcatccatgagaaaagtggaactacagcttgtagactggcatagtgtgaagggtggcagaaagaacgattatgaagacttctttggaaccctggttcatttctatcgctcccttctctccaaagaacccatgggaaatcctcctcacagccctccacagcacacctccaaatgagtactactcattaagcgcagcactccctagaacagggacccacccttctcttctggaggtctacatctctcgaagtccccgctcttgaccacttggtggaatggaaacgggtgtgagagtttggcgcagaggagtaagttctagcagaactattcgctgaaacagctgctttctgtatttaacccttccttccctgagtcccaaggcagagttggcaaataaaatctaggaatatggagcctggcccccaaaggcactccatcccaggaccagggacaagccaaagggctgacctcaagcactaagcgctcca

SEQ ID NO: 1879742 - DNA, 4001 bp, Homo sapiens
agctcaggtttgcatgttcacttaaagagtcgctggaatccaggttgccctgttactaattaaaacaacaacaacacttaaccatgaaaacccataatcgaggagtgactgtttacattaaattactggggattataagttgattcccttcaactctgacttctcagatggccatgtttacagtcccagcagggaagttaacaaactcgtgttaagggttactgctaactgaaggttgaccataaaaaatgcatgtgaaatgatcttgtaaactagcatcacagtttacaggaaggtccactttatggatattgccatgccaacaattgattctgtgttccccatgcaaactccaggcttcccaaggcttacagctgggggctgtgcagggaaggcaagttcttattcatgctagtctcggtgaactctaatttttaaaaaatggattcgggaacacacatcctgtccagaggaaggaggataaagcaagggtgttagaggggggataaagggggtctttcctaccctttccccctgcattccatgcccccacagcctattatctatgcccctgggattgaccagctgctactagatctgtctttgctgctgatgctgagtaagtgggactctggtcagactacacacccctgacggtaagaatcatgtctctccatcagtctgggactctaataacaacaaaaataatatagcaacaaaaataatagctatcatttagtgagcatttacaatgagccaggaattattctaagtactttacatatattaacccattgaatcctcatcagaaccctgagataagttctactgttatctgcatttgacagatagacaaatgaaagaaagcctggggaggtgaaccagtttgctcaagctcatacagctagttaagagccggaagtcctgccaccttcctcagactgcgacgtctccaagcagggctcctgtaccttgcaacacttggggtattttctgccatggccatcaggtgggttggtggggtgaagggctctcagagggatctcgtttccatcagtttgggagctgtgctgggcaggggccccgtcacctccatcaatctgggagctgtgctgggcaggggtcctatcacttcccctgtctggaagctccctagggtctagggctatggttcttctaacacatgggggactttctaaagactcagccccgcagggcttgtgccaccctctgcaccctcctgggattctcagaggagggcagtgacctgacacttcctcaggcagtccctggcagcttcctagggcagaggctgtgtggagcagctcctcacacaccttggctctccttcctgcccagcacaggcctctgaccacagaaggagctcaggatctgtgcactgcatggcttttctctggtcccagctccaggctggtggatctgagcgtgagcgcgaggttgggctggcccctgggatttaacaggcagtaaacaactccattcatgcgtcagttgttttgctccagagcagcctcatcagctggacaagccctaaccagatccctccaagttctctgcaggggtggagatgggggtggggaacagtggatggcctggagcttggctctcgtcttttccgaggagaggctactttccactcccttgaagtctgggatttttattggggagaggcaggccctggcagtaagatattaagtccctgagaaggaagggaagggatgctgctgctacttgtatggccccttggcggaggagggcaccagcaaaccaagaagggagagtgaaagtggcagtaggctaagaggtgctccagagaagcttccagaaccactgcctctctcctgtctctgggcttggaagagttggccaggatccccctaagcgcccagcacttcattcttcctatcctctcttctatcctcccagaccaggagaggacagcaagaatgaagtgctgggggcttggggtcctggccaactcttccaaggttggaaggcataggcacaactctgtcaattaaggcagaaaaatataagaagatgagggtccctgcagggcaaaaggcaggaaagaaggatttgacacgctgggtagggattaggaagttgcatgattggtagaaggtttgcacaggaagaaacccaaggagcagacactgaggaccacaggggtcggatagggaactgaggggttacgaacccctggcaaaggaagtggagctactgctgctactcactgtttgactagcgatttcacccacaagctctcattttctcttcttaggtagacagatacgatgttaataacctttttggttttttttttttttgcaaatgggaaagcagatttagttgtccagggtctacacagagttcgcataagagctgggaataaaatgcttttccaaggctctttgagccagtttattgagggcaaagagccagggaggagggtgacagaatgacagccacagagaccaatgagagggaggcgccttcattgaccaatcagctccttggatgtaggccctgcctacaccacacccaagtctagaataaaccacatcgaatttcagaggcaatcacaaagtgtacacagcacacttttgtgtactttcatagcagcacagcaaaccaaaacccgttttgggttccactccacttttaaggcgtcgcatcccagtggtctttccaccatcctcccccgccatccaagaagcccctgcgcttacccggtagtgatgtcatcatcctccgtcatggtcttgcccatgaggtcactgtcgctcatgtagccggacttgaggtccacctcatccgagtccagggattcgaccagctccaggcgggagatatggctgagcttgctggggctgcgcatgggcatggtgtgggagtagtgggcccgttcgccgtgcatgtaccaggcgggcgtcccctccgagcggcagctcccacccacagagggcgcgtcaccagcctgcagccgcggactggactggccatagcgccatgacagaggggacgagcggttggagaggctggacacgctgcgtgggttggcatcatcgctgtcgtagcaggtcatctccagggagctgggtggagagcagaaggcactacttagtccttggcacagccgccgtgtgccctgtcccctcacatgcaccccagcaatgcctcccctccacccacaggccctgtcacctcctccccacctgcccaagctccacctcctccatgaggcctctggttgtgtgttacctttgtgatacgttatctgtttgacaaaggaaatgatcttaattaagtggctagggaagaaatcctgtatactgttaagaccctagattgtgtaatatgacctaggtttgaattcttttttggtattggttagtaaaggagcccaaggaaagtaaataactaaagcttcagtttccccatctgtacaatggggataatggcataacatctaccttatagagttgtaaggatcacatatgtacagacagaacacagtgcctggtatatggaaggggtcaacagacctggaggcaagtgggagagactggtcacttgagcttagaaggccttggtcattttgttaatggtgtgtccatcacctctcttctagtaattagctgagggctagctgattcccaaacatcatatataggaaagctgaagtagagtgcagagagtataggaaaagctttgggaatctgggatgtatggcaggtccccagtaagactggtccaagccacaggcctagggcagcaggggaaataagcctccccagagaatagaagcagccttaactggacaaaggagaggacacagggaaccagacatgggggtgaagccaaatgtccagagtctcaagcctcaggccctgctagaccaggccaagggagcaatgcccaggtgagtgctggatggcctgagactaggggaacctgggggactagggaaggagata

SEQ ID NO: 1879743 - DNA, 4001 bp, Homo sapiens
tgcctgcagattttagcaggtaaagtaaaagttcatttgaccaaaaaaaaaaaaaaaagaaagaaaaaagaaaaattcccttaaaagtttcagtacctgaatatatgaatattggtatttccctctgaatataagacatcataatggtgattcatttaaagcctcgtgcaagcccagagatagcagggtcttggggcatttttgctcccaagtgagcagatggatttctcatctggatatgggtcactgagcacagccttgtccctctcacttctctgcgtttggtcttcacatcacggcacattttcagttgatgcctacttgcagtatcaggatgtgtggcaatctgggaagcaacatctctatctacacacccatatatgcatttatagtattgaggagcggccaatctcctaaaatgtctaggctagtaattgtatcaaataacctgtcctattaaggccataaatattctcatattagtcagtcccaattttgggggtagaaaatgtgcttaccaggcatggagataataaagaggagtagcactgtttgttttaactcaatcaagtttcatacagttgtgactcttgcctagctcttagcaagtccaatccaaggagccctaggccagctcagcctcagtaataatatttaacagtagcagcagcacgaagattcactgcaggcttactatgtgacaagcacttgttccaagagctgtttgtgtattaactcatttaatcctcaactcaactctgaggtagttcttattattcatttatttgttcatcaaatgttcatggagtcctgcctatgtgccagacactgaaataagcaggcaggatatagcaatgaacaaaacagacaaaatcccagccctcttggagtctatttttcagtggagggaagaacataataaatgaaaaagtaaatatcttttatttggatgatgttggatgatgttaagtgctatagagaaaaataaagcagagtgtgggggctgaggagtactggtaaggaaaggagttggatggcatggggggcagtcataagttggcatctgagcagagtccagaaaagcaggggagcgagcctaagaacatctggggtgagagtgagaaaggagttatttcttgagaacacgcctatcaaagtaaggtggtttgctccgctggacacttggttgatagagaaggtcaaagattccgaagcaccaggctacagatgaagaaatggactgagagggtcagctgactgcattcactcagctagcaaggggcagagctggtgtccagacacaggcagtcggccccagagcctgcactgttggccagaacatcagatgccttggttggggccattcctcttttttcctgatcgattccacccttagccggtcccagttagtgacttctcttatttccttaagacagagatttactgatttcagccacaccaccaccagtttccctgccctcatctacttcatactgaaactgcagccacctgtctcccaacggttacaaaccctcggtccccaaggccagagcaaggttcccggaccttgctctcagctgtcaatctgcctcctcgataagttcatcaagaattaagatgttggttctctaaatcaacttctttctgtactttccttctaatatgatgctaaaatagtttcctttttaattcttgttcttgcacttaacctatttcttctttctcaagatgtttccctttagacctatgcaatccatcaaagtagctaccagctacaagtggctagtgagaacctgaaatatggttagttcaaatggagatgtgttctgagtatcaaatacacaccagaatctgaagacctggtattaaaaagtggaacataaaatctcttgttaatatttttttgtagtaactactaggttagtgcaaaagtaattgccggtttttgccattaaaaaaaaatagcaaaaaccacaataacttttgcaccaacctaatacatgtcgaaatgaaaatattatggatatattaggttaactaaaatatattattaaaattaatttcacatgttccatattatacttctatttgagagcacttctttagcctgttgtttcaagacactcacatcccacctttctcaaaggccacatttgtctttgactgttctcaccttagataggatacagctgagatccacagtatgctttagggaataaggttcttactagatcggttaaggctgtgagtgtttttaaatctattctccaaagtctgattcaaggtatttcaatacagtactgatcatttcactaaaattccttgagaatccttgttattttctagatactcagttcatcgttgggaaactctattgcaagtagtttacaatggcacagcctcattagtttcttattaatctgattttttatttttttctgaatgtgtatgttaaacttcaattttcttctaatttttaactggcataggaagaaaatgttcaagaaactacagactggtcagcccagtggaaattcaggcactaatctcaacagacattttggggaacattgtaaagtaagcaaagttcactagaacctataaagtaaccaaaaagcattttccttggaggctgatgggcaggcactgaaagttatctccaaagaggaactgctaaaatgttttcccctccttttctagggacagtctctgtatcttatagtcacactttatattcaaacctgaacttatctgagaaaagagaaacggctgcatcctggtttcacttacaaccctgagatggaagttgagatttgtcattgcagaatttaagggtctgtgtccttaagtaaaaccttctggtcacccctcaagtaaagcttcaaaaaagcttaggcacttgtgcagaaacagcatgagaagaaaccaaaaggcagaaaacttacacatataagggctgatttatgcaaagtttctacttttaaacagagaaaccaatacctaccctcaaagcctgtatttactaaagaaatgttagagtgacaaggaggtcaataaaataaattattcaaatctggttcttaaaaagaggttctaagactattttaaaacttctgaaagatgcccatcaaaattaaaacaaaaaaacatagcaacgaatacaatgagtgaaacttgattagatccgggttttttaacaaaagacactcttgtgacaagtggggaaatctgaatacgggtaaaagttaggtgatgttacaggattagtgttaatatttatagatgttatgatgttattgagattatgcaaaagtgtctaggagtgaaatgtgggtacctagagaatgtaaatataataatgttaataataaatatgtcaataaattgccattgtaaattctatgtcccaaagaagcacccctcaccattacaaattatgatattaaatacaattttgcatgactggtaattgtgctgacctatatttcccatgttttagcagaatttcattggacaatgtatacatgttggatataagaaatcagtagtactcatcttcaaaaagttgcttagtggatctcaggctagggatacaacagagcatataaaggaataggttctgattcagagagaatcaaagttcaagttcactctgccacttatttgctgtgtgaacttggacacattactgaacctacctaagctttgttctcctattaaatgttccctatgtaataaaatcagtgtgacaattaaataaaaacatctcaaatctgaagcatagctcctggcacagagcaggtacttacctcctagtggctattattacttacactctgttataacactgggcctagttttcctataggaacacacaacactattttaacttggattatctttgctaaataaaaaaacacagactgtctaagtctcaactccagcaaagcacatgaacaagtctcacataataatgtgagataatttcaaatggagaaatg

SEQ ID NO: 1879744 - DNA, 4001 bp, Homo sapiens
agcacacggtcgcccccgagtgccaaagtctacaggggagttgggaaaacagctgaaggaagaggagccgtatttgtcaatttaaattccagcatatgtaggtatttataaataaatatactttatgctccctgaacacatgagttttcatatgaactaaagaggaatttttataatacagattgtctaaaataattgataacccccaaactcatgaattcagctgaatgtagtatgtgatcttttttggcagctgatccattttcctaccctgcagtgaaggcaatttttctaatgcttctttaatagggagatttacagaggcataaagagcagaatagaaaccctaacgtgtaaccatattttaggaattaaacccactaagatagagcaaatggaggcctggttataaaacaaggaggcctgcatgccaagccttggtttgtcactaattttctgtttggttttgggtatcatctagactacatgatctagaccccaatttcttttttttttttttttttttgagacaggatctcactctgccacccaggctggagtgcagtggtgcgatctcggctcactgcaacctccgcctcctgggttcaagcgattctctgcctcaacctcccgagtagctgggattgcaggcacccgccaccatgcctggttaatttttttgtatttttagtagagacggggtttcatcatcttgaccaggctggtcttgaactcctgacctcgtgatccacctgcctcggcctcccgaagtgctggaaatacaggcatgagtcactgcgcccggtccccaatttctttaagaaaatgaaagcgttggataagatgtcctttctatctctaaaatcctgatgagccatcaagaggaagcatgtgaacaaatatcattattacatagaaaaactcttctctaatcttgccggaaactcataccatccaatctgggaattaccttctgaatcaactctgtcttcattgaaacaacttgataaaatactcagattctcatttactttgtgttacattaaaaaaaaagtagagaaacgaattttcaagtcattttcatgtatatcatcttttgtacttcatatcaactcttgagtttggcattattattttaaagataacttttaatacagacattccttcttactgataagaaactgaggtttagagatgttaaattacattctgtcatacattagtaaattgatagtgtatttactaataatcacacactcccaggcattaactgaaatccccaatgttctttctaatataacagtctctgatggagatgatagcagattttttttttagatggagacctgggtcccttcacactttatctatatatgatactatgtgacatattgattctaaaaagggtgttttcttggctatttatgcttatagctgttaagaatataaaacttatggaggcagagagtagaatgatggttaccagaggctgggaacagggtaagggtgaagagaagttgattaataggtatgaaaatacagttagatagaaggaataaattctaatgttttatagcacagtagggttactatagttaacaataatttattgtctattttaaagtaactagaagagatgatctggaatgttccccaaatgaggaaatgataaatttttgaggcaatggatatcctaattaccctgatttcatcattacacattgtatacatgtatcaaaatatcacatgtacctcattaatatatgcaattatgtatcaataaaaattgtttttgaaaaagaatataaaataaagaaaaaagtaaacaaaacttccctccagttgttaataactgggcaggtgagacttatggtttgtaaccgatcagtgtcactttctgatttcacctacagttaacattcttcctcctcatctattaggggagtttcttgccattattttcaatggcaaaaactgcgaatacttttgcaccaacctaatgaaagatttttctccagtacccatacatgtgtgatggtaagacagcacgaggttaattacaactcatttggaaatactatcagcaggtgcacatggtaacccaagaacagaggcaacaggtaagctgaacactcaccctgctgtgctgagtgtctgaactccataaatacgggcatgctccagcacagaagttggcattgtaccctttgggttcgtgtatccatttccaccctagatccctcttgaaatcaatgtaaagtggacgtaggcagcaattatcctgcacatttctgttaaaaaaaaaaaaaaaaagcaatggagattttaaagctgattcaccaccctcactctaccaccacctcaccccaaaccagaaaaatgattcattcatttattcaacaaacatctaatgagcaaatatcatgggccaggttttaatggctttattgtaatctcaagtgactttcatgatagggtgttgtatgtggtggtgatttgctggactacttgcccttatgagttctataccctgacttccttgtctgtgacctggaaaatcatacatttaccttcagatgaccagatataagcagagagtggctgggcatgatgaagccctttccaatcaacactgggcagttctgccatccagcctctattgccctttcaaatataaaatgaaagaagtacaacagcaattttcaaacaaccatctaaggcgttttcctttgagaattgatcctttgtttcaccacatgttctctgatctaggaatgaaccagagatcaagaaacatggagtcttgctgagggcaaccactggatctggcaaccaaaaagtgccactttactcatggcctctgacattttgagcacttcatcagtgaggacccttccctgtcctgtacctctcaaaataaggaaagagccctcctcttactgagaccacataagaacattcacattctccctccatgcactcatgtgggaatgggaaataaattcttcttgcttctctcatatgctgttgctaaaggtgtgacacacggcattcttctgctgtctcatctctgttactatgaaagaagtgtgactatcagcacttggacttggtgaggatgaaggcatcatccagatggtgggtctttcttaattaaggagttgacatcacacacctcaaataagcttttatttgttctgaggagcagagagcttgttttcttcttcagcaccaaagaacttcagaggaattttggggaaaaaattcagggggttagttttctcccttcacacttggttcactgctaaagacctgatgaatataagcctctgggaagaatggtattatgagacacaggagctgtactgcactctatctggccttagcagtgagttccacttgggtcaatacacagtaaaagaaagggcaaaggcagtttaagagttaacagatgcaattacttggttttacttttctttcctttacctaaagcaataggccgcatccaaagcacgcttcttccgccggttggtctgttgtgactcaagtctgtaggagggcaataacattagcaggagatgtggggtcttcccactgttttttttcctagtggactttatagttttctgatcaccactggtatatgtggaggtgccatcaataccttgaaaaaatgcatttgggtaataaacatttagcttcaccttcatcaaatatagtcagccatatttttttcctttgtatattgtcacaaatagcagtgatgaccaccaaagcagcatcagctggcaacagttattccccatggaaatagatatggcacaacaggactacgactaacccacgtgacaattaacacttctaaatggggctcttgtcagaaggcagttcggtgtcaaagccagggctgttggttatgaaagtcactacagaagcagtctttgacctatagtccaagggcaatctaggcagtttattttagtcaatcctcagtttaggct

SEQ ID NO: 1879745 - DNA, 4001 bp, Homo sapiens
atacaaaagaaaaaagttacattcaaatgtagtcccaccaagagagacaattgtgtgtttgtgtatgtgtattatcaagtaaaacatactaaaagagtttgagataaaagaagattaatatctaagaccaaatagttaattcagacttttaaaattataaggctagatagggcaagatgggcaactgattatgaattaccaattgtggggggcggtttagggcatattgcgtaataatgctggagtttggccttctagtgaacccatcacccaagtggtgaacatagtacccaaagggtagtgtttcaactctttcccccattccgccctctcctcttttggagtccccagggtctattgtttctatctttatgtccgtgtgtactcattgtttagctcacatttataagtgagaacatgtggtatgtgattttctgtttctgcattaattcatgtaggataatcacttccagcagcatccatgttgctacaaaagacatgacttcattcttttttatggctgcgtaatctaccaatccttaaaagagatgcacccacattttccagattgttttaagtctgcaatatatgaaaggagaaaagtatagaaaccacagttgattggactcccactctgacaaagaatcccatagactatagcagtgttaaggtagaaggtgcctacttaggtgtttattatacaaggtatcaaaatatgctgcataagtattcctgacttttgaaaaccaccctgccctggaagatacaagccccatggaaaggacctggagatggaaagcttgaacccagcaacccacctcaacccaattcacaaatgaccctcaatttgagctactcaaatgtttggccatcagcatagcttattctgctggcaaaggcaaatactaaaataagtctttaaatgagagttttaaagttattgtaaagaccttaaacttaaaactgaaataatgacttaaatcattacctctagaaattactttctggatttcaacgtttaaggctgatttcttctcaacaaccaattactccaattactaatgcatctaaaaatcatttaagccaaattacaacttgtaatataagcagctagcaattatatatgaataagtggcatcacaatctcttacctgctattattctagcagctgttcccatactccaatgagtccagttaaacatttgccttctaccaaaataagaaccagtcagtattcttaaaagcaatggaactataattaattcccactagaataaaaagcatgtaatttccttattgtctgggaattagatatctgaaatgcattttaaagtatttcaaagtaactataatttatcactgaattttataaaatgcaaaatttttccatttgaaaacagattagtttgccaactaatgatatctacattaagagagcatttatatagaaaggctctaagtaccttgggtcatgtaaaggtggcctgaagactgccagaagaggctgaagaactgccaaagtcatcactatacagccgaggtatgggtggtaacctgcatgctaaacaaagttacatcattttaatggcctcaatctctctcatcaatttaaatcctcaagttaaaaataatacacacagatgtattcttagtatttttccatggctttaaagattcaataatgatgataataataatatgcaacattcactgagtatacacgttgtaccaggcatacactttacacacactaatttttgacaactacaatgtttgacaactggttatcaatatcccaattttacaaatggggaaactgaggctcagagatatcaagaactatgtccaaggtcacagagtatgtacatggttgtggtggaatccatgtacagaatgctacctttccccatcaggatgttgtaggttagtacaaaagtagttgcagtttttgcagttttttttcaagtattttaatccacaattacttttgcaccaacctaatagatggccaccaacatcagaacagccatctgcagcccagctgggactcagttatgcatgggtaaaattataaccatgactttagagatataaagggttctatctaataaaaaataaaacagcagcagcaacaagattcttgcatgtgtttagaatgtgctaggaactgtcctaagtactttcagttattttaaccacaatgctcacagaaagcctataagatagatactataccacccccattttacaggtgagtaaactgagggtcatagttaaataacttgctcaaggtgccccaggtaataagtcatggtgccaggatttgaatccaaggaatccagctttagaatggcgctcttaacctttgttctatcgtattcataaattgcaaaggctataaactagacaattacaaaataagtgttacctttgtccaaaatgtctgaataaaataaagttctcatgtctcaattcatatcacaaaatcttcataacttccttaaaaagataggttgactgacccataaactacctaaaaggcaggagggagctttcctagtaatatctgtgacccaggattcatcaatcttatccctgtagcaccagcccaagctctgaaatgtgaaattttgatatcaaattctcattggctataaaactggaaaagcataataaaagcacaggctctgaacttaacatatgtcacttattctcaataagagttattcattcattcactaaatgtttactgagtacctgctatatacttaaatctgttctgaacatatcagtggatatcccagctctgactgagctgacatagtagtgttggaagggagatcaagaaaaaatatgacaagtaagtaaattatatgaaatggcataaagagtgctatgggaaaaaatagagcagggctgggctctctgagaggcttctatttgagcaaaaacttgaggaaggtgagggagtaatggaagcgtgtgccaggcagaaagaagaatcatggcaaagactataaagcaggagcatgcctggcatgtctgcataccaaccaggaggctggtatggaaggagatggactagaaggagaggacgaggaggtcagttcagagaataactgggaggcagtcatgaaggtccctggaagaactttgacttttactcttaataaaattgagagacattagagaaactagtttgaggtacaagaatggcatggtctggtttacttttttttttttttttgaggtggagtctcattctgtcacccaagctggagtgcagtggtgcgatctcagctcactgcaacctccgcctcccaggttcaagtgattctccttcctcagcctcctgagtagctgggatgacaggcgtgcgccaccacgcctggctaattttagtgtttttggtagagatggggtttcacaatatcagtcaggctggtctcgaactcctgacctcgtgatctgcctgccttggcctcccaaagtgctgggattacaggtgtgagccaccatgcccggcctggtttacatttaaaaaaaaataactgtcttctttgtagaaaatagattgtgcacgggcaagggttgaagtggagagaccagttaagtggctactgcaatggccaaccaaaagatgatggaggctcacactcctacagtagtatctgatgacagtgacaagtgttggactgtggatatactttacaggtagagccagtggaacttcccagtggatttgacatgggatgtgcaagagagcacagttaatgataattccaaggctttgatctaacaatggaatcccagtagctaccatggaggtggcagtgggtagaacaggcctgggagaaaagatgatcaggagtcccattttggacatgttaagtctaatgtcttagacatgcaagtcaaggtcctgcatgcaatgtgagctagatgtgtgagtttcaagccacgggagaagtctggactggagataaagatttgggaataa

SEQ ID NO: 1879746 - DNA, 4001 bp, Homo sapiens
gttcttgtttgcagcgctgagcacctgtttctaacaaatactagcctgggcaacacagcaagacaccatctctacaatttttttttaaattggttgggcataatggggtgcctgtggtcccagctactcaggaggctgagggggaggatcacttgagcccaagagttcaaggctgcagtgagccatgattgtgcccctgcactccagcctgggtgacagagtgagaccctgtctcaaaacaaaacaaacaaaaataaaaatgaaaaataaaaccgaatatcttagaagattcttctccatcactcatcccctccctctgcactgggagctctgggagctctgggaggcagctcactctgcaaggtggttggaggaggaaccctgggggcctctgcagtgcactaaggccattcggcatggcagccacttgccccgtccttaaacctcaggccctgagaagtcattccaaaactactaccttccatggggtggttcctcctaatttaggttactggtcttgcaacagaagagcttcctcacaccactaggaacctcgacatttgaccattcaaacatcaacttgcagcccagcaaggtagcacacacctataatcccagtgctttgggaggctgagacaggaggatcatgtgagcccaggagtttgaggctgcagtgagctatgactgtgccaccgcactccaacctggacaaagagctagaccttgtctcttaaaaaaaaaaaaaaaaaaaaaaaaagaagaagtctacttgcaaacacttgtgataatcacacttacaaacccagtggcttgggagtgggacggtgggagtatgaagcccagacactgaaagcgcagagccatcctctgcggaagacacaggaaaggaggcgtctggacatgcaccaagcaagaaagcaccaaaataagcactcgcccggccgggtacggtggctcaagcctgtaatcccaacacttcgggaggccgaggcgggcaaatcacgaggtcaggagttcaagaccagcctggccaacatggtgaaaccccatctctactaaaaatacaaaaaattagctgggcatggtggcaagtgcctataatcccagctactcggggggctgaggcaggagaatggcatgaacccgggaggcggaggttgcagtgagccgagatcacaccatggcactcagcctgggcaacagtatgagagtccgtctcaaaataaaagaaaaaaaaaaaaaaaaaggaaacacgatgagcccatctcctgggagtcgggaggtgctctcagggcaggagagggcctggcaaggttagtcccagagggcaaagaaggctgggctttttttttttcttttaactaatagattttattttttaaagcacttttaggcttatggaaaaactggacagaaagtacagagtttccttctcccaacacacataatttcctgtatcattcaatcctccattggaatgaccgcttggtacagcggacgagcccacgttgacacattgttgttaactgagtccagggttcctttcagggcccactaggggctgtgcattccatggacttggacaagtgtctcatggcctggatccaccattgtaagatcacgcagaggagttcctgccctaaaaatcctctgtgctccgcctattcaccccttcctccctccttcctcacccctggcacctctgctgtctctacggtgtggcctttcccagcagtgtgtggccttggactgctgtcctcactcagcaacttgcattgaggggctgagaggcccccctgttctccaagagaaacgctccataggcagggaaaggctctggggatccggggtcccttcccaggcttgggggaggctgggtgccatcaacccctccccatctgtggtttccagggcaaccctggaaaccaagagtgggtcgcctagaaacggtcagactggccccacccactctggatttccagggtcacccggcagtcccctctggcagccaccggagcagccaggaacagcctcaggcgtcggccgcgagggggttgctgggctggctggtcccccaggtctctacgcgaagggggtgctgggctctacccccaggcctctactaccctctggcacacatccatctagtgccccaggggcttcggagggcaggggtcagctctaggcccttctgtactcccagagccaggcatacaggagtctctgggtcacatgaagctgaaggttctcccccaagtctgccctggtctctggcaggagatgctacaagggtaaaggacccgctggcaggagagacggcctttccaaggggaggcggcacggcaggtcgggtggaggctgcacgcagacctgaggctgatggaagggggagatgcaggctttgagctgagctccaggcaatgggcaagggagggcccctccacgctcagctgaggagcaagggctacggggcactcagagcttcctgtccagccaggagccccctggggacccaagctggagagggactcaggcatctggaagggccggcaagttggcaatgggaggccctgaaggttcccacacaggaccccagggtgaagaagtcactaacactgtttccagaagtggggtcaccccgctggaccagaagggccccatcaccttctgccatcagcccaggacgcaacgccctcaccatcactgctggtggagagacccttcctgcagacaccaggcctggatggtcggggaccatgcaccccgcagggacagagtcacagacccgggggagcttgtgggaggcccaggagccaggtctggattcaaagtcaggtgcggctgatgacaaagaccgttcccgcccgcatcctgggtgtgccctaggaaagctgcctcttccagaaacgcagaagcagcaacagaaaacacggggtggggtggcggggcacacggcagggaagcctgtcctgccaggccatctgacttcgctctcctgacttctgacagtttctctgcttactctgaagttaccaggtttgtcctgtttctacaaaccagcctccaaaacgtgggagggggcttttcgttcccatttgtttcccagaaaacaagacaaaatgtcaaaggaaggaagccaagaacattccttggttcctccaaagatccaggtcttcactcccctccgtggccgagttcctgggacgtttcattctttggcggtgctggtgggaggccagcgtcatgcttagcggctgccccaaaccaagggtaaggggtaggggtagggggctggtgtgggcgagccaggcagtctctctgccctctcctctgtgtgtctctcagcctatttccgtgtctctgtctctttttgtgtctctctctgtcctttctctgtgtctctatttctctgcgtgtttgtctcttttcctccatctctatctttttctatctctctatgtctctttgtctctgtctttttctctgtctctcttcatcccggtccctcgctgtgtctctgtctcttgctgtctctcaatatctgtttctctgtctctttgtctgtctctccatctctctttgtgtctccctctctgtctttgtctttcccccaagggcactgatttctgactcatgtggggtccacccagatccccaaaccctcgcatagtcaatacccacaggaaggaacccagaggctcagagggcctggcccctggcatccccctcagtctggacacaggctgtgacactccctgcgcctctggctcagcctctgagtgcagatcaagaagaataagaatctggggctcagcacttttctatgatttccttaagcagagctcagacccccgccaggggtgggctggagccttgctgggaaccccccaggtcggagagccactaccaggctggaccagccaaaccctcacatctctccggtctgaaaccaagggttggacaggctcaggcctctgttgttcatgcacctgctgaccagc

SEQ ID NO: 1879747 - DNA, 4001 bp, Homo sapiens
agcagcattactcttaaaattgcaataatctccagggaaaataacccaatttaaacttattccctctttagctagaatgtgtttaactcttttaaacttgttctttgctgttacctgtgtccttcaaagacatgccccttgttattctacgtaactcccttcactcagaccttcaataattgcaaaagcaatttaacccccagtttaccatgatactattaaagagtaaaatagtcagtagcccaaagaaattcttaggaagccaacactttcaattggcatgctttttttagaccctaaattcatatgcataaatatgcattcgttcagtctgtcaacccacgtctaggtaatggttgaataagttagaggagctctctgacgtcagggaacttacattctagtcagaagaggcagatacatgaatcaacaaacaagaccattcaggatgcatacgcattgatctgaaagtctcttcacttcacttgcctgagctgaggtgggaccacaatctttgaagaaccaaagaaggagagttctcagaagaggttatagcaagtgcaaaggtcctgtggcaggaaagagcttgccaggctcaggaggtggaaacatacattgccaaatacaaatacacacacaacatatacaccaacacacaccaaagactttctacaaggtttcattaaatactgagtgggtacaaaagatatttataaaacatgtctgctgtacaaagaataacaataaagggaacattcgtgtatcccaccatccagtttagaaatgaaagcgtgaccatcaagcatgacctctttgatctgattgcctctcttcgtaacccagagaaatgctaatctgaattcattctccaatgttttttttctttatcaccttatatcctgaacaatatattgtttaatacgtttttgatctctaagactagaatcttgcagttatgtaggtttgtatggcttggggtttttgtagccaagtcaaagctatgataaatttgtttctgaaatttttgagtgaaagagttaataatttttaattagaatttgttattgagataattataaattcatatgcaattctgtgtaccatttatccagtttcccccagtggtaactgatatggtctggctgtgtccccacccaaatctcatcttgagttgtagctcccataattcccacgtgttgtgggagggacccagggggagattattgaatcacgggggtggtttcccccatactgttctcatggtagtgaataagtctcacaaggtctgatggttttataaggggaaacccctttcacttggttctcatttctctcatatctgccaccatgtaagacgtgcctttcaccttctgccatgattgtgaggcctcctcagccatgtgaaactgtaaacccattaaacctcttttcctttataaactacccagtctcaggtatgtctttatcagcagcatgagaagagactaatacaataacatttttaaaacactagtacaatatcataaccaggatattgacatgatacagctcaccagtcttacccagatttctccaatttacttgtatcatttgtggtctgtgtgtgtgtgtgtgtgtccatcactaaagtcaagacatcagccagtccatcaccatgaggatccttcatgttgtgcctttataaccacctccctccacctcaccacattcttaaccctcaacaaccactaatcccttctctatctgtaacatttgtcatttcaaaatgttatataaatgtaatcatacatatgtagcctttggcattgacttttttcactcataataattccccaaagattcatccaagttgtttgtaatcaatagcttgttgcttgtttattgctgagtagtattccatcctgtgtatataccacagtttgtctaaccagtcacctgttgaaaggcatcttcaaccaacaggcaaaaggttaaacaaactgtggtatatttgaatggttaaacaaactgtagtatattcgactattacaaataaagctgctgtgaacacttggctattgcaaataaagctccccaggtttttgtgtggacataagtttttatttccctgggataaacacctgagggcgctactgctgggtcataggcatgctgggttttataattagctgccctctgttttctaggctagatctacaattttacatcccatcaacaatatatgaacaagcctatttctctacatccttgccaatgttgggtgttctcattttttttttattttagcaattctgatagatgcatagtgatatgttatcatggttttaatttgcattacccttatgttgaacatatttcatggattttttttgccatttgaataacttacactatggaatatctattcatgtgttttgcccatgttctagtagattacttgttttctttttaccattgagttttgagagctcttatataatcaagattctagtccttttcaggtgtgtgatttgaaaatatcttctcctactcagcaacttgtctatagcttgcttttttacccaagattattgtcctcagttttatctatgcagatggatttttttggttttgttgctgtatcattctactattgttttgtattttgctgtatcattatactattgatggacattgcttattgttctgctttcacaagccatgttaccatgggctttcttgatgtgtccactgctgcacctatataagttctctaaggtatagacctagtaacatttctggatcacagggtatgtgcattattaatgttattagataatgctgaatttatgccaaagaaatttcatcacttagaactgccaccagcagtgtaaaagttcctattactccatgcctttgctagcacttgatcttatcagactttttttcaattttaacaatgtaatgggcatataatgatatctatttcatttgtatttcccaagttacaaataatcatacaaataaatacaaatagttcctttacttccctggtgaaactgaatattcagtctagacattcagatttcctgtttcattaagtgtctatttaagttactttgcccattttcgtattgagttgtgtattagtctgttttcacactgctataaagatactacctgagactgagtaatttataaagaaaggggtttaatggactcacagggaaagcctcaggaaacttataatcatggcagaaggcaaaagggaaacaaggcacatcttcaaaaggcagtaggagagggagagagaaagaaggagaaagagccacttatcaaacaaccagatctcatgagaattcactcactaccacgagaacagcacgggggaaactggcccccttgatccaatcacctcccaccaggttcctccctctgttggcagtggccgctgccatcatgcaggctgcagcagggaggcaccaccccagggctgcacactccgtgaggcaggcaggagctggtgacaagtgggagccccaccccttttgagttggcaaggcgggagttccctaggtgcagctgtggccaccctcccaagcgcaggacccgagagtctctgcagtcttcactcttgggggcctcagaagtcccccccaaccccctggccccacaggctctagagtgtctgctcctgctgcctggcctctccactcctggcaccctactccaatcttggagccaggttggggcctatcctgggcactggcacagcctggccaggtgtgcacatgcttggggcagtgctgacatgccagtaccctgctacctcggcctcctccagaatttgggcaaaatgagcatgagaggagaaactgagggggagggctgagggtggcttggcactggcctgcaggtgccttttggtgcaagcagcctgggcaccataggcaccatggatggcagcaggaggcagacaggctcctggattgaagggagtggatccctagtaaggccctacc

SEQ ID NO: 1879748 - DNA, 4001 bp, Homo sapiens
ctgagatcgtgccactgcactccagcctgggtgacacatgagattctgtctcaaaattaaaaaaaaaaaaaaaaaaaaaaaggaatatttggatatacataatgagatagcttggggatgcgacccaagtctacacatgaaattcagctaagcacagtggctcacgcctgtaatcccagcattttgggaggtggaggcaggcagatagcttgagtacaggagttcaagactagcctggccaacatggtgaaactctgtctctactaaaatagccaggcatggtggcgcacactaataattccagctactcgggagtctgtggtgggaagctctctagagctcaggaggcagaggttgcagtaagccaagattgcaccactccactctagactgggcaagagagtaagactcccatctcaataaataaataaacaaacctgaaattcattaatgttcatacataccttacacacatagcttgaaggcaaccttatacaatgttttaaatgattttgtgcataaaacaaagttttgtggcatactgccacttgaaaagcttctgattttggaatatttcagattttagatttttggattaggaatgctcaacctgtaggagtattgcatacccactatttatctaccatgctaagtaatagaaaccagatcctttgctaaggaggcatttaaaatacacatatattagaaaattagaggataattaagtgctaactctgtgatataaactatatacccgacaggagttcagaaaagtaagagattatataggttctagaataatttgaggtttcataaagcatgaaggacttaagtgagtccttgaaaaacagctaaaatagggatggaggatgtaaaggaaaaggaaagaacttccggctttgtagtactagaaaacagcaggtacactaaagttttctgccatgtagcaaagaattcctcagagccattcacattcctttccacccagccaccttgatagtaatggcatgaatggttctacattactaactgccattactagcagtctgtagcaactgaacataataagcaaaatatgagaatcttgcttattagtattatacacaccaaaagcaaaatctcaatttcttctgaaatcttaatgcttttctaactaattgccaatcttctcacattttggatgtttttaaacaaaggtctcaaggacttgttttaggacatcagagagatgccatgaggccggcacggtggctcacgcctgtaatcccagcactttgggaggcagattacttgaggtcaggagttcgaaaccagcctggccaacactgtgaaaccccgtctctaccaaaaatacaaaaattagccggcatggtggcacacacttgtaatcccagctacttgggaggctgcggtgggaggattgcttgaacacaggaggcggaggttgcagtgagccgagattgctccattgcactctagcctgggcgacaaagcaagattccgtctcgaaaaaaaaaaacaaaaacaaaaacagagagatgccctgaattaccacatacactgagggagggaaggaaggtgcttgctataagtgaggcaattactatacaaaggaaataaagattgattaaccagaggcacaattcatttcagcagattattttgctcccatagtaaagaatataactaactgtaagataagagtaatgaaagatcacacagatacgcaacaatggaaagacaaaacacattctgtctataatgcaatcacttaaagttggaagggatccttaaacatagatcacaatcacggtccaatatcatttttcagataaggaaagcccagagtcactatgcatgataatgacaggacatgggactaaaatttaggtcttctcactctctgtttagtgctctctatcataacacactgcctcagtctaaaacagcgagattttctcagacaaaacaaaatctcaccgttttaaaataaaattgaagaatgttatagttagaaggattttggagattctccaggctaatcttcttgctcaacatataaggaaactaagatcaaaatggttatagtaactgagacaatgataaagacatctctagttacaacttcctgcctctaccacctatggtggtattgacaagcagccaatgttccttctggtgataaccctaagaaattaggattcaaggtctggtagttttgttttatttttttgagacagggtcttgctctatcacctaggctggagtgcagtggtgtgatctcagctcactgcaacctacacctcctgggctcaagtgatcctcccgcctcctgcctcagcatttagagtagctgggactacaagcacatgccaccatgctcaagtaatttttgtattttttgtagagacagggtttcgccatgttgcccagattggtcttgaacacttgggttcaagtgatctgctcaccttggcctcccaaagtgctgggattacaggcatacgccaccacacccagcccctaaatccagtaattttctagttaatttaaatcagaaatgaaaggggatctggataatagaggtcatgacattctctctgagatccttaatatatagacaagctggattgagaagaccacaagttacttttgcatttgctaacatctcatttgactgatgtgcatgataggaaccaaggaaggataccaggaggagtcagtcaatctcagcaggcatgttgctctctcctctattctctcctaacaccctaagtctaaaaataagtactgtgtactctacaagtgttttatccaaaaactactttaaagtacaagttgcttcatgtgacaaagtgagaaaaaaatgctgacagaacattagaaaatttttttcaggcctggtaaaaaaattccatgtattactgataaagtaatgatccctttacaatcaatctcaacgcagcatatctaaaattatcatctaccctggcaaactaactctaccccgtatattcacaagaggtaaatatatccagttacctaagccagacatctagaaggtcatactttacactgccttcctcacttcccatacccaactggccagcaaatattgtccattcacctttgcaaatacccttttatcagtattcacctctctagcccagcattccttggcacaggcccttaccattctgacctgaattgtaatgaactcttatcttcctgcctctaatatggctttcttctacttctctgaattatctttcaaaaactctcatatcacatccctcattaaatgctctatatttcaggatgaaatgtaaattcctagatataacctatagcctttcagaatctggcctgtcgatatttctgttgtcatctctctccattcccttacccagatctattatccacttgcagttgcttgctcaaacacagaacactatttttttggtgacagggtctcactgtgtcacccagactggaatgcagtggtgcaatcatagctcattgcagccttgaacatcttaggatcaagcaatcctcccgcttcagcctcctgagcagctgggactataggtgtgagccaccatatggggctacttaaaaaaaaaaaaattttaagagatggaatcttgccatgttggccaggctgttgtcaaactcctggctcaagcaatcatcctgcttcagcctcccgagtagcttggactaaagctgcatgccacctcacccagaatacttttgtatgtcaaatttctttgtccttcctccttagctctcacttttctatccagctaacttctatttacccacagaacccactggaggaccattaaatggcagaaggcagatttggtgtcaatcagtccccagaaggattccctttgcttcccctgtattcctatggtaccctggggataccactatcatagaactggtctgtttcctctgccagaataacccaggaggcaggaatcatagctgtcact

SEQ ID NO: 1879749 - DNA, 4001 bp, Homo sapiens
caactctgaaggagacacccacttgctaagccagtctcactctaggacacctgcctagcgaccagcaaacctggaatgaaagggcaagttcctcagtgccccctctgcatcaaagggagtggctctgccctctctagtctctgactacctgcttagtgatttttgcttctgtgctcccagacccaagaaaaccacgtctcttttcttccttcatcgactcatccccttcttaccctatattgtctcctccacttcctgcctctgctggccaggcttaaatctgggccaccagccttcctggcacatacctatttccgcaactgaaccttcccaacccctagaaaacaaaggtatttcacaagcctctgcaccttgacccaaagaggcatgcaccataattactagcaggcaaggaagctcatcccacctctctgagcacacgtgtctggaactgaaaccatctgggtgcacgcccccctccaccctggagaactatgggcaaatgttagtgccaaatgcctgatgatgaggtaactctcctcgctcagaggagatccctccttctctggcaaagcccagcattccccaaattcctggcagccttggtgacatcagaaaaatgcagtgctcctgaaagtaagaacctggcaataaatgggagagatgggatggtgtgaggagaaatttatgggctgagtttaggacaagtttcatgagtagaaggaacaggcagccaccaaacttgaaaggctcctctgcccagcagtttttccccacactcagatgtcacagaaccaggacttccacattttagaatacattcagtcctctggagtaagcagcaatggctacagatgaatcctcctttaaaatgcaaatattctgacccagcaatcccactcctaggtattcctctccaagagaaatgaaaatatatttccacacaaaaacttgtacaccaaagttcgtagcagcattataaatgatagccaaaaagtagaaagaacccaaatgtccaccaacatttatccatgacgaacacagttgtaatacatctaaataatggaatattattcagccataaaaaggaatgaagtactgattcacattacaacatggatgaaccttgaaaacatcattctaataaaagatgccagtcacaaaggatcacataccgatgattacatttatattaaatatccacaataggtaaatccatagagaaaaaaagtagactggtggctgcctagggctgagagagattggggggaaatggggagtgactgctaatgggtcaggatttctttataaggtaaggaaatgttctaaaattgatttattgatgattgcacaactctgtgaatgtactaaaaaccactgagttacatactttaaatggggtatatgaattatatctcaataaagctgttcataaaaaattatatgaagctcatggtaaggcttcaataaatcacaattctaatttaaaaaataaaagagagtgaggctctggaaagacttggcattaaactacttgagcttctgaggtcctaaaggaatgtcacctattccacagtaaagacaagtcttcagattgcagctgataaaaaaattccaagtccacccgggtgttggagaacctctctggccaagacaaatccaaaaaaagaaaaagaaaaagagagagaggatgaaaaaaatgcaaatagttcccaattaatgtagataaattttaaaatgcattaaagtaatggtaaagacaataaaaagatgctgtagaaaaaaaaaaaaaagaaaaaaatgcaaatattcgaaagaaagataaaactgatatattacttaaagaaaccagagcagcaggggacaccagctgccttggtcatgaggtctaaaaaagaagaggaaagatgcccagagagagatgccaaaatatgaaccctgacccatcaccagtctaagaccagtactggctgagtcaggactagcaaaggttactcaggtcttcaccctgggtctatctgtaggccttcctctcacccctgggactctccactggttgagggacctggatcatcaaggaaacgagaaagaaacaggaataaacaaaagtcagcataatgaggaggagcaaaccttgcccaaaccagagagttcccagactcttcctccatcccttggctggttgcttataggaggttaaaacagtctagtctaagccagtagaaatagaaaataatagctaacctctgagtacttaccacatgccaggcactgtgcttcatattttatgtgtattatctaatttaatcctcacaactaccttatgagaagggtgcaattattatcccagttttacaagtgagaaaactaagaatgaagaaattaagtaatttgcctaagtgagcttgggcaaagcagacatcaaagcctgattagagcccaccttagtcagattcccagagccatgctcttttttttgtttgtttgagacggagtttcactcttgttgcccaggctggagtgcaatggcgtgatctcggctcactgcaaccgccacctcctgggtacatatgattctcctgcctcagtctcccaagtagctgggattataggtgcgcaccaccacacctggctaattttgtatttttagtagagatggggttttgccatgttggtcaggctggtctcgaactcctgatctcaggtgatccacctgcctcagcctcccaaagtgctgggattacagacgtgagccactgcactcagcccagagccatgctcttgaccacaatgctattaacagaaactagtttattacattaccaaaaattgtaatacaattacactgggaggatgggaaggaagcatgtcaggggtgggagtatagattttcctataattcctacaacagaagtcaatagatgtctaaaactgataaatcaattaaaatcactgtaagcatattatttagaaacatggaggtaaacacaaaacagctcaaagagtagaaagtggttacttccatggagcagaacttggagcaggggactgctattttcttttaaaagccttttgatattattgatactttgatactttaaaatcatgcacatatgtgattttaaatgtccgagatcacgtcgttgcactccagcctgggcaacaagagtgaaactcctttgataaaaagtgatttaagaggccaggcacggtggctcacgcctgtaatcccagtactttggaaggccgaagcgggcagatcatttgaggtcaggagtttgagaccagcctggccaacatgatgaaaccccatctctagtaaaagtacaaaaattagctgggcatggtggcccatgcctgtaatcccagctactcgggaggctgaggcaggagaattgcttgaaccagggagatggaggttgcagtgagccaagattgtgccaccgcaccccagcctgggtgacagagtgagactccatcctccccctcccaccgcccaaaaaaaaggtgatttaaggccaggtgcagtggtgcacacctgtaatcccagcactttgagaggccgaggcaggaagattactttaaaccaggagttcaagactagcctgggcaacatagtgagaacccatatctacgaaaaatgaaaaattagctaaacatgttgagtatgcctgtggtcccagctacttgggaggctgaggtgaaaggatcccttgagtccaggagttcaaggctgcagtgagctatgatcacaccactgcactccagcctgggcaacagagtgagaccctgtctcaaaaaaaaaaaaaaaagtgatttaaagaaggatggaaagaaggaagagagggaaggagggaaatgaaatcagagatcatccatggtaaagtctaatgtcatagacatctgttcttttgccacgcagcttccattcccctccactgataacaacacttgggtctttggagaatctccttccatcactgtaatctggggggggccta

SEQ ID NO: 1879750 - DNA, 4001 bp, Homo sapiens
gaggacaaaactgataggctaagtatctcaatctatgttttatgaagcactaattgtgtagttgctctacgtaatctaggggccatatgaaaatgtgtgaagggagactaattattacaatgattggggtatgctactggtatttaatgcccagggtccaaggaagccaaacattctgaaatgcatccctcacaacaagaactattcacctaaacatgacaacagcaacattgttaagaaatactgcctaaatctcttctttttttaaaaatgacttgcccaaaatcacacatataaagatagcagagccaagcacagaacccacttaatgacttaggcaagccacttaccctctctcctatgaagtgagcctaacactaacctttgctgattctgagtccagtgctcttttcacttaaaccactgtctaacataaatgacgttaagggtaccaagttctggattttgtaagctattcctttcatggacatctgatagtgtttataaaaacctcagttttgtttttttttgaaatggagtctcgctctgttggcaggctggggtgcagtggtgcgatctcgacccactgcaacttccgcctccagattcaagtgaattctcctgccttagcctcccgagtagctgggactacaggcacgcaacaccacgcccagctaatttttgtatttttagtagagacggggtttcaccatgttagccaggatggtctttttttttttttttttttttttggagactgagtctcactccgtcacccgggctagagtgcagtggcgtgatcttggctcattgcaacctctgccgcccaggttcaagtgattcccctgcctcagactcccaagtagatgggattacaggcgcctgccactgcacccggctaattttttttgcagtttttagtagagatggggtttcaccatattggccaggctggtcttgaactcctaaccccatgatccacccgccttagcctctcaaaatgctgggattgcagccgtgagccactgcgcccggccgaggatggtctttatctcttgaccttgtgatctgcccgcctcggcctcccaaagtgctgggattataggtgtgagccaccatgcccagctttttttttttttttttttttgagacagtgtcttgctctgttgcccaggctagaatgcagtgatgcgatcttggctcactgcaacctctgcctcctgggttcaagtgatttgcctgcctcagactcctgagtagctgggattacaggcacctgccactgtgcctggctaagttttgaatttttagtagagacagggtttcaccatcttggccaggctggtctcaaactcctgacctcatgatccactgcacccggcctttttttttttttttttctaagagatggggtcttgctctgtcgcccaggctggagtgcactggcatgatcttggcttactgcaacatctgcctcccgggttctagcagttctcttgcctcagccacccaagtacctgagacttcaggtgcacgcctccatgcccggctaattttttttgtattttagtagagatggggtttcaccgtgttgcccaggctggtctcgaactcctgagctcaggcaatccatccgccttagcctcccagtgtgctaggattacaggcatgagcgaccgtgcccggccaaaaaccttagttttatatagtgccattccttccacagatttctaagtattttattttccctttggtcatactcctgaaatagggaagaacagaattatgacccttaatgtaaagtttaagaaaccaaggcccagagaggctgaacaacctattaaaggaaattctgcaaagcaggagcaggacaggtgagataccatgtgctacctctcctacttatagatcagagttttatcagaggttcagcttaccctgtccacaggccttgggtcacactgctcacaaaggtagtgctccacatctgagttcactcccatacaatcacagtgctgccatacctgtagaaaaacatacagtttggggaacatggaggctatgacttattgagagtgtcctgggagcccagaataaaaaattagcaataggtcagggtaaagtaaaagaggaactaagggataactgggtgaatgataaattagagataaatggtaaaataggaggaaaacaaaataatgactgttctaagcaaaagtataccgattgactcataatctatagatctgggcaaataaaatggggagatggacagagaataggaaaacaaatagactactgaactattactaagtaatttaagtaaatgctacagctattctgctttcagaatacagctacaaaatgttttatttactcctgtctaactttagcctcccaacaatcctgtgcgttacttacagccactttacacataaagttatgcattcacatatattagtggggacactaaggctcaaatccaggctttgacttcttcatcaggagccctacatgtattaacatatttcactctatcagaggattcaattaatagagtgtattatcactaatgattcaaaaggcaaagcactatatgaaatactgtcattttccttgatccagattatgtgagaagtgtacagtggaaagtgggcagaaagaaggaaagagccaggcgtggtggctcatgcctgtaatcccaacgctctgggaggccgaggtgggcagatcacttgagctcaggagttcaagaccagcctgggcaacatggtgacaccccatctctacaaaaagtacaaaaaattagccgggcatggtggcacgtggcacatgcctataatcccagctactcgagaggctgaggtgggaggattgcttgagcctgggaggcagaggttgcagagagctgagatcgtgccaccacactccagtgtggatgacagagcaagatcctatcttataaacaaaacaaaacaaaaaaacaagaagagaggagagaaggaaagaaaaagaagggaaggataaagtgaaagaaagataaaaggagaaaggcaatatagtaaacacagaaacctaacagaaaccaaggctaagttacagttcataaacagtctttcaagccaatccaaaagaggcatgggcttcttctttgaatatggtcaccgtgttcatcaggaccaagcttctgcttcatttcctgaccctcaccatgcacttgtcacactggatcatgagaccttcatccttgtagaggccacagatacagcgaataacatcgtcgtccttctcatgcccattctccttttcagagactgaggtctcactgctgtctgcctcacttgctgtctctcccacaatctcatcaatctgggctgatgcctcatgccgggcattgtaataggcctttcgtagacgacaaacatctctcccaactggggatttacgcccatagtacttctgaagaaagcaaataaagaaatcatgtttggttctctcaatgtggcttaacaatttacctaaagaggtagcaaggtagcatgactttctttaccctcccattttggttaacagattttcaatagtatcaaatatatggccagatagttggtaacaacttaaactgaactaaaatgaattcaagttagaatctgcatgttatttttccatttgctcaactgatctgtcattcaattcctgtcacgggccttcttgtccccagatcaaatacacagagatcatgaaatatgaattgatatcacaagcataatgtactgtagaagttcaacatacacctttgtcttgtggatatctgtgacagatctacaggtgttgaatctatgtggaagctgggtttcagtaggaagaatgttacaatttaagattgctctaactcttctcccgcttgtctatttttctttctcattttgtctttcaacttctattattcctttatctagtaggatcttttgtcttccaaacacctctccaaggcatgtcaa

SEQ ID NO: 1879751 - DNA, 4001 bp, Homo sapiens
tagaaaatacaggcaacatggcagggatttgccatgttggccaggctagtcttgaactcctgggctcaagtgatctgctcatctcagcctcccaaagtgctaggattaacagacttgagacactgcgcccggcctccttcctgacttttaatgaggcttgaaagttggggatattaaaatactatccatattgagggcttatagaactacagaagttagaaatttaataaaacaaactaggtaattataaatttatgttctttctaatttgttttatgggggtgcttttttactgaaaacttctttgaagtcagatttggtagtatagcagctctacctctccctgatatccagtttaaatacttcctcatttaataatttaaacatctttaatttctgttataaaagtaatacgtgttccttaaagagaatctagaatttagagagaaacggaaaaaataaaatgtttcttaaaatgagttcacagcctgggggtcagggcagtgatccaccagagcctactgtgtgcactgccttcccacccacatccacagaagccgcagtgcctacctgggtctcctgagctgttgctgttcctctcgctctctccatcttcctggccatctgcattctgctgcgtgtgctgcaggctcagcttgtggcagacctcaaaggcctgccccaccgtccgaacgattctcatagcttggctctgggaaggagaaaggagaagaacaggatgggtgaggatgcgcaaggggcatgtggatagaaactcatgaagcagccaaagaaagagacagaaaaatctaaagttgttcagatatgcacatacaaatgagtgcaaagacatttcccctttctgaaatactccagaaaacagaaactgtcaccacagtgctgaaacaatcagtcaactgaaaggacagatagcaaatatgccagttatggacttagccccaattcttccctcccatgtgtaacagaagtagtcaatatgcttcagaatcttttgccagccatgataaaatgttcaatgggtccatcaaactaagaggaactcggctatcatttttttcttttttgaatgctgctgcaaatgttgagtttccctggagctcctgcagaccaagggcagtggtaacatgaggcttggaagccatggcctaaacagcagaaaccaatggaagctcagcacccagctcctctggaacaccactagttggcagccaactaaatctaaggtgacactttcccagacttactccaaagacctcacgttcttgggtctattctgtggctccttcctttcttttgttttggtatttaatctcttgctttaagagcccaagaagagaacttgaccctagttcccagtattccaccatttaactaggagaagagagagaggacaaagaagcctgctcctatgtagagtcttaggccacccatgcaggctgtgaggaagagccacatgcaggggttccagggcatggcctcaaaggtggataactgattatggtttgaagatgtcagcttttgctttctttcaaggacagaaatgagtgatgtggtttatttagagtttcagagctcaggctgggaagggctcagcacactgcttctcttacctcagtgggcctcaagcatcccaccaccatgggctacaatttaatctaattgtgattgtcaccctatactcaagtctaacattcatcgtgttttggatgatctgacttcaggtcagccatggccacctgttgacaccatatagtccatcaatcacatccacctcccacccaccccaggtaatggcagcaatcaagtagggcttttcatcagcatgaggtagctggtattacattacctaactgatatccagtgttttgataagtctagaaggccttgttgaaggtagtaataaaaaagatgagctaatggtaatatgaaatgtataaatgaagctcatattacaatgagctcatctttcttattactatctttgtgaactcctagggaccttggaaccctgtgcatggaacaactgctgtagtccattctctgctgggtataacttctagaattgcttctcctcaagcctggagtcatttctatgttccttctgcttatttcaggccagagcatccatattaatgtgaaaggcatcttgactaattatcatctacatgtcaatttgagatctcagtcaactctactgctccctatattcttcagttcaaatctactcctagaagtaattgttttacagctctaacctttcttagccattagactaactccagagatattctccattggtctctcacctgaaatatcctgacacttctgggagataagaaccttaagcgaagcaggaggagatgggtaacttctgtggggtccaccatcacccagtggcgaatcagaacctctgttttctacatctacccttaatttcctcctgtgtccacagggcaggcttaggccccttctcataccataggcttgcagtgtgtaagacatgactgttctatctgcacaggaagttgagaagcagtaggcatcagtcctaagcaagaagcccctacacttcccactcccaaaacacacaaaaaggcgtgatttagaagacacagtccctaacaaatgtgggctaggaacactccagctttctacatttcctttagccaccaagctgtgctgtgcttaggaggctgtgccaggaagcttaactctcaggtgaaaagggagaagtaaaggctcctacatccgaaactgttattcccctaggccttgagattttttggttcctattccttttatgagagtaagagcagactgcctatggttaatcgtctacggcaaagctcgttactagtttactaaaccttaggtatgactttattctgcctaccactgtcctaccagtgtccactatacagaaaccttcctctactttcttctctgactcttgggaattttgctcccccaggtatctttacaaaaggtaaaaaaggtaaatgttttaggttgtaacaataaaatatggtaagtccaaatgatatgtagagattaagtgtttaattccattactttcttctcttacatgaattaacccagatatctcatactgaataaatatctgcaaagactgagttagtcttttcccgtcggtttcattcccagggtacagattaaaatacagttccccctttaaaatacagttatatagaaaattctaaattcactactgagtttgttcctataacatctcaggttttcctaaggaggacgtgttacaaattccatcatctctgtaaatcacagatacttcctttaaccagcttttaagatgatattaaaaatttaaagatcctcaaacaaatgtccctgatctatgggattagacaggggtaggaatcgaatttctaaatttatctttggaaggaatccctcagatttaaataagaggataaaggtggtgggagaatgacttcacagaggacctgtatttctcaggcatcacaagatgacaatggatgatgggctatgctcagaactgagcatcttaagaatatagactccagctcaaatctctattctgccacctttatcaaggacaaacatgtgcaacatactcacatattcaaccatctataagcccaaagtggctgtaaggaagtaggctggttttaatggttaatattgataacacttcattttcacattttactagtattttttactaggatcagcagctgaccctaacctctacctgattcccctgaaaaagtaggaaatgcagactttaggtttactggttctgccttccccatgctggaaagggcatcccatccttcagcctcccatttccttcctatcctccctccacccgttgttctctacggtatttctgtaactgcactgaaaaactgaatatatgatagcacctaccacagtgcctggcatatagtaaatgctcaagaaatgttttatcctga

SEQ ID NO: 1879752 - DNA, 4001 bp, Homo sapiens
cgatcttcccactttggcctccgaaatgctgggattacaggcatgagccacggcgcccagtccactcttttaactttcaaggctgacagctccttaaatgcaactaggtggtgatttctctacagaactgtgttacttccctaactaaaaccttccttagtttgttccactcattcctcactaaactgtgggaaataagaatcaaacttatctctcccaatcatcttccaaatggaaagagaatgacactccctctttcaaaaaagaaggggttgcttcctgctatacatgatttgctgtacgtagattgatcaatattgaaaaaagaggtttacatgcacaaggaaagaagttgaaggggaatatttccctggagggttcattggaggtatttttgcatgtgtacaagtggattcaatattactgcaacatgatattttcaatttatttataagagatatttaaaagcaacaggcattgtactctctggggacagaagtcccccaaggccaattcctgccttcaccttagcctcacggacagagttcccatcctgaccctctgtgacactttacaacttagtgagattaaaaaagaaggacagacagaattgtggaggttagcagtaatggaaattagaagcattttgcagccacccttttattaaaccttcttccctggctcttctctcccagcgatcatagtactcgtgtgcaggattagaaagttctctggcacagaagcacctttctgatatttcagtcttcaccattcattccgttgacataattaaggctttttttctagactctctctgaaaatgcaaatatcccagagacagaaaagttgaagacatgctaaggaatcaaggtttcaatgagatagaaaattatactggtcataatatttccatggtaatttacagttgattaagcactttcacaggtatagccttatttgatacttactaacaaacatatgacttagaaaagcaggacatatttttggtattatcatttccattttacataaaagactcctgataaccagaaatattgacccaacactcctatcctatgcaagttaaagagctgattacagactcaacacgagatttctgcctatccaagaatggagctggccacagtcagagtcattctcactcttccctctcccttgcctctcctgctccccacactgatcagtccccaagtctgtggccccagaatcccagctgtgcctgggtcccaagtccggagaccctcaccaattttctgcctcattttcccgaagtcaggcaattgcctaaaggaccctgggtcctgtccttccttccctaccctgcaccagcaaccccactctatacaattcaacaataacaaatttttattgagtacctactgtgcgccaggctctaggcattaggatacaacattgtaggatgagatccaaaggtccttcctcccaatcaggactctcttgcttggttacctgccagagttctatggatctttatttcagtggtgaaggtaatgataatgcctaagagttgctggagaaattacaatgcatgagtgactattctcagcatttgacttatggtaactcatccaatccttataacagccctatgaggtattattcatatttaacaaatgagaaaactgagacagaaggaggttgcctagtaagactgcacacctagtaagaggcagagcagaggtagacagaggaacctggctcgcagtctacacccttatctcttaggctaagctgtaaactggtggaagcagtggaaagagaaacaacctttaaaccagtatgtattaatataatacttctctgtgctcaggctaggaagatagaaatgaatctaagtgcctcatagaaggagcttcctttctccacctcctttcaaagacaaggcccacccgtgcaaacacttctccagcagcagggagggccccaggcctccaaatttactgttcatttgcccattctgtctgcacacccttgatctggccctgcctttctgatcaccactaatgctgggccctggctcccaagaatctcccaaagcccccttggtccgataacactttggctgtgtgcctccaactcaacccaacactctgagacccatttctgatcatcagctctcagccttcacactctctgacttatgtaataggtcagcccatcccaaattaacctgcaccttcccccacctggaagtgggttaaaatactagctcagacttactacctatcagcacaatatgcatgcttgactcatatttgttcctttgattcactttcattcatttatcccttcaacaaataatgtgcacctactatgggctaggcatgtataacatactttacatgcattgtacctttaaattctcccaaggacaccattaggtttctatacttccattttatacatgataaagctgagttctcagcacttttatcaaagaagaatttgctatccacgagcaacttgaggtgggcctacctttcaccttcccgccccaggccttcaacaggcactcggcagacagttgttaaattgcgctggattaacaagccagctgggcactgtgtgcagcctacctcctgatgacccccagtggagatcttgctgttcagggccctctcttgttcatattcacttagtaaaaattggcctggatgtctcctgcattatcagcaaccaccaggcacagtacccaagctttgcaaactaggaatgtttaaaaatttagctcttgccacatctctagcagaacagaaccaaaagcaatcatctgacgttaggaggtgccacacacaagcaatgaggacctctgccagcccagcttcctcctggggaggtgagctttctgcctgggcacatggaaaaataacatgtatgatatgtgctcttttctttgccctggaggccttgacagccgtcagctctgttctgacaggtcctaaccataatgaaccagtaatgcttcttcaggtccttgctaagcattagatccctaggtgatgctatgtaccaggggagatcacccagagactctgatcccaaggcagcagccttattgggggattttagcccaggattttctccaaacacaggggcactaaaagtcaggcctgacctgactggagggtttagaattcagagccaattgaccaaacacctccaaagagaaaagcaaatggttttctaaagacagtggttcttgctgtttcctcttaggactccattaataaaataataataaaaataaagtctcattaaaagaagatatttagtgctcgcttcagcacacatatactaaaaaagaacatatttagaacaattattcccttcagcaggttgtaattcctgtaactctcagggaacagctttgggctctgcatcgcgactcccacgcaggacacaatctgtctgtctagaagggaatgagtcagcctgcagcaggagggaggcaggctgcagcatcctccccatgaaaagtccacagccaacctgggttttcttacaagatgagcttttttttttaaaattatactttaagttctagggtacatgtgcacaacgtgcaggtttgttacatatgtatacatgtgccatgatggtgtgctgcacccattaactcgtcatttagcattagatatatctcctaatgctatccctcccccctccccccatcccacaacagtccccggtttgtgatgttccccttcctgtgtccatgtgttcccattgttcaattcccacctatgaatgagaacatgcggtgtttggttttttgtccttgcgatagtttgctgagaatgatggtttccagcttcatctatgtccctacaaaggacatgaactcatcattttttatggctataaagacacatgcacatgtatgtttattgtggcactattcacaatagcaaagacttggaacaagatgagcttttaacccaataagcaagtcccttctc

SEQ ID NO: 1879753 - DNA, 4001 bp, Homo sapiens
acagaaactagctaggcatggtggcacatgcctgtactcccagctacttaggaggatgaggtgggaggattgcctgagcccaggaggtcaaagctgcaatgacccatgatctcaccactgcactccagcctgggcaatccagcaagaccttgtttcaagaaaaaaaaaaatttcatattcctgaagagggcaaattcaagttatttccttttgcttaagtgccatatttatttccacctttgctcaccactaaacagtgtctggcacacagtaagtactcaaacatttgctgaaataatttattattgactcatctcactatatggggtatggcacactggaggataaacatgtactatactgggtacaaacttaacaatgtacatagacaccatgctctgtccccaccccaatctgccagccctactgagatatcagtcagcagtagtaagggacttggagcagacacaattcctgactaaagatggcaggagtccaagagccttaactgaccgctcgtgtgccattcaggcacactgaattttgcttccctagaaaggaaacaaatcagcttcactctcctttcttggggcagatgagtgcctaaggccaagggagatcagccagatattaaatcagagggaagacaaaaggacagcaataaaaagcaggattctgctttccaaacagaaaacactatttgcgaagcagtaactaatatcgaagatttttacaactactactatttttctggaaggagatagctcctaggataggaagaagtattgttcctatggaaatgtgctagaaacttgcaagaagaaaatgaagtttagctcctctttaactcctttttatcagtcaccagctaataacatcattagtggaaatgaagaactacctgaaataaacagctatctacagactattaatcagtaatgggaaaaagtccccgaaactttcaaagagtttcctccctactctagacactatgaaataagaaaataatcactactttaaaatgacactaggccagacaccgtggctcatgccagtaatcccagcactttgggaggccgaggcaggtggatcacctgaggccagtagttcacaccaacacagtgaaacgtgtctctactaaaaatacaaaaattagctgggcacagtggtgcacgcctgtaatcccagctactcaggaggctgaggcaggagaatcgtttgaacccaggaagcagaggctgcaggggctgagatcgtgccactgcactccagcctgggtgacagagcaagactgtctgaaaaaaataaaaaattaaaaaaaaatgacactggagtaaatttaataaaagcaatacagagcatgacatttaattatcttgacaattaaaaaaatttttaagaatatatttctctgttattcgtgataagctagcaccagtcttactacagttggtcaaataacctatagcctttcaaaaatatatgaagaggtagatatacaatttttgctaattcttactacagttatgcgattaggatggtgacttctggtttgcagaaaaatgttaagcagcagtcctcagtcattatttgaaggaaatactatttctgcagtctagaaaacaccattaccatcaacaagaaaaactcttaaaataattgaagaaccagctgacgccaatcaaggaggttcaaatcaggtagagttaatcctacattacccccaggcactgtcatatccatgaagctaacaagtttaataccttgggtgcatgaaggaataccctacagatttgtaaaccaaatccagaagcaaactggagaacagggaatgccacccatcccttgcattgccccctttcacctgctcagcacgcagtcttccaggaggagtagaacgaatgtacagtttctagaatgagaactcttaccctggcttcggaacttctaggaggcatggaaacaggtatgtatagggtctccatttctcctggaaggcttgaggccagcaaaactccttactctagaaaccggacattatactctttaggtcaagctgcataatttccaattatctgagttaacaatccccagcatgatcatacaaaccccaggcagagtgaatgctgaaaccctctctgggtgacacctggcctctctgtccactgacgtcattcctatctcattatgtactgcaaaaaaacatggtgcaccaatgttacacgttacctatgaagacactctcatattttacaggctttatactgttcctccagtatctgaagtcagcatattgctgagaaatacagaaacagaaaaatcacaagcaataaaaaaaacttgtatttaaagagaaaaaaaggcatgtcaaatcagttctctccatccacaaagaaataagagtaggcaaagatcagaattaccagcagaagactttatcccactttacagcttcccaataagtaccagtggcatttttcaaatactattacacagattccatttctatttctccttttcctcttctaaaagtattccatattcaccatatgaaacaaggtttttatggaataaaactattctacactagaaacagtgagaagaatgtcctggagtcttccttgagggttactctaatgcccaccaattcctccctttgagcaaattagcccgttcacttggacctaatgactttcttgccatcagcaacagaaagagtctgcagcaatcctaaagagtttttattctaggcaattcccttcacagcaatggtcatgggagctgcgggggtgggatccctgccactgacctgtgccggtttttattctttcgctttttatggctgctgtggtgactccctgaggaagtagaagaagcagccttctgaggtttcactccctgcacagatccatccagatcctcagggtcctcctggctgggctcattttcctgattgtggaagtctggagaagtgtcactttccgtcccacttcctggctcccctgaaggaaataaaacacaagtttccaaatgcatcatcagtactcctcaggcaatctgtccatcaacatgaacactaataggtagaaaaaaaccattccctatcctctaattgacagagaagatacatgttgacagagaagatacatgttgacagagaagatacatacaaaggatccaagtgaccaaaggtcctgaaaaagcatgtaatctgaaacaatgtaaccagagagaacagctctaagggcagtttttgtttttatagagatgagagtctggctgtgttgtccaagctggtcttgaacacttggcctcaaaccatcctcctgcctcagcctcccagagcactgggatcacaggcatgagatactgtgcctgatctatagtcttaaaaatatatatgtttacacaagttgttattgagtttgcttttattaaatgtaatctacagtgatgtacaaaaaaaactacagtgactgtacaaaaaaaaagggggggccaaagagggagaagacagcccattcctgaattactctgataagttttccattgttttttcttgttttttttttgtttgtttgtttaacctttaagctctgttgaacttgaacctcgtaagtcttttttttttttttttttttaagacagggtctcactctgtcacctaggctggagtgcagtggtggaatctctgttcacagcagccttcagttcctgggctcagatgatccttacacctcagcctcccaagtagctgggactgcaggtgcccataagcataagccctgctaatttttctattttttgtagagatgtggttttgccatgttgcccaggctggtcttgaactcctaggctcaagagatccacctgcctcagccttccaaagtgctgagattacaggcatgagccaccacacccagcctggtaagttttattttatttcattttatttcgagacaagatctcactctgtcacccaggctagagtgcactggtgt

SEQ ID NO: 1879754 - DNA, 4001 bp, Homo sapiens
aggtggtatgagagatgccgagagagaaaagtgtttcaggagggtgaccgcagggttaggcgaagagatgttaagaagggtgaacaccaacatggacttggagatgtggatgaacaatctttaggagaacagattcaccaaagaggtaaggactgtggcagaaatgagccagtggagagaatggaagtggttaaatataaaaaagcctttgagcagtgaggcagtgaaggggacagaagctcaaggagtgaggagggtttaaagaatgtgttttttaaaatggggaaggcttggtccagttgcatttttgtgacacacacaaggagacatcttcacttcagctctgtctcacagggctgttggcaatgccttttcccatcctgggggctctcgtgtccacagattcccagggcctaatgtgccaggcaccctggaggaagcatccctctcaatgtgtgacaacatgaacaccttggttttcttctcccttctttctgccctgcttccttctcttcctttgcttatttacttgctgaacccctccttagtgtcatctgccttgaggggtatgactctgggactggggcaggtgagagaggaccgccaggaggcgcctggagaggctgctgtagcaatgcagttgtccatagcaggtgggctggagaggagagtggatgtgggagagggatttgagactaaccagacatgggtggagggaaatgcaggggcagagctggctcagaagtcccagctttggggtgccagcgaggggtcaggagtgatgcccgaggtcttacttttcagagccagagctcggtgcatcaatgactctgaagcaagcactccatctcggggtaacatgatcctgtaacgcagggctcctctgatgtggtctgcttgccttttacagcattaggggagcaacatttcatggaaaattcaataaatccccctgtacagccagacgtctgtaaacaatggcttccaaattcaatcaggctggggacccgcagcagcatttatgagctctaacgtggaatattatataggggagtgagtagcagggggctgggggaagggacttcctggaagaagaaagctcctgtgtggctcctgctctcagatgttgcggtggaggtgattctccaggtagaagtcctagccatgcgacctcttaggctgggcctggggggccactgagccatggctctgggcctggggaggaggacagggatctggccttctggtactggccatgaagaggctgggtggccggaagaaccaggaccgagagtgagctcgccagcttctcctcccacgtcctgcagcccatgcttacctggcaagcagtgtgagtcatctcgggtgcttattgtctttgtcacaccttccacctccttttacaaaccttctacccactttggttctatggtctggtgatgatcttcagagaactagcccctttctctctcaggttcagaatgcccctcactcagttcagaaaggtttgcaatgaggtaggagaacatgcaagaaagggtttctcctcgtctctactataaatagaaaattagccgggcgtggtggcgcatgcctgtaatcccagctactcgggagactgtggcaggagaattgcttgaacccaggaggtggaggttgcagtgagccgagtttgcgccattgcactccagcctgggcaacaagagtgagactccatctcaaaaaaaaaaaaaaaattgggtttctgatgaagaggttgcagtatgctgttttagggaggctcagaggtctcacccatctttaggccccctagatatctcctctccttggccctgtgaacccctctacactctggtcaggtctcctagcctctgcacccccacccccactgttgcccttgcaccctctgccaggctttctccagcaaaccacaaggagcataattgggcaaagggaagaactaaaggtctggattcaaatctagttcttcccatttccctgttatggatcttggattagtcacttcctcctctgaatctcaaggtgggaataacgtgaactgccttgctgagtgcctgaggataaaattagataatggatgtaaagtgcctgaaagttaatggcatggaatcagcatgaaatacacagtagctttcttctccacaattcttctcctttcaaacctcccttcaataaagcttcttttaatcctcagaaactgccctccctccaaccgaaggtaccagatgtcccgtcagctcttctctctgtcctgcacatctccgagttccctttgtgactggctcttctgtgaggcctgatttgaatccaacaggaagagcatagaagatcacaatggaccatggccacatggaaggggtggaggcaacgccgaggtgtcccgcttgccttcctagagaactacggcgtaagctcctcaagggcaaggattttagcccgctttgtttgtggctctattcccagggtctagagccatgcttgacacttggtacatgctcaataagtatttcctggttgcattaactcattcagcatcttctcaccattttcctgtggtttttctctgtacccagtgggagaatggagagattgcattccaggacatacaacaacccctcctggaaatcagaaatcctctcttccttcaaaatgtccttggaacactggtcaggcatccgccgtggagtgggcatggagcagaatcacagccacaaggcttctccttgcagcccactgctagaaacaaacatgtcttggaaggcaaagttccacaaggctttaggctaatccatgcccagcctttggagattgaaaggataacttccagaaaggtgagctagagatgcacttccctccttctccggaggacagttctatagagccctcagtcaatcttaaaacacagggcaacagggaggaaaaggttggctagccccagagcaatgctgagtggcatttataaaggatttatcgtgtgccagactctgcactcagcacttacatgcatgaactcattaaaacctcgtgctggctagtactggtattagtcccattttacctataaggaaactgaggctcagagaggttaaatagcatgccaagatcacagggccaagaacaagaggaacagggtgatcccaggtctgtctgactccagagcacaagtgactacccactataatctacagcctcagaagacagggatggagagcagtccttggctcagatggttctggggccccggcagagatcaagcattttcctgtctgctcctgctctgttcttctcccacccccgctccagttcacagtgggcaactgagatcattgtttgggagtggttgtctcctgtggtcctcccgacctcttgctgggtattccctggggatgaggaggaagatgggacagggtcaggggagagctgctgctctctgtccccagctccacaggccagtgggatgctctgctgtccagctgggaccagttccgggcaactgggcataatgcaagagttctcaccccgggcccaggctggagataggctgcttgctccaccactcgccactgcccagtaatcccactcatctggaggaaggagattctttgggatcagagctggcgttgaccttttggtttttccatttggcaggacgggggaggggttcaagaaggcagatcccagagatatctccccccacagccagatacccagcttttggggttctgggattgactcctgaagtcgttacatgtgaaatgcttgcatgtatttttttttaatgcccaaaacatgatgcaatgtttcctgtacaccccggtcacgtactcttgtacatgcacacacggcttccacgttgacttctgtgactagccccttccgtgctccggcttgcttttgctctctctacttccccctccctctctctctctcattctccctgctagctgctgtaaggatcagtccccaaagaaaaatgccca

SEQ ID NO: 1879755 - DNA, 4001 bp, Homo sapiens
tctggcccagaatagatgatcaatagaattttgactagaaaaggaagaggccagtgattctatggggacaggaaaaaagactaaaatggcattcccgaaatactcttcagggtatcttgtggtaatgagggggcgggggcacctatgtgaacatacaaaggtctccagcttaaacttaaagaatctcgctggctttgtctctaagaaggactgcagataggtcctatgatcaattaaattatttggtgacagactgctctgacaggttagaagttagaagcagcttcatatgcatgatagcagattccctcccacctcctccaccctacatgtgagtctatcaaagtagaaaataaatctgtatcagaaaaaaaaaaaaaaaaaatgggagtgagggtcatcagtgcacaaatgattctgacaaatttagaaagcagatggagacatgatgacagacgaagaagcagtcatggtctagagcatcgctttccaacagaaagatgagtcacataatttttatttttattttttttgagacggagtctggctctgtcacccaggctggagggcagtggcgagaccttggctcactgcaagctccgcctcccaggttcacaccattctcctgcctcagcctcccgagtagctgggactacaggcgcccgccactatacccgactaatttttttgtatttttggtagagacggggtttcaccatgttagccaagattgtctcaatctcctgatctcgtgatcgcccacttcggccgcccaaagtgctgggattacaggcatgagccaccgtgcctggcttttttttttggagatggagtctggctctgtcacccaggctggagtacagtggcgagatctcagctaactgcaagctccacctcccaggttcacgccattcttctgcctcagcctcctgagtagccgggactacaggcgcccgccaccagagtcacataatttagccacattaaaaaacagaagagatgggccaggtgtggtggctcatgcctgtaatcccagcacttagggaggctgaggcggatggatcacgaggtcaggagattgagacgattctggctaacacagtaaaacccgtctctactaaaaatacaaaaaattagccgggcgtggtggcaggcgcctgtagtcccagctactcgggaggctgaggcaggagaatggtgtgaacctgggtggcggagcttgcagtgagcagagattgtgccactgcactccagcctgggtgacagactccgtctcaaaaaaaaaagaaaaaaaaaaagagagatgaaattattattattattattttgagacagtttcactcttgtcgcccaggttggagtgcagtggcatgatctcggctcactgcaacctctgcctcccaggttcaagcgattctcctgcctcagcctccctagtagctgggattacaagcatgcaccaccacgcctggctaattttgtgtttttagtagagacggggtttttccatgttggtcaggctggtctcgaactcctgacctcaggtgatccgctcgctttggcctcccaaagtgctgggattacaggtgtgagccaccgcacccggccttttttttttttttttttttttgtgagacggagtctcactctgtgccccagactggagtacagtcgtgcattctcggctcactgcaacctccccctcccgggttcaagagattctcctgcatcagcctcctgaaattaattttaagattctattttacttaacccaatacatgcaaatactatcacttcaacatataatgaatattttgagatgttttactttcttttttttaattaagacagggtcttgctgtgttgcgcaggctgctggagggcagtggcataatcatggctcactgcagcctctacctcctaggctcaggtgctggcacacacctgtagtcccagctattcaggagcaatcctctgacctctcgagtagctggtacttcaggtgcgtgccaccatgcccaactaatttttatattttctgtagagacagggttctgccatgttgcccagactggtctcaagctcctgggcctgatccaccctgccttggcctcccaaagtgttgggattacaggtgtgagccactgtgcccagcctcagtttctctctctttttttttttttgagacagggcctggctctgtttcccaggctagagtgcagtggtgcaatctcagtttattgcaacctccacctcccaggctcaagccatcctcccacctcagcctccaaagtagctgggactacaggtgcaggctaccatgcccagctaatttttgtatttttggtagagatggcattttgccaagttgcccaggctggtctcaaactcctgagctcaagccatccgcctgcctcagtctctcaaagtgctgggattacaggcatgggccaccatgcccagcctactttcttttttgtgtgtgtactaagggttcagaatcggtgtgtattttacacttagagcacatctcaactcagactaccctatttcatgtgctcaataaccaggggggctagtagctactcaactggacggtacaagtctagaatatggcatgagcgaactggactggaggtgggagcttatctacccagagtgacccaagagagactctgccttgaagtgggcacatatgatagaagatgaagtggggagcaggtatgaataaatgggattaaacaatgacctatgtttatttataagagtcagtccctttattcccctactcacctcatacaacacaccctgaaggattcttttctaaagaaattgagtaaactgagaattgaggtctctaatggcgatatcttagagtaacacccccaccactccctttctggcctacggaggctcaaagcctaacaaccagcacttcactcactcatcctcaaagcaaagcctgccagtcagtgtgccctgcccatgtacttaaagtttccagtcaaagctcttacccccttaaacaatgacagagagaaagaaactgcactcctgctactcagtccttcatttttacatataaagagacaagcaaacaagccaactatacttggaaaacaagcagcatgaaacagaaaaattgaccccagtgaaaagacaaaattgaggaaaataagggaattttttttttttttttgagacagagtctcgctctgttgcccaggctggagtgcagtggcgcaatctcagctcactgcaacctccacctcccgggttcaagcaattctcctgcctcagtctcccgagtagctgagattacaggcatgcaccaccacacccagctaatttttgtatttttagtagagacagggtttcaccatgttggccaggctggtcttgaactcctgaccttgtgatccacccaccttggcctcccaaagtgcagggattactggcgtgagccaccacgcccagccaaataagagatttttaaaacaagaatagtatgctatgagaaaagaacaatcagcaaacatagaggccttagagatgaaaaatatgattgctgaaaaaatctcagtaaaaaagctagaagataaagttgaggaaatctctccaaaggcaatgcacatacaaagagagagagagagagagattaaatattagagaaatataggagaaaaagatgaccaatctatgaggtctaccatctgatgaacagaaatccagagataatagaaaaaattaaaaggaagatattatcaaagaaatatcaaaggaaaatttccccaagctaaagaagtactcaaatctccaggttaaaaaagtcctagagtcctgaaaggatgaatgacaaacgtcccacaacagacacatcctttgaaatttcaagtaatcaaaagataaacagaatattcctcaatgctttcagaaaggaaaatacaagtcatctataaaagaattggaatcaaactcaaactggcaccagacttctcact

SEQ ID NO: 1879756 - DNA, 4001 bp, Homo sapiens
ctgcctagttttcacttctgccattacactcttaatttccaagagccctatcctctgaatactcctgtttatggtattctactcatttccccaacagattatcatctctatttctctaccaatattcatgatatattttaaagtttcttcaaaaagagctgatgggacaggctgagtgggtaggtagggcttgtgcacaggggccataactgttcagtaacctgtcagtaccgcaggtctttttgcttggattagtcagactctacaagaaagtatcctacaatttcccgcctatataacagaagagttaagagcctatgctctgatattaggctgcctggcttcaaattgcagctccaacggcatgaccttgggcaacctaaccctaacttaaccttccttttgtgccaggttttttctttggctttttttttttttttttgagacagagtctcgctctgtcacccaggctggggtgcagtggtacgatctcagctcactgcaacctctgccttccaggttcaagcaatcctccctgcttcagcctcccaagtagctgggattacaggcacgtgccaccacacctggctaatttttttttttttttttttgagacagagtctcgccctgtcgcccaggctggagtgcagtggcatgatctcgactcactgcaagctccgcctactgggttcatgccattctcctgcctcagcctcccgagtagctgggactataggtgcccgccaccactcctggctaattattttttgtatttttagtacagacggggtttcaccatgttagccaggatggtcttgatctcctgaccttaagtgatccacctgcctcggcctcccagagtattggcattacaggcatgagccacagtgcccaccttgtcccagtttttaatcaatcttaaaaaggagaaaataatactacctacctcctgattgttgtgaggattaaatgaaacaatacagatccaagacatagaactacatttggcaggccaggcgcggcggctcacgcctgtaatcccagcactttgggaggccaagatgggcagatcacgaggtcaggagatcgagaccaccctggctaacatggtgaaaccccatctctactaaaaacacaaaaaaattagccaggcgtggtggcgggcacctgtagtcccagctactcgggaggctgaggcaggagaacggcgtgaacccaggaggcggagcttgcagcaagccaagatcgtgccactgcactccagcctgggcaacagagcgagactccatctcaaaaaaaaacaaaaaaaaaaactacatttggcaaatagcaaacatgctatgaatatagctattatgaatgttgcaaattatgttactagaattgtcttttgttttttgatttttgagacagtatctcactctgttgtccaggctggagtacagtggtacaatctcagctcactgcaacctccatctcccaggctcaagtgatccttcgacctcagcctcccaagcagctgggactacaggcatgcactggctaattgtttttttgtattttttgtagagatggggttttgccatattgcccaggctggtctcaaactcctgggctcagaatctcgaagcgaacctgtccactttggccaattccaaagtgctgggcttacaggtatgagccactgtgctcagcaagcaattttttttttaatcaacaaaacatcaatttcaaatggtttaatttacaattgctattctattcaatctgtttttttcccagaggattttctttctggaactctcctcctcttatccagatgaaaaatctctatttgtgaagctattattctgaaaacttcttcatctctttcctgggttagatcccctatttatttctcgctttgctttctaatctttctggagcgtatcctcaagcgtttcatgataaagggttgatctctcatacaccctttatcatgaaactacttgagaatatgctccagtaggattcgtgggagatcaagtaagtttgataggcgcatgggagatcaagtaagttcgacgatgttgttattcttccttcaattattaatggcttgagaaaattcttttcaactcaataatttcaaataattttttttttgcggggagccggggggacttagtttcactctgtcacccaggctggagtgcagtggaaagatcttggctcactgcaacctctgcctcccaggtttaagcaattctcctgcctcaccctcctgagtagctgggattatagatgcctgccaacatgcccagctaatttttgtatttttagtagacacagggtttcaccactttggccaggttggtcttgaactcctgacctcaggtgatctgcccgccacggccttttaaagtgttgggattacaggctcgagccactgtgcccagcccaaataatttttgaaattattcttttaagattataaaggcacttcttcattgtttgctggcattcaacattgctgttgaaagtctgaggtcattctaatccttgttcctttatgtgtaacctgcttttactttctagaagatgtgtagtatattatcttatccctagtactctggaatgcccagtgatgacagtatctttttcattcattgtacagaaccttttaaatgctgcctactagttttcaacaagttaaaaaaataactttgctattgtaaaggttttcaaataaatatttgtatataattatatatacatacttttttttttgagactaagtctcactctgctgctcaggctggagtgcagtggcaaaatcttggctcactgcaatttccatctcctgggttcaagcgattctcctgcctcagcctcctgagtagctaagaatacaggtgcctgccaccatgcccagctaatttttgtatttttagtagagatggggtttcaccatgttggctaggctggtcttgaactcctgacctcaggtgatctgcctgcctcagcctcccacagcgttgggattacaggcgtgagccaccgcgcccggtcaataatatttataaataatttctttctgttttgagatggagtctccctctgttgcccacggtggagtgcagtggcacgatctcagctcactgcagcctctgcctcccaggttacagtgattctcctgcctcagcctcccaagtagctgggactacaggcatgccccaccatgcctggctaattttcgtatttttggtagagacggggtttcaccatgttggccaggctggtctcaaactcctaacctcaagtgatctgactgcttcagcctcccgaagtgttgagattacaggcgtgagccaccgtgcccagccaaatacttctgaataaaatttttttttttgagaaaggatctcggtgtgttgcccaggctggagtccaatggcatgatcacaggtcactgcagcctctgcctcctaggctcaaatgatcttcctgcctcagcctccaagtagctgggaccacaagcacatgccaccacacctggctatattttttaaatcttttgcagagacagggtctcactatgttgtcaaggtgggtctcagattcctggcctcctgcctcagcctctcaaagggattacaggcatgagctactgtgcttggacttcaaaataaatattcttggccaggtgcggttgctcacacctgtaatcccagcactttgggaggtcaaagcagagagatcgcttgaggtcaggagttcaagaccagcttgaccaacatggtgaaaccccatctctaccaaaaatacaaaaattagcgagtgtggtggcgcacacatgtaatcccaggtacttgggaggctgaggcaggagaatcacttgaacctggcaggcaggggttgcagtgagccgagactgcaccactgcactccagcctgggtgacagagcgagactctgtctcaaaataacaacaataatataaaaattaaaaagtaataaata

SEQ ID NO: 1879757 - DNA, 4001 bp, Homo sapiens
aagaattaaatagttaatgtataaaaagtattcagaacagagcttggcaaagagtaaatgctaagcaaatcttagatgctactactgtcattatattgatgaaaaaacaatggggatcaggatcaaataagaagttcaatagcaggaaaggatgttgaccgttattcatattttctgttttattagaaagagatattttatcctttttcaataaattgaatgtatgcatatattaaatggctctacattcctcttaaaagacatatggtatatatataaggggaagaaagaagaaaagagcttgaggctagaaatggaaaaccttactgtgaactaaaatctgatattgaccttgcacttgtaatcccagctacttgggaggctgagatagcagtatagcttgggcccaggagttcaaggttacaatgttctatgattgcaccactgcactccagcctgggtgacacggtggtgagaccctgtctctaataataataataataataataaataaaaactggctgggcgcagtggctcacgcctgtaatcccagcactttgggaggctgaggcgggcagatcacctgaggtcaggagttcaagaccagcctggccaacatggcaaaaccccatatttactaaaaatacaaaaattagccaggcatggtggtggacatctgtaatcccaggtacttgggaggctgaggcaggaaaattgcttgaacccgggaggtggaggttgcagtgagccgagatcgtgccactgcactccagcctgggcaacaaaagcgagacactgggccgggcgcggtggctcacgcctgtaatcccagcactttgggaggccgaggcgggcggatcacgagctcaggagatcgagaccatcctggctaacacggtgaaaccccgtctctactaaaaatacaaaaaattagccgggcgtggtagcgggcgcctgtagtcccagctactcgggaggctgaggcaggagaatggcgtgaacccgggaggcggagcttgcagtgagccgagatcgcgccactgcactccagcctgggcgacagagcgagactccgtctcaaaaaaaaaaaaaaaaagaaaaaaaaaaacaaaagcgagacactgtctcaaaaaacaaaaacaaacaaacaaaaaactgatattggccagctgcaatgttattcagtttctgtgcctgtgtttctacatctgtaaaatgaggagtataacacttactacaaggcatttgacaaaataaagtattataaagaaaagtaatatgtgaacttagactataattggtagtttctgaattgttgattgcttccttaaagacaaagaaagtaatctgtcacagtggtagagttaaagataaataaataaagacaaaggaaggagaagataaaaaggctacttttaccttctttgagaagagtaaagactccttgtttatccatgttcagatccaaggataaatgagagcagtctgtgaatgccatggcttctttggtctctttatttatgtgatacattgcaatgggtatttctataatctggccaatctccacatcagcatgaaatggtaacagttccattttgttcagtttcaggacatgtatctggaggggaaaaattcatctttcaagaaagttatgttaaaaaaaagtcttaggaggaggagaagcaagatggccaaatagaaccctccagtgattgtcctccctgcaggaacaccaaattgaatgactatccatacaagaagtcaccttcataagaatcaaaaatcaggtgagcaatcacagtacctggttttaacatcatatcaaggaaggagccactgaaggggcaagaaaagagtctagaattgccaacatcacctctcttcctttcccaggcagtggcagcagccacatggggcagagagagaatctgtgcacctggggagtacagtgattgtgggactttgcattccacaatcactgcactcccccaggtgcacagatttggagctcagtgctgcctactacagtggaaagcaacacagggcagaattcagtcagtgcctgtggaaggagcatttagaccagcgctagccaaaggggaattacccatcccagtggtctgaacctgagttccagctaaccccgacactgtgggctaaagcactctggggtcctaaataaacttgaaaggctgtgtaggccacaaagactgcaattcttgggcaagttctggtgctgtgctgagcttgaagccagtggacctgggatgcatatgacctagtgagacacctgctggggtggccaagagagtgcttgtaccactcctccccacaccccaggtgcacagctcataactctgtgagagtttctccttcttcctactagaggagaggagaggagaggggagagtaaaaaggactttgttttgcaactcggataatagctcagccacaatagagcatgaggcagagtcacaaggcccccatttcagacactaactccctgaaaacatttctatacacaccctggggcagaagggaacctgctgtcttgaaaggaaggacactgtcctggcaggattcaacacttgctgattaaagagcccttgggccttggccgggtgcagtggctcacgcacgtaatctcagcactttgggaggctgaggtggacaaatcacctgaggtcaggagttcaaaaccagtctggccaacatggcgaaaccctgtctctactaaaaatacaaaaattagctgggcgtggtggcgggcacctgtaatcccagctatcaggaggctgaggcatgagaattgcttgaacccggggggtggaggttgcagtgagccgagatcacgccactgcactccagcctaggtgacagagcaaaaatccgttaaaaaaaaaaaagagcccttgggccttgaataaacatttggtggtttccagtatttgatacaggccttaggtgacattcagtgccatgctggcttcaggtgtgactcagtacattcccagctgtgatgaccatgagcagagacttcttctgcttaagaaaaggaaatggaaaagtaaaggggactttgtcttacagcttgagtaccagctcagccatagtgaggtagagcaccaagtgggcttcaggggtccccaatttcaggccttggctcctggatggcatttttggacctgccctaggccagaggggagcccacttcactgaagggagagacccaggcctggtagcattcacaagctgactgaagagcctttggacctttaatgaacattggtagtagctagtcagtatttgccacgggtctggggcagttgtggccacaaagagagactccctcagtttgaacaaaggagagtcaagaacgagaagggggctgggtgcggtggcttacacctgtaatcccaacactttgggaggccgagatgggtggatcacttgaggtcaggtgttcgagaccagcctggccaatatggtgaaaccccatctctactaaaaatacaaaaattacccgggcgtggtggtgcatgcctgtactcccagctactcggaaggctgaggcaagggaatcgctcgaacccaggaggcagaggttgcagtcagctgagatcatgccactgcactccagcctgggtgacagagtaagactccattccagaaaaataaataaataaataaataaaaagattgggaagggctttgtcttgcagcttgggtgccagcttagtcgcagtagaatagagcatcaggtagatttctaaggttcctgactccaggccctggctcctgaatagaatttctgaacctgccctgggctggtgaggagcttcccatcctgaaacgaaggccacaagcctggctgaatttgctacccactaactgtacagtccttgggccttgagtgaacactggcagtaaccaggcagtggtcactgaaggacttgggcaggacccagtgctatgctagctttgggtctgacccagtgcag

SEQ ID NO: 1879758 - DNA, 4001 bp, Homo sapiens
tttaaatataaaaaattttcaaaaaggcaaaaagtgtcattctattataaaagtctgtttatatatgaatgaatatatatggtattctaaatgttattccatcgtgttgtacacaactttgtaaataaatttttaaaatgcccagcctagtgttttatttagttgtctgaagtaaatggcaagatttttaaatggtatttatttgccttttctcctccccagaaaatcaaggaatttcaagtaatggccttttcaaactttttaaattcataatttgagtgtaagaaaattttaattggagaaaggaaatagtatgcctaatttaaattgtgttactatttttcttttagttttcacataaaatcaggatgtgagtgatatcattcatatcaacccattaaatctaaatgaccagacatttctgtagataaagtaagctgtcatttaaaaaaagaaaccgaaacaacagcagtctttaaatttttttaaaaaatgactagacttgtatcttccacaatgaaaacttcccaaatgagagagttcttggtcatttcaattatcctttgaaaagtaagtaaattccaaacatccctctttttaacatttaaatcttagatttttgaaattatttcttttcattccttaagtggaagtggtaaatagacccagctggttttaaaatttatgttaaggcactttacattttgcagtgggattttatttatgttcatctgatagataatacatagttttgttttcataatattttcaaataagatatctcatttatatggcaataatcaatccacaacataattggatttctgaaggggtcctatagatgcttcctctccctccaacccaaagcctttctgaaggccaaggaatggtggccttaatacccttttaaaaacagctgaacatcacctctctccccttttttttctttaccttaggctaggttagtgtgaaatgcgacatcatagggcaggaatggggaaggtccttgtagattatttttaatttgcatttcagctgttaaaaacttttaaaagaaagtatgaaggtagaaatgaaacatcttgatgtggaaggctggttctcaccaccatcagcatatcctcaaaaggcatcaattctaattattttgtaattaatttagctgttacaattacttgtgcgaaatcgcttttaaaaactggagcgagtagcagtgctgtcggctcggccctgcgcgcgtccttttggttaatcccggccagtccccggtgttgtcgtccactttgcctccctggtggtggagatgcctccccgtctcggatcccacctcatttctccgctgtcgacgtgggctgggggtcgctttgaaagacacttccttgcaaatacccaatctgttttcctggtaaacggtaaacattattgtgtcttgagtaaacattccttcgggatcagggtcctaaaataaaacaagctgccgggggtgagatagtttaacttgataaacaagaacctgataaccaccgccgagagaggagcaatggtaaccttcaccgagaggagattatggaccacacggtctccgggcgggtcccttctaatctccttttacaaggaaaactaaacggatctaattttgtttgtgtgttgcagctataaaagtaacaagttgtttcacagttgtgtctggctaatcggtttttacacaaacagcaaatggtacatgatttgtgcaaacacatagagaggttatttctaaatttagctgacagcccctgggaaaagggaaaggcagggcttcttgaattcacttttagcctcaagaagctgctgatccaaggcttctaaatgacattggataacaggggcctcattccatccctgatcctttgttacttataaaattactcgctcatatttccgcgcatagcagcaataccggccgagcctgcgccagcagcgtgacactcagccacaagccaccgccggagactcgcagggctttttccagcgctacattcattaggcggcggggtgaacgggagagacctgccggcaactttccttccagccagttcttacccttgaacgacggcctaaagatggtccccttcctttatgtcgtggaaggcaggaaactctcggacccagaccctcaagctgccagcggttgtttaaagtcctggcagatgtcaggaagatgggcccggccgtcgcaccctcaaaagctctttttcgtttaagctttttaaacctcgaagatttagcacaaaatgggaaatgcaaatatcatagacaatgatcgcaagcacttagtggtggggctgggggaagcctgaaacccttgtttgatgttatggaacgcaggcacctgcgacaaacggcactggaaacagctctctcgttgagatttaaagtcaacactactgatatccactttttattccacttaagaaaaaaaaactaaaggaaggggggcagatttatttgcaataaaagaagaaagcgggttgatttttatggggaagattttagctttcggctacacacgcatttagacgtttctactttctctagcactcattcctagaaaaatcaatccagccctgaggcctgtggcccctagagcgttctcaggaccaaggtctgagttgggaccgcccgtatctagttcctcggaggggtggatctggatgtccggggaaaggcgaatgaagagtagagcaaaacatgtgccggctgttgagggctgtcgatgcgatggcagatgtggcctgtagggggcgacgagcagacggaaaacttcgcggtttgtctggaatggtccagccccagccccggacgcctctccttccctcccaggctctgagcctcctgacatccttgcttattctcaggccccggaagcctaggtcgaatctcgagaagctgatttcctcctttcccccgcctgtgtcctgggaggaacagagtcccgaggggagtttgtcctaaagattgggaggcaataaagtttagtgatgaggaaacattgacttggaagcaattaagagttatatttgaggttatttatttcacatggtttatagggtgagtcttggtagtgagaacatgaaaggctgacatgagtgtgtgagaggtgggtatttttaacgtgagtcccttgagaaactgtcctgaggggtatgtgatctgaaagaaagtgggttccagagccttgtgtccccggactccacctgtgtccccggtggtacaagctgcagaataaagtagtgaagggaggaggttggaagggcattctgaaagtgccaggctgaaccttgtggggagccgtctgtttcaagggaggaggcgacaggaagaagcgggatgagaaaggccttgcagaaggcgttccaacagggattaggcatttcctaactgtgactttggacaagctgcttggtttctttcaatgactgcatttcctcgaccctacagtgagaatgagtctgcctgtcacctgggcttacagaattaggtgagttggtgtcagtgaaaaatgtcttataaactgtaaagtgctgggggcgtgtacagtgtgttttttaatggcttctgcacgaagaaacaactctgttctaagcactggtacacggccaaatacattggctcggttctgaaccatttgattttaggtatgaaaggtggatttttctaagaggggttgcagaacccatcccaggaaactcccaccccagaagaggcttttaaaaggtggagcttcctcctggtctgtaggcctttcactatgcctgcggagaagctctcggtgcccacccatccttcagcctgcacccccagctccaggggcagggcatacgtctctcttctctctggcagagcggcctactctgctgtttgcccctatgcttccactatccgaggcaagtggggaaatctgagtccaccgctgacagactcccattagtgcaagatgcggcctgggaggcgaattaaag

SEQ ID NO: 1879759 - DNA, 4001 bp, Homo sapiens
caaagaagaattctccatttgatgttttgtgatttgagcaatggaatagaatctgatactggtgggctgggggaggtccccggacactggtaggatctcgaccccagctgtggtgtccaggctcttgacaccatctcaagaatgaggtcaaggatgagttagcaaatagtgaaagaagagatttattgcaaagcagaaagtacacactcaagaaaggggagtttgggcatacctgagagagaacaatgggttctggggtttcatctcaatgggtttctttaaccaaggagtggaatattgatgaaaattcctgggtaaaggtggagatttctcagaactgtggtgccatccatttttacatcaaatattggtctcagaactgtcatggcactggtgggtgtgtgatttagtatgttaataagcgtataatgagggcctaggtaaaacctacgtcaaatccagcaccacattgggtccagtcagtcttagccagcttggtccacaccctggtttttcagcatcttatcagcccatagcctcaagtcatgtaaatctgctgcctagaatttgttatcctgtgaccaccctgtattattcctgtctcaaatctacttgtaaatattcaaatggtctttgacttgggaattccaactttgcttacttcacagtgtttcctgcattataatcccatataagaaaagatgatccagacatttgttaagcatcacaaataagatgtatcccaggtatttttgtcaaatttggattattttggttttgtctttgcagaatataaaaaactaacacgaggtaagcaataaggtctggagatggctgtgcaaaagatgacaaagtgcaacaccacatttgagagtgtccaatcatttcttctgtggcagcatatttttccacaatactgaatttggaaaaaaataaaaataaaaataaaaaaaactacaagattcattaaacttgacaactgtttttataacattaccagtgataaaatcagtaaggaaggctggtttgcagtcatctgagaagcctctttactttcataaatatggtttctctgtgacattgaacggcttccaatttcaagcggaatgctacattacaaggataagtatgtgaagaaaaccggtttcttttgtagtcctaaacgttctagtctgcgaaataaaagtcattatgtgaagaagagtacccaggctccatctggccaccgaaagtttgcttcacaagataggctaaggaccagcttctttgggcgaaaacagatgccggggcgggagggaaaaagggagaggcagacgtcacttcctcttgctggttcaggcagcgggttggtcggctgactggcagaaaggcagatggggcctgggaaaggcactgtcggtgacatcacggatagggcgacttctatgtagatgaggcagcgcaggagctgctgcttccccacctgctgcttcgcctcgaaggagttcccgagccttgggagcgggctcaggaccgctggtccggccggagagtcccagctgtgtgtcagggctaggagggctggggggtgcgcggggcaagcgaccgtgcgtgtaaagggtgaggcgtacggggcggaggtgcaggagctcatatttacttggcaggggagataacatgatcacgaaggtggttttcccagggcgaggcttatccattgcactccagatgtgttgacccctgcgatttccccaaatgtgggaaactcgattgcataatttgtggtagtggtactgcgttcgcgctttcccctgattttttgtagtttcaagaatacgctgtactctaagggctacttttttctttcattgatttgtgtcttggacgtgttattcttacagtggaaggctgggaaataggaattaagatgtcgcttctcccactgaggagaaatagggagcgtcagccttaacacaaacaaactagcgcgaaggccgtacagctcttccctttctacgcagggctgctttttgcagagattggtccatggtctccagtgtcttgggttctcacgctctgtgaaaatcttcgtggttttctctagcccccagagtcaccttttacacagcccctgcttctaaccgcagccccctcaggagtttgtaggatttctgtgctagcggggaatgtgttctcacctcatagagccaggtacaaactacgcagacaggcgctgttctttgggatgaaagcagggcctttggggctcttagtgtccccgttcatttgcagacataacacgcttactttgtgtaggggaatggctttcccggagcccaggtgccctaatgcaattcgtggaggcccgcaggtcagaaccgcagtcttacttgtcttggctgaaatgcgctgcgatcctccctgaaatataaggcaggaagttttatgagcagcggggtccagtttccctattatctcctgctgtttacatatctagtctttcttcagactttatttaaatgacaacttcttgtttgatgtctcgcttccatatcctacatccattgccaggcaactttttagatagcaccccgacccatccttcccacccccaagcagccctttcctacttctggcgccagtgtccttcccggtccgtctttcttcaggccctcccttatcaccttcatggacagaaaatacttagctctctttcaacctgcagtttgcacctgacacgcgtcagtaccctggcaaattccttaataccccttctcaaatggcactgtaaattcatctctttttaactcccagaagtatctaattggtcttgtccctgcattgcatgaatactagtattccactacaaaagaaaaccccaggcctagagatggcggttctgggcattgtgccagcatttcccagggtatgttttctgacctcacctacttctgatcaactgaggtcaggagttcgagaccagcctgaccaacatgacgaaactccgtctctactaaaaatacaaaaaaaaaaaaaaaaaaaaaaaaagcaaaaaaagcaaaaaaagctggatgtggtggtgtgtgtctgtaatcctaactactggggaggctgaggcaggaaaatcgcttgaacccaggaggcagaggttgcagtgagctgagatcatgccattgcacctcagcctgagcgacagagcgagactctgtctcaaaacaaaacaaaacaaaacaacaaaaaaaaactaggccatctgagacatattattggagacagtagaatcctgcatccaacaggcacttggtgcagatctgaacccactgaattattggctcatgttccgtctgttttattaagtatcatgagcagaaattgagctctttggcttttacacactaagtatggctataggacaggtctctctctctctctctctctcattattgtgtcattattttttgccatcagtgtgggcttttggttttgatgttatgaagtgaatttgtatggacaatttctgttgggtggtgttgacaaggatccaatccctgtttggtaatacatgacagctaatctgctctgtgagactttttttattgtctatttattgtcctgagaataatggtatttcctgatatttgagactgcagcaatgataagttgttcatatcttgtctttccaatgtttggtaaaaattttatgggcccaatagttgtcaatatctgcaagagtggcatccctgttacaagagtgatcttactactcaatgtcccccctcccatcaaacttcgttccataggaagtcttggctttaacaaatttactatatctaaaagacatcttagtacaggaagaaaaccaaatctgtagcatgtaaggagcagttttctttgattggtatattcaggtttctaaccagctgaaaaattcaaatacatgtcctttaaggattaagtttaaaccacactacagaaaggagagaaaagatttatatgatcacatataagcaatggaatcagca

SEQ ID NO: 1879760 - DNA, 4001 bp, Homo sapiens
ttattagggattttcaaaaggggagggagtgtgcaaataggtgtgggtgacagacatcaggtacttaacagggtaatagaatatcacaaggcaagtggaagcagggcgagatcacaggaccacagtaggacttttgagttaatgctagaatgagttaagatttcgcagggactattgagaagggatgactgtatgttgaaatgtgagaaggacataagatttgtggaggccagggacaaaatgatacagtttgaatatttgtccctgcccaaatctgatgttgaaaggtaatccccagacaggctcagtggctcaaacttgtaatcccagcactttgggaggccaaggtgggtggatcgcttgagcccaggaatttgagaccagcctgggcaacatggcaaaaccccacctctaccagaaatacaaaaattagccacgtgtggttgcatgcgcctggagtcccaactacttgggaggctgaggtggctaattgcttgagcccggaggtcaaggctgcagtgagccaagatcgcaccactgcactccagcctgggcaacaccgcaagaccctgtctcaaaaaaaaaaaaaaaaggaagggaaaaaaatgtaatctccaatggggcctggtggtaggtgactggatcatggcggtggtctctcatgaatgacttagcaccatccccctggtgctgttcttgtgaaaatgagtgaattcttgtgagatctggttgtttaaaagtgcgtagcacttcctctctttctctctccttcactcacttgctcctgcttttgccatatgacgtgcctgctccccctttgctttctggcatgattttaagtttcctgaggccttcctagaagtgaagcaggtgccagcaccatacttcctgtaaagcctgatgaaccataagccaattaaacctcttttctttacaatttgcccagtctcagatgttttttcatagacatgcaagaacggcctaatacacagtacagaatattaaatacagttatgttcccacttttggtaatattggctgtctctggggaaggagtctggagtggcagtatataaccttttgtactgtttgaggtttttttgttttgttttgtttccacatgcctgtattactttcaattagaaaaagcaaacgaaacctatatactggtaaaggaaaactcacaagtgtctgggctaaggactgagtcgtataggcttgcaaaaacctgtgttaagaatacagaacacaaaaagccagacacaggggcactcaataaatagctggaggaagcaaaatatttggaatcaattcagaaggcagaccctggacaaagagatctctatctgagcaccagatactcagccagcatagcccttgctttacacaaggagctaagctgagactgctcacgttagaaaagaaagggagcataaaaaccaaatataccggagtcactttggggcgagctgtttctcagcattcctttgcaagcacattacgtgtcctaacctcagccttctaagggatgggaggcaagtccttcccccagtgagcagagcccacccctagcactcctctggtggtccaagtgcccagacaatcctaggcagcctttccttcagcccctccaaatcagaaggaacgaaatgaccctgacagtctcactgcactccaaagacaatctcagcacttcagctccttttccacaccaaggcttcagaaaagaaaaccaaaaaggagaaggtggatcagtaagcaagaccccttagcagcattcggtaaaaggaactccctgggttatgcacagattctttcaggtgccaaagaagtcagcagctccagaatgcaaaatggacagagaaggaaagtgctaaaactcaagacagcctcagaaatttctctttgttccctgctttatttggatatgcctccctgaagccagctagttggtccaagcttccaaaaaagtttctttggccactgatactaggtctaggagcttctgtgcttggcagccttctctggctgcctctggatacctggcttgcatgcggcaaccatgtaggttatccttctgcagaaacaggctgtgccacaaggtgcaagctccagaggcaggatgggagtaaggcaaagcaacggcatggagtaggactggagtaggaaccaacttaaaggcagagtcctttccaggaacccatggtttccagagcataggagaacatgactggctgtgagaggcagagtttctggctcttggaccccagaccaggctgtctaggcagtggagggaaacaggagcacttaccgggggaagatggccgtcatcaaggctgaagcatagccaggcttgcaagctccctctgaaaagtttgcgtacttggtggctaattcagcaggcctatgggaagagaaggaaagttacagcttgccaggcactgagcactgagtgggttattaattcataaggagctgtaggtgtttaacccttttttttttttttttgagacggagtctcgttctgttgcccaggctggagtgcagtggcgcaatctcggctcactgcaagctccgcctcccgggttcacgccattctcctgcctcagcctcccgagtggctgggataaggtgtttaaaccttgaatcaagtttcattccctacaatcagcacttcaggcacttttccacattaaggctttaagggtaaaaacaaaacaaatccccaaccctaaaggaatagatagataaataagtcaggcccctggatggtatctgtaaaaggaacttaactggattctcacagatttctttttaagagacagggtttcattatgttgcccaggcaggtcttaaactcctgagttcaagcgatcctctcgccttggcctcccaaagtgttgggattacaggcattgagccactgtgcccagctcaaactcataattctttgcaggaagcctgaaaccaaggaaacgaggagctctatcaaggctccaatacccgggggagtggtgcttggagttcatagaatacagctactcaggctttgatactcagagcccctggcctttccaccttccttgtatgttcctacatggccagcctcatctgcttttattctctccactcaggctatgatccatccagtgggaaccattccccagtagtgggaactgtcccgaacagtgaccgaatatagacacgataaattatgtcactggggctactgacataaccattagacttttagttgaggatggtttcctctctctgcctggaatgttattccttgtccttcttcatctggctaacaactattggtccttcatgattaagcttaaatatcagcttcactgggagtgattccctgaccctcggattgggctaagtgcctcctctgtgcttgtatagtcactcccccttcccctcacatcatatacttacccccagcacttgctattctgtattgtaatttttggtagtatgtctcccttgatacactgtaaattcctaaggtcagaggctgatttaaccctgcctaccctctccagtgccttgcataaatgggcacaaagaagacccctaaaactttcttaaggaacaaaatgaccctgacagtctcacggcagacaaggcaatctcaaggaacccacaaggctgagactgctacatatttttcagaagacttgtgttctaatcctggcctgttgctgtgtgaccataatcatgccacctcacatctttgggtttcaacgtcttatgcgttcaatgtgggtctggagtcactgccctgccaccaaaatctctgcactatgcagtctagagaagatcacagccaaagaacaggatatagtcagtgaatgggctccgtgactgccggggctggaggccctgcatgctggggcacctgagtgagccctggctggctgccagttctgagtccccacctcctccacccccacccttgggcctgctgccaaaactctggtgcccagctg

SEQ ID NO: 1879761 - DNA, 4001 bp, Homo sapiens
aggcggggtttcaccatgttagccaggatggtctcgatctcctgacctcatgatccgcccgccttggcctcccaaagtgctgagattacaggcatgagccaccccgcccggcccagaattttttaaatgtgaaattaattccagcaaaagtagccagtgaaaacaactttttctccccccagtcagagtcttgctctgtcacccaggctggagtgcagtggcgtgatctcagctcactgcaacctccgcctcccgggttcaaggaattctcctgcctcagtctcccaagtagctgggattacaggcgcccaccactgcgcccgggtaatttttgtatttttagtagagacagggttccaccatgttggccaggctggtctcaaactcctgacctcgtgatccgcccgcctcagcctcccaaagtgctgggattacaggcatgagccacagtgcctgaccaaaaaaaatttttttaatgtgaaattaattgataactaataacattttcaggcataggagggtgaagtgtgcgaagaaggtgtgtgtgaatggtaagtttaggaggatcaatctcctcagttaaaaaagcctctttagttttaagcaggattagtcaaatttcccatccttagcttctgccagttaagctgtggcaaaagacaaggtcaggggctggggactaggccagatgtcacctgtcaccccaaactggccagagctcaaacatgagacagtggtgatgagcaataagaactgggatggaaaccaggaaacccaggagccactgcttggccctaacagctgtgtccttgggcaagtcactccctcttccaccacctcagccctaacctgtaaaatgcaggggctatgctaatttagtgagtggttctacacccccaggaagaagagtgacctccctggaagaagatggaattctgccagcggccaggcttcaaacctgaactgcaccgctggctcctccctggctctccagcctgcccgcctactctgcggcttttaagactttgccaatccccatagggagccaggtcctcaaaataaacctgcctctatatagacacatcctattgattccatttggagaaccctaatacagactttggttgggcaaaaagagaagtcttgtgctattttaagcattaaaaaaccctaagaacccttgtgtatccagtcagcagggataactctacacaggtaactaaaatgttaggactgtttttctcgccgttcatagtttttactgcggtttcagctctgtcactactaatcctttggttaaacggcggaggcagcctggctcagtggttaagggcactgcattttattagctgtgtgacttcgagcaagtcccttcacctgaggactttccttctccataaattagggacggcaactacctcaaagggataggaatgttatgatttagttgtccgtacattttagaaaatttacacaaagccttttgctgtgctgcgacaggagctgtaatcggcaacatgtcttcatttgaggaagggaaacattaaaacaaatgggaggtgctggctttatttatagcagccgatcagtaatggtgaaatagatgagctttaaggaccctcgcctcggccctcgatctgctcagagccccgcctccacacctagccccgcccccacccagctgaggacccgcccccgcgcttagctccgtcctccgctcggcttaggacccggccccgctcacctggatctcctgacaggccgagaccgcccgccggctctccgcctgtttttcctcgatgaggcccagccctagcccgaaggccagaaagactgcccggccgcaagggcccgcgcagccccaggcccgcaccacgaactgccgctgcaaccgcgccgccagcccggccaccgactggcggaagaagcggagacggttagggagcccgagcccgaccctgcgaggctccgcgcccggtcctgcggcccagcctggacgctccccgcggacacagcccgccgccgggcccggccgccccaagccgtaggcccggccgggcttgcccgtgaagcgcagcagcagcgctcgacccagctgcaggccgcggcccagcgcctgtcgcaccgccatggtggcgccgcggcccggtgcccccgcagccgccgctgccgccaccaccggcgtcccccgccggtcacaacaaacttggggcggtgcctctgcgcaggcgcaggcgctggtgggcggggccggcccccgcggcagttccccgactcggcgcgtgggggcgctatgctggtactggcgcctctagcagtgactttccctttgcactttggacccacgtggagggcttgccggttcaggcaggtcctgaatgtgaacatcactggtcctgggcaaaatcgagaagtcgagaagggaaactgatattttttgccaaccatggtgccagaccctttacgtcttttaatttatttaacagctccaccaacaagataaaaatgccgtttttatagataagaaaaccgaggcatagtaaggggcagcattcgaggtcttgtgaaggtacctagcagagctgagctacagttcacattgtcctaactgttgaatgcttgccctcctcaatgccgttaggctgctgtatgtgtccacagtctcaggggttttgaagaccccaagacaaatctcacccaaaagacacaatttatgaatgagtgtgctgaggtcccaagatagcagcttgcccaaagccacaccgtttgtttaatggcataggcctgctcaccacagaacacacacacgcacgacacgcacattactgaaacagtttgctgtctcctggccaggggtccaccccatagccaagtaagcccaggggacagaactcttcagacaaaaaatcccttcttcagcagcagctcctatctacatgacctttgacttcatatttaaggagaaagggatttatgaacagaagccatagtctctggcttcagcggcagggagacaagatggtggatccccatgccattacccccaagacccagggcctatatgctataggaaaggaatgtgacggacatttgaagtcagtcccccagggaaaggcaagaatgctgtgtgaatctgcctaagggcaggatttatggtaagtacatacttttacacaaggaacaatagataaactggaaatcttagaggccttccctaaaagctggttaatcagaagtcaacttggttggccgggtgtggtagctcacagcctgtaatcccagcattttgggagactgaggcaggtggatcacttgagtccggaagttcatgaccagcctggccaacaaaacaccatctctactaaaaatacaaaaactagctgggcgtggtggcacacgcctgtaatcccagctactcaggtggctaaggcaggagaatcgcttgaacccaggaggtggaagttgtagtgagcaaagatcacaccactgcactctatcctgggcgacagagtgagactctgtctcaaaacaaaaccaaaaaaccaacaaaacacatcaacttggtggattagcatccaagacggggttgctttagcttgcactgtgtgtgtgtgtgctggtctctctcataatcttccttaagggaggaattttatggttcttgtgatatccaatcatatttatttgggagaggcatagatgaatttcccatttgtatagaggcacatgaatatcagatatttaattttttggatcaacctcagggaatttttaattataattttaaatgctccactgaagttgtaatttgaagaatgataagggaaagaaagttggagaaatctcacattccagtaaccacaggctcactcatggaaacttagttggggcacagatgagtggatttaaagtttaaatccactcgtctgaagccaggtttgcagtggttcactccagcacgtggggaggctgaggtgggaggatcgcttgaggccaggagt

SEQ ID NO: 1879762 - DNA, 4001 bp, Homo sapiens
aactgaagaaaaagaaatctgttctactattggagccaaaactgacagcaaaagactattgtgaaacggtaatacagtctttcacgtggcgctgtttgaagaatttttccaccatttacaatggtgatactcaccatttacaatgtttgcctcgtatgccgattttgcaacacaacccttgaatgggatgtgactgccataaagaattcaagtcatttaaaaattattttttggttatttatttgacctttgatcccactctgagactgaacctcatggatcataactgtgcaagcatggctaggaatttcctctcttccccacatctcctgcctcccgtctaggagtctgggctctggagaaatggaagaatatgcccttcctctccgcctgaaggtgtccctgttgtgacatgcacagggccattgctgacccttttatttctcacactaatgatatgcgcattagtatcgatgtcttttatttcttgggaagtgtttatactcttgcaacagcctgataagtaaaatcatccaacacttggaaataaggcaaatagataaccggtgtcctttcaaagtcaaatgagagctgtatctaacaaaccctgctaagggtcatctgacactctaggggaatgtcacttggcttgacttattatttactattgattagagcccagattcagtaaagatagctgttaactggtagaaaactgttaagttgcaaattatttttgtctagtagagatgcaaatgatttcttttcaatagagaagatagccccaacatgatgattttattgccctatagaacactaaccagttttgtatctaatttagcaattttatgaatattccagaattcttgttgttttaactgactctctctgtctccatatataggtatacatatatatttttttccatatccattgaactagctttgtcacccagctggttcctccattaacaacctacaagaggacactgacacattcccacactgtatttctataggaactgggtattcaatattttgaaaactagactttgagaagcttttcacagtatctgatttttcctcttgccaactcttgcccctgtctgtgtgacccgggcaagtctttttttgtctctggtcctttgtgtcttcagagtaaaatagggcacgcagggctggcgtttctgcctcgggcatgtcatgtttctaactcctctggcaggcaagcagggctgacgcaatgcagtcaaagaagatggatactgggccgggcgcggtggctcacacctgtaatcctagcactttgggaggccgagatgggcagatcacctgaggtcaggggtttgagaccagcctgggcaacatggcaaaaccccgtccctactaaaaatacaaaaattagccgggcgtggtggtgcacacacgcctgtaatcccagctacttggaaggctgaggcaggagaatctcttgaacccaggaggcagaggttgcagtgagctgagatcgagccactgcactccagcctgggcaacaaagtgagactgtctcaaaaaaaaaaaaaaaaaaagaagaagaagaagaagaagaagatggatactgggctgggcgcggtggctcacgcctgtaatcccagcactttgggaggccgagatggacagatcacctgaggtcaggagtttgagaccagcctgggcaacatggcaaaaccccgtctctactaaaaatacaaaaattagctgggcatggtggtgcatgcgtgcctgtaatcccagctacttggaaggctgaggcaggagaatctcttgaacccaggaggcagaggttgcagtgagctgagatccagccactacactcccacctgggcaaaaaaatgagactctgtctcaaaagaagaagaaggaggaggaggaggaggagactggaagggatgttagaggccatttggggcagccttcccacctcccacccactccctcatcttggtagatggagaaagtggggttcagaaagatgagataacttgcccagggtcacactgtgagttaggtatgggctgagcagatgagattccagctccacgaactttctgaatccagggagcatgggaggggctgtcagggggagctctgggcccccacccttcaagccagtatccccatttttatctgtttgacatacatcagatgccacacaagattgcaaatgaaaaagaagtccccaaagctcaaaaaccctggctctagaccatccttcatctgcccacttcaacagccttcccttatctcctccctcctcctcctcttttcctcctcctgcctctggcaaaattttcagaaaacaaacaaacaaacaaaaacatgctcatgagaagaagcagacagatgtggtcagcccaggcctgaacacattggtctccagtctgggagagacagagcctctctatctaaagaaaagcattctcagggtccaagctgacaatgatgcagtgtgccgtgctgacaggtaatgagcatcccatcagttaaggtgagtaaggctagatgatctgttcaaacactagcagcaattgtctctagatggtagaattcacaggcttttgttgctgggttttgttttttgtttttttttgagatggtgttacaggatctttggggtgtcattttctggccggaaacctctgtggctggtggcacctttgcccaagttttgctcaggcccactgggcttgtttcactcactcctcctggcaggcagcactcagctcacattaccagcctgggttccacatctgcccagggcaagtcaggcatggaacagtgaagggtgtgtgagtgaacatggggtctggccactgcacacagtcagacatgccggctgctgcagcggggtgagcagctccaggtgccagcatgggcgccagctctctgagaggttgtggctagaccaagtacaccacaagcagcttccacagctggcaccggggaacacggtggcacccagaagcttcgagatgccaggaaccacagggccccgaaaagggagtcacagctccagcttggggagctcccaggtctgggttccccagagggccgcagctcttctttccttcccttcacctgcatcatggcaagcaaggggcatgtttcagccttgtttgtgttacagctctttcagccccaccatttgatgggtcccaagttcttatcctgcaaccaggaagaatgaggtatgcagacaagtggggagtgagcaagacgaagaggagctttactgagcgatagaacagctcagcctcctgcagagcctccctcagggggcagctcctttccacagccagggtgtcctgatgagtgttcagctgctagcagagaggagaccctggaatgggaagctcctctctgcaggcaggtcatcctgtcgactttccagctctcagaagagggaagaccctggaatgggaagctcctttctgcaggcaagttgttctgccatctctgcagctctcagcagagaggaggccctggagcgggtagctcctctcggcagctggtcatccaatgtctgcccagctctggctgagcctgaagctttcatgagcctcagagaggaggaagtgcatactgattggtccatgggtggctataggcaagcccagaaaatacaccataagttcccactctggtgtgtgggactggcagcctggcccccagccttgaggccctccctggcttgaaggtagggcctcaccagggacccatccccttccacccaggagcctgtctgtctcctgctgctgttcatggtgcccaggctgttcatgccaaggagcgtctgcaggccagtgccgagctgccctcagtttccccttggctttccttccatgctagtcagtgcccaaagtccagagggggccaaggcagcaggggtctagtgtgtcagcactgccccaagcatgcccacacccagccaggctgcgacagcacccaggctcagcacca

SEQ ID NO: 1879763 - DNA, 4001 bp, Homo sapiens
atgcaaagagatgcacacctatacacaacataaccaactggaaaaccaagggcacagagagtatattgaaagcagaaagacagaagcagctcatcatctctgaggtattcttgataagattaacagccaaattctttccagtaactttatgaatataaactattgttatgaatatagactatcagaatgattccagctccatataaaaatatttatggaccatgacaaagtggaatttattccatgaatacaggctcagcatacattatcatatatcatattaatagaataatggacaaaagccaaacagtcatgtcatagatatgaaaaagcacttgagaaaattcaacacactttaatgattaaaaaaacaaacaagaaacctggaatagaaggaaacttcctcagcctgataaagggcatctatgaaaacacactgctaatgtcactttgtggtgaaaggcttgaaaaaattatcccatcttagtctgtgttactattaatataaaggcatacctgaggctgggtaattcatgaagaaaagaggttcatttgtctcacggttctgcaggctgcacaagaatcatggcattggcatctgcttctagtgaaggctccaggctgattccacttatggcagaaagtgaagaggagctggtatatgcatatcatatggtgagagaggaagcaagagagagactagaggaggtaccaggcttttttcaacaaccagttcttgtgggaactaaaagtaagaactcactctcgtgagaatggtacagagctattcatgaaggatccacccccacaacccaaacactcctaccaggccccatctttaacactggggatcagatttcaacatgagacttggcagggccaaacaaatcatattcaaaccatagtaccacctaagatcaggaataagacaaggacgttcactcttaccatttatattcagtgttgtaccaagggctgcatacccatcagtcagaatccttgtgtcatggcatcctccaggtgtcacttttccagttggaaacctctgtggccagtggtgcctttgccagagttttgctcaagcctgctgggcttgttccacccactcggcctggcaggctgcactcagctcatgctactggcctggctcccacaccttcaaagaatgatccaggcatggagaggagaggggtgcacaagtaagcaagcatggggtctggctgctgcacacagccaagcattggctgctgtggtggggtgggcagttccaggtgccaccacaggtgctggctctgttcaagcctgtggctggatcagatgcactataagtggcttctgctctgggcactcacatctggacaaggggaacatggtggcacttggaagctccaagacactagaaaccacagagccccaaagagggtgtcacagccctggctgggggagcctgtgcatctgagctccctgaagggctgcagctcttctctccttctcattgcctgcagtgtgacgagtggggtggaggcaggtgttttagctctgtttgtgttatagcactttcagtcccaccattcaacaggtcctgaatttttgtcctgtgtccaggaagaatgaggtatgcagaaaactggagggtgagcaaggcagaaaggaactttcttgagcaaaagagtgacagaacagctcttgggagacctggagttggtagctcctttccacaggcaggtcatcccaactagttcagccctcagtagagaggagccccagattgggtagctccatttcacaggcaggtcatcctgacaagtgtccagctctctggggagaggagacctggagtgggtagctcctttccataggcagttagtcctgacgagtgcatccctcagcagagaggagaccagagtgggcagctcctacctgcaggcaggtcatcccaacaagtgtccagctctcagaagaaaggacacctggagtggatagctcctttctgcaggcaggtagtcctgacgagtgcagccctcagcagagaagagacccagagaaggtagctcctagctgcaggcaggttgtccagatgagtgtccagctctcaggggagaggaaacccagagtaggtagctcctttccacagacaggttgtcccaacaagtgttcaactctcagcagaaaggagacccagagtgagtagctcttttccacaggcaggtcatactgacaagtagaggagacctgaagtgggtagctccttcctgcagctggtagtcctgacatctgtatgagtctagctaggtaacatagtttttatgggctcagaaaggaagaagtgtgttctgattggcccatgggtggccatgggcgggcctggaaaaagcaccataagttctcactccaggccgcagactccacctggagctgacagcccagcccccaggcttcatgccatccatggcttgaaggttgcgtttcactgggaacctgcccctttctgcccaggagcctgtctgcctcctgtcaccatcaacatgttgtccatgccgcccaggctgttcatgctgaggtttgcctacaggcccacactgagccaccctgagcaaccccttggtctccctcttgtgctcttcagttcccaaagtctggatggcctgagacagcagggggctggcatgtcagcactgccctgagtgcttgggtacccagctgggtcacaacagtgcctgggctctgccacaactttgctctgccccagagtgggggccaggagcagggagaggccaggcagtgggagcaggcactttcaagcctacgggaacaaagggcttccggggcccctgagacctcagggatgcctgggtctgtggctacagctgagaagctgcagctgtgcctgggagcatgtggctcctgctccactgacttgttagggggtggggctcccacctgttcccggcacccgtgggctcagcagagtgtgcagccccagttgtgcttcccctgctgaagccggcatcttcacagtggctactccagacaggccactgctgccatcacttgcaccaacctgtaggtgacagtcttcctccatgaagccagttcatatgctctagaagttactcctccatgaaatatgcaaagaaacagcccaaggctacaagaaatacgcacacacgaaatcaaagaaacaggacaccaccaaaggaacacaataattttccaataaccaaccccaaagaaatggatatctataaattgccttccaaacaattagaaataattgtttttaaagaagttcagcatgcaataggagaacacagttggacaactcagtgaaaacagaaaaagagtctacggccataccacctcgaacatgtctgatttcatctgaaaacagagaaagaatacatgaacaatacaagaagttcaacaggaaggtagaacttataaaaaagaaccaggctgggagtggtggctcacacctgtaatcctagcactttgggaggccaaggtaggcggattgcctgagctcaggagtttgagaccagcctgggcaacacagtgaaaccccatatctactaaaatacaaaaaattagctgggcatggtggtgtgcacctgtaatcccagctactcaggagactgagacaggagaatcacttgaacctgggaggcagaggttgcagtgagctgaggtcatgccactgcactccagcctgggtgacagaatgagactccaactcaaaaaaagaaaaaaaaaaaaaaaagaaaaagaaagaaattctggaaccaaaaaacctaatgactgatattaaaaacacaatagagaacttcaaaaatagactttattgagcagaagaaagaatttgtgcccttgaagacaggttatttgaaattatccagtcagaggagaaaaaagaatgaaaaagagtgaagaaaatttataggacttatgggacaccatcaagcaaaccaatatgtgcataatgagagtactagaagaagaaa

SEQ ID NO: 1879764 - DNA, 4001 bp, Homo sapiens
caacgttttattaaattcactgtttttattattaggaatgatataagcattactcactgctgagacatgctacttactgtaattacatttccttggctgtgcattcttttttttctggagttattattaccttgtcatttagaattttccctgagcgtctgaggccttcccacactttgaaagacatcaaagtccctctcaatataagtttccataaagtcaaactcattggataattttctaggcctagtagagtgactaatgaaggcctctttgacaatgtgatatataaggagacctgagtgaagagagggagaaagccatgtgactagctaaagttttccaggcagagggagcagtaattctaaatgctctagagtaggaatatgcttgctgtgtctgaggaacacaaaggagatctacatgatgaaacacaatgaacagggaggggaaccctacaggagacagtgtcagaggtaccataagccagataaagttgggccttgtatgtcacggtaaggagcaaccagaagaagaaagatgatgtagaaaaaaaaaggaggagcaagtttgacaggaggaaattactcgattttggatatgttaagtttgacatctaggtagaaattattcagtagggagctggagaaatgagtatgaggcttcagcaagaggtcaggactccataaaaatggagatactgggaatctatttcttatgctccttgtttgtgattttagacagcagggggtgaaaatatttattcttaagactatattaatttggctttcatcctcaccattctactgtaactttcatatcaaaagtcagtaagtaaataactccatgttgtcaaatccaatggaccttcttcttttcttgaactctacgaaacattccacagtaaaccactccctctcaaatttatatgtacattcccagcttcctccctgaacttctgactctcatgtccaattcgtatacttgatacctctacttgaatgtttaactgtgtcagaagttaacctgtaaaaacgtaactctttatttgactaccttaaatctcttcctctcctcctccttattctcatttcagtaaacagtctcatcatccagcccgttgctcaaacttaaaaattaagaaacccttaattctttccttcctcttgtttctcaaaaccatccctgagcaagtacaaaaggtatctcaaatctgtctacttccttccaactccactgcctccaccataaagccatcattctctcttgggtgaattattgcaataactggtctccttgctttcttctacaagcatctctctacccagcaaacagggagatatgtttaaatgtaatcccctacttagaatccatcagtgacatccactgcatttagaataaaatcggatctccttatccctacgtgatctaaccccagtctgcatctccaacctaaccttgtcctgttttcccctcactctttacagtcaagtcacaccaaccccctttctgtttcttgaacactctgaggtcttcaaggctcccaggcctatatccctgatgctcctctacctagaatgctcttcctacacctctttccatagctggctccttctcatccttcaagtctcagtctgaatgtcatgtccttggagaggcctttcctcactagtctacctaaagcaccctcttcctttactctctaccataacctacttattttcttcatgatgcccactaagagtttgatattcatttagtttattgtttgtctccccatcaccaaaacgtaagctttatcagggtggggtcctatcttgtatttctagcacaaatattaataggtactcatttatttgttgaataaattaaccagacctctacataaagatgtacatacaataacgtttattgtaccttttttcattttgtaggctggggataaatgaatagaataatagtttctatccaatcattttccctagccagtttcaatgttccaaagtttaattaacagagcagggaagctaccctgaactgaacttaacactttggaattttgcagcatttttatgctagcaaaaaagtagacacactgaaatgtttaccaataggtttttattacagagtattccatgtaagagctatgcagtaaatagaaagatggcctgtgtgtcagatatccttagcctctttagagtcactctccttcctcttctccttgctctttctctcccagtgtccagtttgcatagaatgagtagaacttgaccaagtgaacaaacacagaggaggcattctagcccacatgcacatagatctagggataaaagtgtatggtgtgctggagaaacaataagtgtgtcctcctctgctcccactacagctggtccccttgtctgttacaattactatgttgtagtattgtagccattctcatgtgtttcttctaaccaggctcctagactcacactttcagacaacagagaagcatgtctttacatctctataccctcagtacctaacacagtaagctctcttatagtggctgcaagaagaaatctgcttttatctatattttactagtttaaaggttacttttttttttaagcgatggggtctcgctatattgcccaggttggtcttgaactcttgggctcaagagatcctcctacctcagccttctgagtagctgagattacaggtgcaagccaccacacttgaccaaggttacatttttaagactgatttatatggtcattatatagaccaaatttgtctgtagaaaaattagtcaaacagtgagtgacttaaaactgtacaatactgtggctgagggcataattaaatctttattaaaactgctaccatttctttttgtttttgttttgctttcttgagacagagtctcgctctgtcacccaggctggagtgcagtggcgtgatcttggctcactgcaacctccacctcccgggttcaggcaattctcctgcctcagcctcctaagtagctgggaatacaggtgtgcaccaccacacctggctaatttttgtatttttagtagagacggggtttcactatgtgggtcgggctaatcttgaacttctggcctcatgtgatccacccacctcggcctcccaaagtgctgggattacaggtgttagccatcatgcccagttttaaagatatatgcctatgatgatctgaatctgaactaacttccagatgtctcactaaaggcaatgcattttttcacataagaataaattttggccgggtgcagtggctcacgcctgtaatctcagcactttgggaggctgaggcgggtgaggtcaggagttcaagaccaacccagccaacatgatgaaatcccgtctctattaaaaatacaaaaatcagccaggcggggtggcgcatgcttgtaatctcagctacttgggaggctgaggtgggaggatcacttgatcctggaaggtggaggttgcagtgagctgagatcatgccactgcactcctgcctgggtgacagagcaaagctccatcttaaaaaataataataataaataaagaataaatgcccatttctaataaatgagatacttcaataaaaagtgtaagaagtaaattccaagagaatttgaattagtaatacttaccaacactagcatgatcaataatagtgtcaatatcttgtagaccccatttcttataagctaatggtggtggttgtatgttctcattgcctgatgctgcagctaccaaagataaaataagacaatccaaacttattatggataaaatgaagttttacaaaaaaacattaaaaccatactaatttgttattctaaaatttcagctaataatgacacaaagtaatgaaaacaaggcataaggtgagatttattcacaccaagacaatgcacgtaaaatgcaaacatttaaaagactaagttggctgtcacaaaagattctggaacactccagtaattaaagaagactat

SEQ ID NO: 1879765 - DNA, 4001 bp, Homo sapiens
ggctttttgcccaaatgggccattatcgaagaattcacaaaaaacaatagcctcatcatccccaccatcatagccatcatcaccctccttaacctctacttctacctgcgcctaatctactccacctcaatcacactactccctatatctaacaacgtaaaaataaaatgacagtttgaacacacaaaacccaccccattcctccccacactcatcgcccttaccacactgctcctacctatctccccttttatgctaataatcttatagaaatttaggttaaatacagaccaagagccttcaaagccctcagtaagttgcaatacttaatttctgcaacagctaaggactgcaaaaccccactctgcatcaactgaacgcaaatcagccactttaattaagctaagcccttactagaccaatgggacttaaacccacaaacacttagttaacagctaagcaccctaatcaactggcttcaatctacttctcccgccgccgggaaaaaaggcgggagaagccccggcaggtttgaagctgcttcttcgaatttgcaattcaatatgaaaatcacctcagagctggtaaaaagaggcttaacccctgtctttagatttacagtccaatgcttcactcagccattttacctcacccccactgatgttcgccgaccgttgactattctctacaaaccacaaagacattggaacactatacctattattcggcgcatgagctggagtcctaggcacagctctaagcctccttattcgagccgaactgggccagccaggcaaccttctaggtaacgaccacatctacaacgttatcgtcacagcccatgcatttgtaataatcttcttcatagtaatacccatcataatcggaggctttggcaactgactagttcccctaataatcggtgcccccgatatggcgtttccccgcataaacaacataagcttctgactcttacccccctctctcctactcctgcttgcatctgctatagtggaggccggcgcaggaacaggttgaacagtctaccctcccttggcagggaactactcccaccctggagcctccgtagacctaaccatcttctccttacacctagcaggtatctcctctatcttaggagccatcaatttcatcacaacaattattaatataaaaccccctgccataacccaataccaaacgccccttttcgtctgatccgtcctaatcacagcagtcttacttctcctatctctcccagtcctagccgctggcatcactatactactaacagaccgtaacctcaacaccaccttcttcgacccagccggaggaggagaccccattctataccaacacctattctgatttttcggtcaccctgaagtttatattctcatcctaccaggcttcggaataatctcccatattgtaacttactactccgggaaaaaaagaaccatttggatacataggtatggtctgagctatgatatcaattggcttcctagggtttatcgtgtgagcacaccatatatttacagtaggaatagacgtagacacacgagcatatttcacctccgctaccataatcatcgctatccccaccggcgtcaaagtatttagctgactcgccacactccacggaagcaatatgaaatgatctgctgcagtgctctgagccctaggatttatttttcttttcaccgtaggtggcctgactggcattgtattagcaaactcatcactagacatcgtactacacgacacgtactacgttgtagcccacttccactatgtcctatcaataggagctgtatttgccatcataggaggcttcattcactgatttcccctattctcaggctacaccctagaccaaacctacgccaaaatccatttcgctatcatattcatcggcgtaaatctaactttcttcccacaacactttctcggcctatccggaatgccccgacgttactcggactatcccgatgcatacaccacatgaaatatcctatcatctgtaggctcattcatttctctaacagcagtaatattaataattttcataatttgagaagccttcgcttcgaagcgaaaagtcctaatagtagaagaaccctccataaacctggagtgactatatggatgccccccaccctaccacacattcgaagaacccgtatacataaaatctagacaaaaaaggaaggaatcgaaccccccaaagctggtttcaagccaaccccatggcctccatgactttttcaaaaagatattagaaaaaccatttcataactttgtcaaagttaaattataggctaaatcctatatatcttaatggcacatgcagcgcaagtaggtctacaagacgctacttcccctatcatagaagagcttatcatctttcatgatcacgccctcataatcattttccttatctgcttcctagtcctgtacgcccttttcctaacactcacaacaaaactaactaatactaacatctcagacgctcaggaaatagaaaccgtctgaactatcctgcccgccatcatcctagtccttatcgccctcccatccctacgcatcctttacataacagacgaggtcaacgatccctcctttaccatcaaatcaattggccatcaatggtactgaacctacgaatacaccgactacggcggactaatcttcaactcctacatacttcccccattattcctagaaccaggcgacctgcgactccttgacgttgacaatcgagtagtactcccggttgaagcccccattcgtataataattacatcacaagacgtcttacactcatgagctgtccccacattaggcttaaaaacagatgcaattcccggacgtctaaaccaaaccactttcactgctacacgaccaggggtatactacggccaatgctctgaaatctgtggagcaaaccagttttatgcccatcgtcctagaattaattcccctaaaaatctttgaaatagggcccgtatttaccctatagcaccccctctaccccctctagagcccactgtaaagctaacttagcattaaccttttaagttaaagattaagagaaccaacacctctttacagtgaaatgccccaactaaatactaccgtatgacccaccataattacccccatactccttacactattcctcatcacccaactaaaaatattaaatacaaattaccacctacctccctcaccaaagcccataaaaataaaaaactataacaaaccctgagaaccaaaatgaacgaaaatctgttcacttcattcattgcccccacaatcctaggcctacccgccgcagtactgatcattctatttccccctctattgatccccacctccaaatatctcatcaacaaccgactaattaccacccaacaatgactaatccaactaacctcaaaacaaatgatagccatacacaacactaagggacgaacctgatctcttatactagtatccttaatcatttttattgccacaactaacctcctcggactcctgcctcactcatttacaccaaccacccaactatctataaacctagccatggccatccccttatgagcgggcgcagtgattataggctttcgctctaagattaaaaatgccctagcccacttcttaccacaaggcacacctacaccccttatccctatactagttattatcgaaaccatcagcctactcattcaaccaatagccctggccgtacgcctaaccgctaacattactgcaggccacctactcatgcacctaattggaagcgccacactagcaatatcaactattaaccttccctctacacttatcatcttcacaattctaattctactgactatcctagaaatcgctgtcgccttaatccaagcctacgtttttacacttctagtaagcctctacctgcacgacaacacataatgacccaccaatcacatgcctatcatatagtaaaaccc

SEQ ID NO: 1879766 - DNA, 4001 bp, Homo sapiens
agcaggaactcacagacgatcaaggagccctggggagccggggcaactcagacggagccacggcaccggcccctctccgcgcctctgcaccctgaccccggccttgggcgcccccagccgggaccgaacgtggtccccaccgcggacaggcgacccttgtgtgggcgccacagaagatgcaaacgcgactgtgcacctgtgtcctgcgcgcagcccccgtggctcgctcacccctagcacggcctgcaccagcggcgtcttgccctcatcctccgcgtccgcccagttgacctcggccccgtgggccagcgccgccgccagcgcaggaaggtcgcgggcacgcgctgcgcggtgcgccaagagccccgggtgcagctcgcgcacgtccgccaggccccaggcctcggcctcagtgtccccgtctgcctcaccgctggactcctccgactctgcaccctctgtggggagggggcggtcagggaaagcaacccccggggctgcccaggggctgggcaggggcctcgggcgagggcaagacgccacccaccctcctcagtgacgctgtccaccacagagcccgagccgaaagccaggacgtccgagctgccatccgagctgcccccaaggccactgtcgctactcagacctgcaggtccgcagggaagggggtcctgagggtgggaggcccagactccgtccagagccctggggcaaggctggaactccacccaccctccaggggccacccctagggacaggaccagctcccacccagggccggggggagccagctgcaggctaggagcaaaggagagaaaaccaaataacagctcaaaggtgccaggggtagccccctaaagcccaggccttttgggaagcccttccctcccgctcgccgccttacccggcaccccccgcagtgggccccccagccccgtctgtggctggcccaggctgaaatgtctccacccaaccaacgggcagcatggctccagaagggccctaggctgagggccggctggcagcgccctctgcttccccagcaccccgggccacccgctgtgtgcacacacccaggtgcacacagcccacacacacatttgcacagctcacccctgacagtcagggccttggcctccagctgtgtggccaggaggccccccgccccttcagatgctgctccattccctggcaagggccatccacactcaggcacccttcaggccagcctccttggccctgccctgccacctggctgggcccaccccacacttactgcgagggccagcccctgcggcccctgcgtcgaagtaggagaagagcgagtccagctcgtcgggacagaagagggagtctcggcggaacttacgatccagggtgcccactgcaggggcagtgcgtgttcagagtgtggaacaggcccggggtggggcagggaaccccaggtcacgccgggagtctgcggagcctgaggtgcccccagagccctgccaccagccccttgacggagtccatccccgaccaaggcaagcccctcccagccctgccggggcatggcctcccacctgaggacagagcggccacacagggcagaacgggctcaagccggaccttgcggcgggcagtgggagcgcggggagagctgtggggccgcaggcacttctgcaccctccagcgtcttggggcctccagggctggtgccatgggcgccttccgcagaaacttcttttccacgtatttgtccttgatccaggcctccttgtcctgcctggaccaggggggaacatgaggctgtgcccccaggctggggctccctgactgatccagactgtaccccacctcaccgggagctgctggctgtgggtttcctgctgcctgcaccctcacactgggcctcatagatctgattcacagcgctgtttccaagctcacacatcagctagcgggagacagggcgagcaggcatcagtgcgaacctgcagaccccagctcccgcccccacaaacggggtcccgtggcctccaggagccccacacgcacctttagcagctcaggctcccacgagtccagcgtcagggaccgcaccttggagcagtggacacccaggctcctggagagcagaggtagggatgagtctgggggaggcaaggcccccagctccggcccaacccccacccccggcctggccctcaggggcccacctgtggatgctccagcccaacccccacccccagcctggccctcaggggcccacctgtggatgccggagcactcaatgcagagcagcacgcccaggttgatgctggcccagcgggggtccggctggccgcagtcgccgcactggctgttgccggccacactctgcacacgctgcagcacactctcgcccttcacgccacgctcccgagtgtcggtggcggagtcgatgctgctcgtggacggggatgctgtgcggtccagcctctggaggatggggtggagctgctcggtcccgcaggggctccagcatggtttccccagcaggccccctcctccccagccagaagagccaatgcaggccagggcccctcgagcacacgcccgcacacgcacgtacacgcgcacaccctcacgtgggcagatggcccccccctcgagcacacgcccgcacacgcacacacgcgcacaccctcacgtggacaggtggcgccgagcacacgcccgcacacgcacgtacgtgtgcacaccctcacgtgggcagatggtgccgagcacactcccacacgcgcgtgtatacgtgcacaccctcacatgggcagatggtacctgcacacacatgcacatccacactgcacaagccagcatgccagtgcacaccagcacacacccagcttgcaggagccacacacaggcgtgtgcacgtgtgtggggcaggggccatccccagtggcacgtaggtgtgtgcaccggcacggggcaggggccatccccagtggcacgtgtgtgtgtgcacaggcgcggggcaggggccatccccagtggcacgtgtgtgtgtgcacaggcgcggggcaggggccatccccggtggcacatgtgtgcacgggcttggggcaggggccatccccggtggcacgtgtgtgtgtgcacaggcgcggggcaggggccatccccggtggcacgtgtgtgtgtgcacgggcttggggcaggggccatccccggtggcacgtgtgtgtgtgcacaggcacggggcaggggccatccccagtggcacgtgtgtgtgtgcacaggcgcggggcaggggccatccccggtggcacatgtgtgcacgggcttggggcaggggccatccccggtggcacgtgtgtgtgtgcacaggcgcggggcaggggccatccccggtggcacgtgtgtgtgtgcacgggcttggggcaggggccatccccggtggcacgtgtgtgtgtgcacaggcacggggcaggggccatccccagtggcacgtgtgtgtgtgcacaggcgcggggcaggggccatccccggtggcacgtgtgcacgggcacggggcaggggccatccccggtggcacgtgtgtgtgtgcacaggcgcggggcaggggccatccccggtggcacgtgtgtgtgcacgggcttggggcaggggcaccaagggccacacctcgctatagcaactgtcagggctctcgcggtaggcggaggcgatgctggcctgcacagcctggacccaggcttgccgcagcttctcggagtcagcctgcagcatgcagctcctgcaggcagtggaggggcgggcgtcagctccggtgggcaggtacgccccccgccccaccctgggctgggcctcctcacttggtgggtgacagcacctcgaagcagaacctccgctcgatgtcctcacacggcttcacagagcacaggcggaggtcatccaccaccacggtgagggcatcctgtgggcggcaccgctgtggcccctgccctcagccaccacccggccccgaccaccca

SEQ ID NO: 1879767 - DNA, 4001 bp, Homo sapiens
ggccacatagtaggctgaggatggcaaacactgccccacagacacctacaggtacgtatttttccaggaagctgcggttctggaacctggagtttgagagccagtctttcctgtatagacaggtaggctctgttctggggccgtccccagggggtggggctgagggtgggcaggcccctgtgcagtcttggctctgggtcgtgggcggctctgggtcacaggtacggaggatgacggctgtgctggtgggtcacgggcggctctgggtcacaggtacggaggatgacggctgtgctggtgggtcacgggcggctctgggtcacaggtggctctgggtcacaggtacggaggatgacggctgtgctggtggccgtggggctgggggctttggcacctgcccaggtgaagacgattctggagagccaagatcccctgggcaagcaccagacacgtgtagccccagcccacggcttattcctcaagtcagtgctgtacgggaacctcggtaagaaaaacaggcacgagaagctcctgtcatgtgcccagtgactactgtggccgaggcatggggtggggggccaggggccactgacggcagcaactgggggtgaagcagccccccgcccagggctgcagtccctcaggccagcccgtagcccgtcctgggctggcccactccctggtcatgggagtggtctcagcggtggggagggtgctgggccggtcttgccccaggctgacgcagggtctggtccgtccacaggtgctgcctcctgcaccctgcaggggccacagttcgggagccacggatgaccctggacactcaagccaaagttaggccacaccaggcccaaccctgtgctggtcaagccagggcagtcacagctgcttggggcccacagcactgctgcctggtctccacagtagcctccctgcccgggtcccagcaccctggatgcccgtctctgtcccaggcgggatggggcacagtgcaggacacagccatgtacaccaagaagagagtaccaagtagtcttttgttcagcttttactggaaactgctgtctaggaccacctgccctaaccaggaataaaggcaagacagcctggagaccagtttgtttcttcagctgcaaacagctgcctgggcaggcaggtgacacaaggcctctgtccccagggatgggacctgcagggtctgttcacccagggcacccacagtcctgaagtgcaggcccagggtctgtccagctgggagagggcagaggtggcggctgggtgagttgccggcctcagctgggggcctgggggaggcccttcttcagcagagatgtgaggaagctccccagctcctcgtcctagggcagaggcaaaagcattgtgggtggtgcaggacagggaggaatgttgatacctgtgttgaccgcggtggggtgggggtcaccccttacctggtaggtccaggagaccagcagcaccttggtgcctgggtcctcagaaggggcggcggcctggaggaggacggactccacagtcacagagccgtctgggaggtgctgcacacagtggtccttcaggacgctgtggggaggctcggtgagaccctgcctggcctccagggcccaagggagtggggggggggcggggccgggcgcccacctcttgaggtggctgtagacgcgcaatgccgtctcctgctccttgcgtgtgtcatgcaggtgcacgcggcaggtgaagcgcagctggtgctcagccagacccagctctttgagggcttgctctgaggacaccagccggaagttctgtggggcagggacaggtcagtgagcgcagcagcggccctcccccctccagagaccgtcctggcactcacgctgtccttcatgatcagggtgccgtgcaggagccgaggcttcttggcctcagggagcagccctgcggaggaggtggcaggagccatcaatgtgagggccgctcccagccgcctgccccgagcaccctgccctgccctgcccagcccgcataccctgcgccatctcccgcttcagcagccccagcgagatgcctacggggatgctggggcttgtgggcagcgtcaccgtctcgccattggccggcatgtagcagttgacccctggaccccgggggaagagagagcctcagcccaggctgcccgtgctgacccgaggtgggccccacgccgcccgcccggctgcctacggagctcctgctcgatcttctgcttcaggaactccatcttcttggcctcgccatgcaccagcagcacgctctccggctctgcctggcccaccagctgcatgatgcccttggcgtccgcgtgtgcgctgaatgacatgtactccacctgcatcttgacctccagctacagaggccacggggcgtggacagtggttaccaccaggaggtgcccctcggccctgccagcccagtgcggggtcgagactcaccacctgccgcccctccatctcgagcttccgctgcccgctgaggatcttgtggccgacggtgccctgcacgcagtagccgggcatgatgacctgggggcaggcacagagctcacagccagggaactccagccttggcacctcaaggccttgcccgggatgcccccgcctgaacccctggaagctgtttccacctgccagcggcgcccgaccaagcctagctgcagactccaaagggctcaggttttggcacaagactgtccagggctgggctggggctgttctgcccgaggtggacaagctgtgtcacagagactgagcagctccaggcggacatcgcccccgttccccagcagcagcagccacgtcccttggccagcacgaggccaagccagtgagagctcagagacagcatgggtggaaggacaacccgtcggcctccagcttccagattcccacacctcaccatgccctcaccatgttcttttcgtttccggcccatttccggaagatctgcagggactgcccagcgtgcagcattcctggcgtggcaaacacaacctacaggacacacagggccaggtggggggtcagggcagcagatgcccccacccccactgcaggcccaagcccagacacctgcggaagacaggagaccgacgggtgtggatgtgctggccggccctgccgcgggcctcaccatcggtcctgggttgtcagcaaaagcccggtcgaaggccttgatgtgcttgaactcaaacatgttcctctgcacgaaagtcttgcggatcttctggttggtccaggggatgaacagcttgtagtagtggttggccttctcggtcagccccgtggagaagtagatgggcaccttcaggttcatgcgctccctggggaccaccggcccagtcagcacagtggccacaggggagaatgctgcagggcaggactcggccgggtcacccccaacacccgtgtctgcacagcccacgcacgggccaggttgagtccagtcgcgaccacttgtcccattaagccctgcagcagccgggctcagcggagaaccaggaacccctacaagagccgcacacggtggcgctgacgggatgtcacaggcttcctggggtcacacagcacacgagcggccccccaggacagcagcaagcagggccaagatgccaccgctacgctggacagggctgcccaccaactggactgtgttcaggccgggccaggggctccttaaagagccgtcctggcggcacctaccagaaggtctccaggaggatgcagagctcctgggcgcggcccagcgcgaacacaggtatcagcacctgagggggacacaaggcaggagccctgggcacatggcccctcgacacagcaggcagcgtccagtgagggcacggccaggtgcccaagagctgcggcctcatagggaccttagcctctcatctgctcccagtcccgtcccagccgctctccagagacagaagggagccgtatgagagacaggagggagccgcatgagagaca

SEQ ID NO: 1879768 - DNA, 4001 bp, Homo sapiens
accatatgcccagcctcaaaaattttgtttaagacctgtaagaagaggacactttttgtctagggttgtttgagtttagtgccactgaaaatcagaatggagccacagactcagaagtgagaagacctgagtttgggtcttggctcaaccttgaccaagttatttagggtagtggttaaacacacagactctggagtcagatttcctggtctgaattcttgccccaccatttgctgtgtgctctcgggcagattattcagccagccatcagcttcctctcctgtagaaaggtggtcacagtctctatcctgtgcacacacacagcctaaaatgaatattcccagctcacaggaagcatgatacatctcagtaccaagtggctgttctgattctgaaggcttggttccctcacctgtctaatggagcacagactgcctctgctcctgactgtgaacaacttattatgcaatgtcgctgctggcacccgagctccttagctacacaagaacctctgtgaagccctgtgtatgcacaactgggggcaaacccagtggtgaatcccctacgggagctggaagttcagacactccctccccatcccctccttgcagccatcaccagccagccagatgctccagctgccctgctgcaggtcagtggcaggaaagggagatggcactcggggaacactcacctgggtagtccttgatgaaggacttgtacaggtcagccagctggtcaggcgagatgtacctgctggggtcatcgggagacttgaagtccaggtcatacttcccagacctgaagaactcggaggccgctacgtccatgccgatgaccaccttatcagtgtagccagctttcccaatagcagtcttcagcagctccaggcctgggaagagatggtgacaacaggtttggaaaacaggtaggtacagagaaaacttcccttcaacagctgctacacagggactgtaacacaaagatcaacaggtgttcaggccccaaccagtagttctgacatcagttactttttttctgctttggggcaagaaaccatgggtcagagttcttggtgcatacaaaatgggaaattcagctctctttccaagaaagcagcccttctcactgacaaatgctcccaaatttagtgcccaggaacagctgtcctggccaagatacagttacagtaagcagctgagatcagctgtcccaaggcacaggccttaaatagagcagaagcggggtccaagagaaagcccagtggaggcagcccgggatggcaggatcctcccgccaggctgtgccgttgagagctcaggctcagggtctgctgtccatggctaagctgccctgccagcaggacagacggacagacacttggctccccaaactagtaggtatcacttgagcccaggaggcggaagttgtagtgagccgagattgcgccactgcactccagcctgggcgacagagactccatctcaaaaaaaaaaaaaaaaagaaaaaaataagtaaaataaaatgaagctccccttttcctccttaaaaccgtttgaagggtcttgatctttacaaactacaggtggaaagaatagatttccacagtggcaggtgtggacgaccccccaacagagggagctggcgctgcagggctgggtgggggggcggttccctagcgcctttaccttctttattctccaggatgttgggagcaaacccgccttcatcccccacattggtggcatctttcccatatttctccttgatgacattcttcaggttgtggtaaacctctgctccaatgcgcatggcttccctgaagtttgctgcaccgactgggaggatcatgaactcctgcatggccagcttgttgccagcatgagaaccgccattgatgacattgaacgcctggggagagcagagcagagaagcatggcactgggtccagagagccccacagggcagtaagcccctctggtcctaccatcccaatctagctcacagatgagcccaagacttgcttcttgaggagcaccagaggggccagggtgctgtgaaatgctcaccaggtctctgactcatgtttttagagacagggtttcactatactggtcttgcctagaggctggtctcaaactcttgggtttaagtgatcctcctgcctcagcctcttgattagctgggactacaggtgtgcgctactgcaaccagttcacgccaggtctattttgataactgcaaattcatcatcaccaggagaaacacttgtgactatgtcaggtaatgctcacagcctagcaaggaaagtactgctgtcatttcctccccgagcctccattgcagataaaggacctggggcacaggcaagttgagttacctgctcaaggtcacacttaacaaggggcagagctgtgctgggagagtcacatgtgttaggatatcaaggcataggaggtctcgggtccccaacagcaagctgaaacccccaactccttgcttgggaagttccaataaaccactcaccgggactggcaggatgacttcagagttgccagccaagtcagcgatgtggcggtacagggggacccccttctcaacggcaccagctttgcagacggcaagggacacccccagaatggcgttcgcaccaaacttagctagaacagaagagaaccgagtggaatgaagtcatttctgattcaccagcttttctcctgctgtactgccctgagggttgtattctgcaccatctcctcccccatcacacctccatttcactgttactagaaatacaaatagcattctatgtggactcaccactgcttttcccctctaagacagagcccaactccagccaacagtaggaattgctgaattcattataaggagcaaagctcttctgagtaaccaaactgacaggctattgtcacctggttttgcacctgatattcaaaaaaaatttttttttttctttttttttgagacagagtctcactctattgcccaggctgcagtgcagcggcaggatcttggcttactgcaagctccgcccgggaccattctcctgctgggactacaggcgcccaccaccaggcctggctaattttttgtattttttagtggagacggggtttcaccacgttggccaggatggtctcgatctcctgacctcgtgatccacctgcctcagcctcctaaagtgttgggattacaggcgtgagccaccgcacctggccaaaagtgtgatttcttaagagtaaagcaaagaaatgggaagagaccacaggctcatgtagctcatcactaagatcatgggcctcttcctgaaaggttttaaaatcttcaggagacttcatgatcttccccagtaaagacgccacctcaggccactcacatttattttctgttccatccatctcgatcatcagtttgtcaatcttctcttgttctgtgacgttcagtttctacgagggagaggggagaatgaggggttggggccactcttatctgcatagcctttgctcccctaccatggaatctgactttggaactgtgtaatatcaaaatcaattctgtgatgtttgttttataagcaaaaaaagtggaggacaaaaatcagtggggagacaaaaaactgccttctgcttgctttgatggttatcaggcattcacccaacaatgcaacagagatggcactctcagacaatgcttttgtaacaaaaggttaatagtctacccagggagcccaaagtgactttacacccaagagaactgtcaggtatgtgctatgtagaccactgctacccaggaacatggctttcataggcaataaataagcaaagctcactgttcactcaagcaggctgagcccttgaaaggcaggctctgctgctcactcttggctaactgcaaagatggcaaatcttcatcctctgatgggaggcatgatttctgcaggtagtccgaaatcatttagcaaagcgtctaatgatggatca

SEQ ID NO: 1879769 - DNA, 4001 bp, Homo sapiens
caccaaggcagggcctgtgtctacccacaagactaccccagctctcccctttcttatcctggcagatccagccatccctggggccctgagagctgaaatgggaggaggataggacggtgacagtgacattcacagggtacttcctgctgtaggctctccaagcacctgcatggattgcttcactcaacagccccacctcaccaccaacatccctgaggatggcgctgttatgtccattttacggaccagcaaactgactttcctctgcatccttctcctcctctgaccccagctgccctactctcaatttaggagtcagggggagttgccactggcaccccatcccgacctggagacacaggaaaggacattttttttttttttgagatggagtctcactctgtcacccaggctgcagtgcagtggcgagatctcagctcactgcagcctctgcctcccaggttcaagcgatcctcccacctcagcctcccaagtagctgggactacagtggaggctgcagtgagctgagaccatgccaatgcactccagcctgggcagtaagaacaaaactcggtctcaaaaaaaaaaaaaaaaaaaaaaagcagcagcagcagcacagagacctaggttcgaatcccagctcctccaccaaggcgcctccccctctgcttcggtctccccacctgcagggtgggggtacagcagtgcctacactcctggctgctgtgggggctccatgagataagccccctaaggactgtgcctgcagtacacaaaagcgcaataaacaggacccattcatgtcatgccagcctgcaggcagatcaccctggaagcaccggggtacgtggagcgggggtcctacctcccttaggtacaggtgtgggtgatggaagaggcccaggctgtgctccagagacttgggcgctcacccttgtcgagcccagtctcgctctgtgaccctccctggggatctgggccagtctgagccagccccgccctcatcaccatccagccccacgtggctgctcacccggggcagggccagtgtgtcagaggcgtcaaagctctttcgccggtggatgtggtaccggtgcgggggctccaggatcgacagcgggatgctcaccctgcgcaggggggcagtgggggacccctgaggagcctcccagcggttgggggcccacgcccaggcccatcttttcttaaaaccagtggttcaggctctgtcccccaaggtgtcccaatactctggtcactcacctgacgtgcgctggctgcgccagggtcccagggccctgctggtctcgcggtgtcctgcacaggcggcagggggtaccgggatccacaggcaccgggaacaggcgccggttgacacggtaacagtacacgcctgcgaggcccatgagaagccacagctctccctgagccaggaacccaggtccccaggctccgtgctgccctcagcggcccccaaccacacaagctgccaatccctctgggaagcccttcggcccatttcctcctaacccctttcctcccagaacctggggcccacgccctaaggggtggggagggacatcctcctggggccctcaggagctgggatggagtcccaccagcacaggggcactgctggggagggtgggatggtgccacacagggcagcccctaattcggtggccaggccttagctcactccacccctaccagggcttggccaccctgtccagactgcaggcctccctccatgagtctcaacatctcaggggcctccccaggccccaaacctcaaatgggactgctctggggcaggggaggccagggcagcgcgaggctggactactcagcggcctagccgagggcccgcactcacattcatggtcttcctccacgccgctgccactgctctcacgcaggcctggcaactggggtctgagagggcgagggggatgagcaggccgggggatggagccgctcagccgccctcgcccaccctcgcccgcccctgctcactcaggatggctgcagatacactcctccttgttggtttcccgaaactcctgcagcttggagaagaaggcctcaggctggctggtgatggaagagctggtgtccagagaccctggtgtgggcaaagcaccaggcagctgacgggagaggggctgggggctgctgtgtggccaccggccaaggcttggagagacgatcagccctggcaccccaggccacctgcttcatccctactgtgcctcaaacaggccaggagggcccctccagtcactgggactgttggttggtttcagtgtctgtctaccctgatgcatagccaaccatccatggaaaaaatatcgacagagcccttatgacagggctagatgctgtttcatgtgccaggaactagacagacaaagcccctggccttaatgaggcttacactgtaaggtggcaagagatgaactagccaccaaaaaaaaaaaaacccgtgatacaagactgaatgctgatacctgccagaaagcaagagagcagcgtcagagcctagtatggccgggcagccataccagggaaggcctctccgagtgagatgaccctgagcagagacatggagaagccacagagacctcccaggaaggacatcgcagggagatgaaagagcaagcgcaaaggccccggggtgggcatgtgcatggttcagctgaggaacagccaggaggggaaagtggcaggaaggcagcgagggtggaggagatgaggttaagaagcccagggagggtctggggaatgggagggacacaaccacatcagccacatatttttacagaactcctcctctggctgcttcaagttgaggggaagcagaggcatcggttaggattcagctggggagaggtaggggcagcccccaacttaccatgattcgacttaggatgtttctttttttattttttgagacagaatctcaccgtgttgcccagggtgcagtgcagtggagcgacctcggctcactgcaacctctgcctcccaggttcaagcgattctcatgtctcagccacctacagagctggaattacaggcgtgcgccaccacacccagctaatttttgtatttttagtagagacggggtttcaccatcttggccaggctgttctcaaactcctggcctgatccacctgcctcggcctcccaaagtgctgggattacaggcgtgagccaccgcacccggcctaaacagtattttcaacttatgttgggtgtatcaggatgtagctggatggtaaatccagcaagtttatggcctgacctatttagtatttggagttgccatttatggagacaggaaagactgcaggaggagcacagcagtggaaatcaggaccttgatttcggacagaaggttaataacttcatggtgatgtggagaagacagtgggatatacaagtctggaattcggaggagaggtgcgggctagagatacaaatggagaagtagagaaagtgtccaaacacctcagcgtttgggagatcatagagggaagatagagaggaggagtcagaagaccgagtcccaggcctaggggtgtagcagtcagaacaaggacctttccttccccagaagcctgggaaggagcaccaacagagatgggggagaaccgggaagcaagtggctggaagtccaggggagaaagtgcttcaggagtgaccactgtgtcccctgctactcaaaggaagatgtggatgagggctaagctggggagttggcaccacggaggccactgatgacccaactgagggccatgttgatgaaatgctgggagctgaagcccgatttaagaaatagtagtggaggctggacacagtggctcatgcctataatcccagcactttgggaggccaaggcgggcagatcacttgacatcgggagttccagaccagactggccaagatggcgaaaccctgtctctggctaaaaatacaaaaatgagctgagtgtagtggt

SEQ ID NO: 1879770 - DNA, 4001 bp, Homo sapiens
taaggcgtaatgagtgactcccacgtggcatgcactacactaaattgtctcactgaattctcctcatgacccttccgtgtcatcctcatttttggaagcagctgcaatatataatcagaaggtgaagcactgtacgctggattgcaaaaaaccagggagaatagtatttgagtaattcccggttttcattcatcgatgacgtcatgcccctacataactgcacatcattaaagcgccatttattgggcacttaatatgtaccacacacggtgttccctgccagattccactttgtcctcactgcagaacctatgatggagacattcgcgcaccccatcttgcagatcagccacagcagtaattaacgggacccaatgtcacagagtacatcacagctatgagggagtcaccaccccaggtggcatgagctctagaccagtggtccccgttccccttgacttaactggtttggaggaggagtggtgggacctccctattactcattttaaattgagctacggccaggcgtggtggctcacacctgtcatccctgcactttgggaggctgaggtgggtggatcacctgaggttgggagtttgagatcagcctggccgacatagtgaaaccccgtctgtattaaaaatacaaaaattagctgggtgcaagcgcacgcctgtaatcccagctactcgggaggctgaggcaggagaatcacttgaacccaggaggtggaggttgcagtgagccgagatcgcgccactgcactccagcctgggcaacggagcgaaactccatctcaataaataactaaataaacaaacaaataaattgagctataatttgcatataacaaaaggtatacatcttaagcagacagtttgattaactttcacgtatttaatgactgctaagttcaagaagagagaacatttctgaaggtcttgctagttccctcgcctccctcccaggttacacccccagccctccaggggaagccacgggtctgatttccatcaccctaacccagttttgcctgttttggaacttcatacaggtggaaccaggcagaatgcaccctatgtctcaagctcccttcgccctgcacgacgctgtggaggtgcatctccctcatttgacctttagacacatcccgctgcatgcctgtagctctggtagtttcctataagctccctgaaccaagcagcaggaccctccccatcgtggcatcactgccttgcagaccgagaaccaggtaagacagcgtcaaacagagggtagaggctccttggtgactttttgttttgagacagggtctcactctctctcccaggctggagtgcagtcgcacaatcacagctcacttgcagcctcaacttcctgggctcaagcaattgatcctcccacctcagcctcccagatagctgggaatacaggtgtgcatcaccatgcccagctaattttttattttttttagacacagggtttctccatgctgcccaggctggtctcaaactggattgctgggctcaagcgatccacctgccttggcttcccaaaatgctaggattataggtatgaggcaccgtgcctagcccgatttttatatcagagctctttctgcagttggctgactgaatggcttggggaggcaggtgagaaggctggtctcaaggtgggtcccctgctcactgacctgactctcatgccctggaacatctcggtgctggtgtggaagggcagcactgtggtggcgctgactcccggacagtccagcagccccagggtcaggctctccatgaaggcgaaggctgacgctttggatgtgcagtagtcgatggcaccggggatggcagacagtgccagcacggagttgaggcacacgatgtggccattctgcagctccagcatacgcggcaggaaggccttggtggtctgagggcagatggggtgtcagggtggagcagctgcagctctgacaacccctccacctttctttcggggagaacagcccaccccggacacacatgatgctctagggcccgagccttcctgcgagggagagggccgagggctccctgccccaggacaccgagcatatttcacaaagtctgatgtgtcctagagctggtcattcgtcttgtctggccaccttgttcgtggacatccctgctggcctgagcccaagccctggcaaatcatcccctcccctccatcctgcctgggctccctgcacgcccggggctggctctggccccggatagcccttacccagaactggcccagggtgttgatgtgttgggacttgaggagggcatcatcatcactgtccattaggctcttcccatggaccacggcggcattgttcaccaggatggtgatgtcacccacctgcaggcgagagggagccacggggccatgagggcagccagcccagggccaacgatatatgttttttgtttgtttgtttttgagatggagtctcactctgttgtccaggctggagtgcagtggcaccatctcggctcactgccacctccgcctcctgggttcaagcgattctcatgcctcagcctcccaagtagctgggattacaggctcctgccaccatgcctggctaatttttatatttttagtagagatggggtttcaccatgttggccaggctaatcttgttctgacctcaagtgacccgcctgcctcggtctcccaaaatgctgggattacaggtgtgagccaccgcacccggtccaatatactttttaaaagggatatggcttactcctaagtgaacgagtaatttctgagtccatttatgatcaatcaattgatgtgttatttacaagtttttcttagatattccttcccgcaggccactttctgccagcctagttccagttatcctgcatacatagaggcccagcagccacctggccgtaccaccagcagccacagggcctggggaagagaactgcgtctctgagcgccagtcttgatttgtgagatggggctaatgccgcaccaggactgttctgaggaggagaaataatttatggcacacaccgtacctggcacacagcatatttataataaatgagtttactgcgacataaaaacagttaacattaccacgtgccagacagtcagggtgggtttccctctcttggaggtcactgatatatttagcccaaacagatgactggagtcagaaggattttcccagaggccaatgggacatttgccccgccacagtcctggagagaaacccacacggtctacatttccaagggaacaacagatgattacgcctgttacgtaatcaaccctaatccctgcctatgtaactggggccagcttcatgggagagtccccaaaggtgccccgggcaaagccattctgccataagcagagctctcttccaggccacatgagaatgttctctttgcccggaattagcctgtggtcagctgtgctaggaatagaccctcccaggctacagaccttctcccggacggccttggccgtctggtacacctcctcccggttgcccacatcacagatgaagtaatggcactcagtgcccatctgccggatctcctccgtcgtctccttcaggcatttctcagtccggccccagagaacaatctggaagaagataataacaacgcagaacaaatggtcattaagccacagtgatgcaacaattgccaccagaaattcaggatttaaagtcatttgtcttgaaatgactggcctccctggttccacccaaagataaagaatacaacatagattaataatataacttttgttttttttgaggcaggatcttcttctgttgcccaggctagaacgcagcagtgcgatcatagctcactgcagcctcaaactcctgggctcaagagatcctcccatcccagcctccggagtggctgggaccacaggtgcatgctaccatacctagctaatttttttaaaaaaaattttgtagagtaggggtatt

SEQ ID NO: 1879771 - DNA, 4001 bp, Homo sapiens
tgaggacgacaaaacgctgcggacccagtgactcatgggacccctctgtgctacggccacgtgctgtccacatgtcgcccctgatctccaggtccgcagggtgggtggcatcatcacacttcatggaggagggagctgaggcccagagaggtcagtgacttgccctaggtcacactgcagataacagccctggctaaagtgacggatcccttgctaacccccaccgctaagtgctttctatagattaagccactgtttcctcgcaatagcatcatgaggtagctgcttgtgcgaatatcatttttcagttcaggaaactgaggcacggagatgactagcccaaggacccacagccaggaaggctggcttggaaactgctctctacaccatggtggtctatggctcatgagggcttcccagccatcaccaccttgagactcctggagtcactgatccagttctcagatgacaaaactgaggccacaaagaagacatgacttgcctagggtcatgaagcccaaggccaagggcatgggctggtctatgtctgatctcagcaggagggaaccagcaggagtgtggccagggcaagtgctggctgggagctgacggtgcaggcctgaggatgcgtgccggggctcagggctggcagaggtgaccctgagagccctggagggaaactcttccagggctgctggactcagctccaagcctttcccaagtggccagatgctgggatgggcccaggaattggatgatggggtgtcaggcccagctgactcccaagaagggaggggccagcccagggctaggcctcctgccccaggcctcctgccccaggcctgctcagcctagaatcttgcctctgggaagactgaagcctggggcgccttcctgctccttgcacagcattaggtcctattcaggtacccaactccctcaggcctggattctctcctcactggaacttgggtgacccctctggctctgctgtcatcaagatcccattcaatagtgactgctaaaaggtcttctaaactacaaagggtcacatttctgagaaagagaggggtgggccaaccttcagtgcaccaagctgaaaatgccttggggaggtgggatggagctcaggaagctggctggctctatttcattcattcattcattcattcagtcagtcagtcagtcagtcattcattcattctgtggacacagagcctcagcctaccctcccacttccccagccttaatctgaccttcagcaagcagagagaattaaacacaaactcgctttgatggaccagaactccctgctcatagggtctgggtgcccggactctgggtgacctgagcaagtcacatgctaagattcaaagactcagtttccaaggaagaggcctggcctcacagccagaccagcccctgacttttgatcactcctgccctccatgcatccctcagccacccgcagagaagctgggggcagagtaaagcaagcctggctcaacctccacccagaaacacacaagcacccgacaaatgccatatctgaaagctttctccatccttttcctttccttgactccctcagtagtctccatggacagtcatctccactcccagcctcctcgctggcctcccacggtctcaggctaagcccagagggtttaggggtttgccagcaggcacgcagtgtgtgggggcacagagccaaggactgcaaccccccgaggagggctccatctgtctgacctagctgctgtccttcccgcactggaccctcctcccccgcgcaggggctcagggggctcggtggcacttacgtctgggctcccggggtccgtccacggtcaccttgatggctcggtggtaggtcgccacttgggtggggttggtgaacacagtgatggtcagggtgaaactcttccctggggagagtggggaatagaggcaggtggttggcacctggagcttccacaataccctgctctcccacctgtatctacccctggaagcccctaactgtcaagaaggggcactctgtcctctttgaacatgggcagaagatagggctctgggtgaagttcaagctcttgggcttggcattcaaggcccctgggggtctgacgccaactttgtcaaccccccgccccatgccgtgaccaccctggctcatgttcccctcttcttggcctttctgctgtctcttctattcagagacccacacgattttgtggtggggagcaggatgggtatattctattttctgaaagtaattggtgatctttgtagaaaaattcaagaacatacaaaatataaataaagaagaaaagacaccccccccccacggttccactagctggagatagacaccgttaccatttggtgttttccctttcagctctttttgtatgggtttgtatatttacacagtcgcagtggtactaaaatacagattttcatactgttttttttttcatttaacctcacatcagaagcactttcccacgtcattaaaactccataaacttcgtttttaatggctgcaaaatatttcaactcaaggaagcctcctcatcttttatttatctacctccttactctcgggtatttacatcgttgctaatttcttattgatgtgtgcagctggagctgaaaaaggactgatttgggagctgcagacatttcttctgtagacacaactgttatttccagaatgttctatttttagatagacatttggctccaaagtctccattcaaaattcctgagaggggaaaaaacttttaaaatactacttttttttttttttaccatttaaaataaaatgaaagtgaccttctgtttataaaaatctttgtctgcatctctgcttatttccttagaagagattccaagaagcggtgagtgatttcacggcagcagagggttgggacatattacgggcgcggatccctcttggagtgagatgactctccggagagatttagtcgtcaccctcgcgtgtgaggctgcgtcacaccccagggatgtgtctatcaagatggaagatcttttacacgctcttgattttgtttgcctttttttctattactagtgagaatgaaactttttatatgattattatccatcataatccaacacaaattactgcttcatgttcttttactttcctgtgaaggttttagtgccttttaaaaattgctatatattaagcttgttaatactttccatgctgtatttgtggccatcagtttccccgggcacaggcctgcacattttgccttcacacgctgggtggtttttcattttcacttctatttctcgttcttctatcgttttatgttcagacgggtttctccgtgtagaaagcagtttatgaagatttactttcgacagtcttctctctactttctacagtgaattctctgatgtgtctgggagtttgggggtctgggtaagagtcctcctctcaccctattctctattacgatccacagcctcatgctttatgagattggtggccgggagcgggggagatttgcggatcccccaagccagactttatccccctatccctgcctctggatcccacgtacaggcctgggaactccctgtgggtaggggccaatggtctcgcactctcacctgtaccccagggctggcacaggatggtcaaggagagaggctgcccaagcgcatccctctggtgtccccctgacacgcctccaaagtgagcaggtaggtttcaacagccccacgttgcaggtgggagatgaagctcagggtggagaccagtatctcacagttctctttgcatggccgggtacttgttagtcaactgatcaagtgaaaattctagccccagaggcaggagaatccggaacaaaattaaaccagccaggctgccaggagccatgccacaggacccaaggccctctgagacaccagggggaatttaaagctcaagacccactgagtgtcactccagctgggaaatg

SEQ ID NO: 1879772 - DNA, 4001 bp, Homo sapiens
gcccatgggcacctttaggggaactccctctctgaggtcgtcgggggatggcagcccgcacccactggcccatggcctctgctcgagagatgccatgttggttcgtagagaggccacctggaaccatcaaccacatacatcccctcataagtgctacggctctatctcccaaattagccactctctccaccccacagcctgcctggtcccggtctgatttctcctatgtggtgagctatccgtctcactctcaaagctgcctggagccaagacccgcaacctcccatggccacagggccccgcagagcccagcccccagctccacccttgccaagggcacctctggcttcccctgtggaccccaagtctgtcagggcctctgggagggaacatacttgtcattgacgaaggagtacatgagcagccgctcctcgatgaagcgcttccactcctgccgctcgccttggaggtcacggtatgtgtcgttggaaaccacgatcccgtcagactcgtaggccagcttcacaatgaatctgtcgtcatagcacaccacccgcttgccacccacgcgtcgtgatggtgtgaacaccaggatcttcttcttctccagttcccgcaggatgtgctggtctgggaggtgacgggtgcacacaggtcagggcccagcgggacctagagccaggcctacagggctccctaacctgctgatggccacacacaggagtggttaacgccaaggtcaccggggcaagaactaactctgctgaggcctcttccatgccccagcccctcccttggcgtggcacagtttgctgcctgaagaccaagaacatctgaacacaggcggcagggcctgcatggcagaggctccaagcacagagctggccttgttccttttctccttctggacatcaggcctgttcaagccagatgtggtcttggctttggctttcatccagcctgttctgaggggtccgtgaatgagccgcagcttgctctggggtgggagaagtatcttggctctgtcccttgcattgccaggacaaggtcgctaaatcccatggtgggaaaaggtcaggccactcaccatgccccacctggggagctgctgggaccacagggacacagaagtgtgcaagtggaaagggcccctcttcctggagcctacagtcccagacaggctgcccccagatctcaagacttctagagaaactgattcagtttttacctccaaaggctgggggctcttgcaagaacagtggtaacagctaacatacactgagcatctaccatgtgccaggtactcttctcagcacttaccgtgtgttaacttatatgacctcacgaggaaggcaatgctgtcaacaccccctgctgacaccgaccccatgtttcagatgaggagcatgtggctcagagcagggctaagaggggtccctgtccaggccagggcgccaagaggggacagagccaggattccaactctggctgtctcgactcagagcccacaggcttaaccactatgtgatactgcgcttctgccactggggatgttgaaagagcgacctgcccaccagtaggatgagggaggggctccagatctgaggcagaagactggacaaggtgacctccaatgaccaccattcagagcaggttgctaaggacagaaaaaactgagaaaagaaatgctggtccctgcttgagttctagaagttgtaggtcactcccagagggtctctcttggggagaaccagggctgctggggcagtaagaccatcccacctccagaggcaccactcacctgtgatgggcacgtcgggccgaggctgctccttcctccaggatggcacaaacactgtgatgtctgtgtggccccgctccagaaaccagttcactgccagcaggatgccccggcaggagaagacctccttgttcccatggctgggagggagaggacagggttagcccacactgatggccagcctgccaccccctaggcctgagcaggaggagggaggtggtcacaccccacccctgccctggctttggtggtggtagtgagcagtcccttcccctttggagtcaccagccccttcccctttccccagggctcaggccctggccctctgcaggtggggcccaaggccaaggcctccattcccagtgccagttcccacagctccaggatggccaggccccgctgggactttccctgaggctccatctcctgaaagtgaggaagcgcccaggaagctggcagcactgctccccacggtgggggagggccaggccacttgcaacacacctgggggtgggggaaaggtgccgcgagacttctggttcctgccccacccggcgagctgccgggaccacagggacagatgtacacatgcacactgagtcaccacccctccctcgcctcttgcagcgtgggtgggggcgggggaagcaccggctgggctgaccgaggagaaaccagattgttccggattaaagttcagtcctcacacacacctcagggactggggcctgagaaaggcaaaggggaaggggctggcgactccagccttcagcatgggacagaaagcgccggagtgaagcaagttccccaggagcctttcagtctgaaagtgaaaggatactgcttttcctcccaagatggcaattcccccaaatgcctcttcaccccaaggcagaaagaccatcaggaagatgctaggggactcttagcaaggacagctgagtaaggcatgggccctgccttggtctcagacgaggccgcgccccacccacaggtggctgcacccagaaggaagcctggcagggctcctgggctgccgcagctctccgttcctctatctgaaaatgggcccagcagtctgcagcttccttaagaggggtcagtcagtgggacagctttcctggtggcttcaggccaaagatggccctgcaaagtaggggttccaactggatttcctgagggatgggggactggggcttggggctcccaggtaacactaggtgtcatggaagagctcctaggaccagcagccccacgtctcactgccccctcagtgaacagcttagactctcgtatttggcaaataaaacagaataaatgttacgcaaaagaggcaagtccagggccaaccacatcctgtgggtgtctttaatgggagtgggggaggtaaggggtgatagctggagccctaagagaagctagggagggaggtggggcagctgggggccatggaggctatttgggggcaagactggggcaccagggtctgaaggtctctaaattgtaggggagacaaagtccagcccagggcagcactcatccttcccggtccctctgccacatctgccagcctgcttataataaaagttcccatttgctgagagctgtgaaccaggccctgttataagtgtctaacactgaatcatcagcaagcttgtgaggagggcactataccatcatcaactccttccctgtttttcagatgaaaactgtggtccagagaaggcagcttagtcaccagggtcacacagcagttaacggtggaagagagacgcaagcccagggcctatgcttatcactaccctgtacgtcaatgctcaggcaggtacgaaggcaggcacagaccctgatcgcagggaatgagcagggattcgcaggcactgagctcccgctggtggccagatatatggcttcattcttatagggcttgctaccgtgaaggaaaggaaggtcacctggctagtggtaagagacagtcagaactcgaacccaggtctgggccactcggttgccttcctgtctctaacagaagatccagaatttatttgggagaacaaagctcccaaaattgagtttgaacaaagtgtgttatgagagacaggtggcgaacgggagaaacaatgctgctggcaaactcctgctcttccttcagaacccttgtgagatgtcactgcctctgagaagccttccctgacctgcc

SEQ ID NO: 1879773 - DNA, 4001 bp, Homo sapiens
acctcaactcccaggccacagaccgctacgaacccactatgaatctgtggcctgttaggaaccaggccgcacagcagaaagtgagtgacaggcaagcaagcattaccacctgagctccacctcctgtcagattggtggtggcgttaaattctcataggagtgcgaactctactgtgaactatgcatggaactatgcatgcaaaggatctaggttgcctgctccttatgagaatctaatgcctgatgatctgagatggaacggtttcatcccaaaactatcccctccccaagttcatgaaaaaattgtcatccacgaaactagtctctagtgccagaccgcttctttaaatagtctctagattacttataataccgaatacaatgctatgcatcacctcattctcatggattcaatgtagttctcggcacacggaaaattcagttttccttttgcaatattttcaaatttttttccccaatatttttgatccaaggttggttgaatccacagatgctgaacccatggctatggagggctgaatgtatgttggattacatgctggcaatcccttcttccaaagttaaatgaggtccaagttctacccaactctaaattgtactatatctgaaccatctaagaatccctcattttacagaggagaaaactgaggcccagagaaaagtaattgtctacaagttctagcactgacagtggcaagggcacaagaatgctgtcctctctgcacaccatgtcatgaccatgccagctaggaaatgcactgggccatcttcacctcggggaccacacttcacacagcactgttcctctccttaattgctgattttagaaaaaatgtcatttttatatgcatctaattggtggtaactggcatgactctgaagtagccaatctatggaagaggtaataattgtcctctgacaactggctccccgttattgggctcatagctatctttctaagccagctgaatatgcttaagtacaaagttttgactttccagaggaaaacttctatttcttaccttctgcatctgcagatcagatttggccatttccgcaaaataatcagtgggtcgcttcgtagggactttgagctgatggaggcggggtaagactgcaagcactgcggcctgggcttggcgatagctgagaatcgtaggacaaaatgtgtaatgaggtgaaggaggaggccttacgttccttttcaccgccaatcatgagttatccaagctcagaaggactctcaaaatctgacctccattagcaagaacaaacaaacaaaaactgtctcactgatttagtatctaaaagaaatgtagccgtatactagtttttaaaaaggggaggggtgttgctaaaaatagtttaagagaatgactactctaaaggtacccattaacacaaacgaatgtcgattatggattcttatgtaattactaaagcaattccacacaagaacatcccataagcaatgtttgtttgtttgttttcctaataactgaagcatgcacaaaaagttttaacatgaatatttcaaattagcccataaagtggattttggatcgtgaccgtggaccaaagagctcttctctcaaacaggaagaatctcctagctattcttagtcaaaagaagccgctctctctactcctaggcttattctgagtgcagacttactaatttcccctctttcccactctcctgcacaaggatcctcaacttctccaacatttgaaaacaaacatacaaactcatctctcgctggaagtcgtcttctggatcaacagctttctggtccttgttctgaggtgctggcgcctcagatccaccgatctccggtaccggacccagtgtcacatcgagcctttcaacccattccagatcccgcttgaattctgccaaacattgcttcaggccattctaggaaatccagacactgagctcacaagaagggaactctgagtttgtctttcccaagcacaggctgttaggcgaagggacaaagtgctaatccccaatacccagacaggtaattgaccctcttggcgaggcgcagggtgcatctttcctgggacaagaatcggtctcccaagcccaacagcgcctgaagcgcatcccatgtccgagtacccccgaccctgtgcccacgctcaccacgtcgttcacggccttcttcggcccctctagcacgacattgaggcctggcttcagaagccctcgggaaaacgcatcctgcaactgcaggacacaatcacggtcactcccaggggtgtaaggccccctctcccacgcccagccccacgagctcggctgacacctacctctctgtctgtgacaagggattcatcggattccgactccgaatccgagagcgggggagtgtccatctcgccgcacgcacgtcccacacctacaggaagaaacggggtatcccgagacccaagcggctagcagagggcggccctggccgctgctgcctgccttcagccccctactcccacgccgtggctccacgtgccaccgaatcgctccagcgccagcaactcacagctactgctcaacttttgattgggacttccgcttccggcggcaaaccatacttccggtttgtcgttgctataggaaccgctacggcgtttgaaagtgtccgggttgcttaggatccctacaggtagcgcctctggatacatgcgtggtctgctgacccagagagaaacgaaaggtgggagggggtacctgggggtcgccagaaggagctggtagcagtgagggtacaaaggaaaaggcagaaaaaggagccgcgggggtggggtggcgcggaggaggaccccgggggaggggaaaggggagggacaaggggaggggaaaggggagggacaaggggaggagaaaggggagagacaaggggaggagcaaagggcggggagggcgagtccgggccgggggcggggtcggagcggggcggtgctctccactctgaagcgctgccttggtcttcagcagaactgtttggcgggagatcatgtcagccgtggtagctcagacgctgcatgtttttggtcttcgatcccacgtggccaacaatatcttctacttcgatgaacagatcattatatttccttcaggaaatcactgtgtgaagtacaatgtggatcagaaatggcaaaaattcattccaggtaaaactttttccatcctgacatatacaggaatggtatgtgccacatataaccccataatcccagcatgatgattggaaagaaagattttggccaatttgaatatatatgcagtattataaatgtagaggaaataaatggcgacttgtattatgaaactagattaatcagtcacgcatatgtagttaaaatcacatataaaatgttaatttaaaagtacttttttcactgtaatttcatgaaaatatgttaagaacccctcttttggtgtcttcaatatcactgcctttgtcatcaccagagccactttttgagttgtctaacagttttcctgagcacaccaccttcattatatcaccgtttgaatccaagtatgatgaagacactgtaaactttatcccaagtcgcaaataaccatttgtatagcattacagcccttatttttgttcacagtggtcctgttaatgatattcattatttcaacaaccgaatccattttcccattctttgttgcattgacaccttttattgtgacatatacatacaaaagaatgtaccctacatatatgtcatatttaaagaattacaatagaatgtagatctgtgaacccagccacccagcataggaaacagaatattaccagttctagtgcttctccctgtattctgtgtcttgctgcatcagttcaatgtcatgcttttgagattcacacatctcgatacatatagccaagttcattttattgctatgtagtgttccatcatatgaatataatgtctcaaatatatgtattcactctaat

SEQ ID NO: 1879774 - DNA, 4001 bp, Homo sapiens
ttagccaggcgtggtggcaagcacctgtagtcccagctactcgggaggctgaggcaggaaaatggcatgaacccaggaggcggagcttgcagtgagccaagattgcgccactgcactccagcctgggtgacagagcaagtctcaaaaaaaacaaaaaggtaggtgggtggcccagtgcctcctttatggctatggctgcatcagcattcgtatgtactgttctcatttgctccaggtcacacatcccgggtcctgagtctgaccatgagcccagatggggccacagtggcatccgcagcagcagatgagaccctgaggctatggcgctgttttgagttggaccctgcgcggcggcgggagcgggagaaggccagtgcagccaaaagcagcctcatccaccaaggcatccgctgaagaccaacccatcacctcagttgttttttatttttctaataaagtcatgtctcccttcatgttttttttttaaatctgtttcagctaatgcctttcttctttcatgacctatgtcccagcagccttcctaggggctctactctactgggatcagagagctagatatgtcctgtgggagcctggaccatccatccctcttgtttgtggacagggctaagcgtgttgtgttcccccacctcctctgttcacatacgtatacacacagcctccgtggtttcctctgtcacttttaattaagacacaagttgagtaagcagcctccacaggctgtattcccaggcccccgcccaccctgacctttggcccagaagctactgcttcagtgtgtggggtggaggagtgagactgggtccacagtgacattattgctgacctcttctgtgtgaggaaaaaggccacgagaccctttgtggggccagccctgagtgctcctctcccaagttttaaggcagggagggggaaataactgtacagcccttttagcccccagctctggagtggcagacagcaatgaggccacatccctggagctgcccgggggaagtgggtgaggaaccaaagccgtggtccctgtagagcagctgtggggaggggagggccagtcccctgctcagtcctgaccacataagccttggtcacaggtgtaggtggagagggcactgacggacactgccctaaggtgcagtcctgaggcacttaggtgggcgcctatctaggccatgcttctcagttggccttgaccttggcaatacctggagctccattttgctgaagtgcacggggcagccgcttgcccttggtataagagtgataccagaagttggagaacagcatgaagaagatggtgccatacatccagatgaggtgaataatgactgggtactggtagttacagctggacataaagtagtactgggagatgtgcagtgagaccaggacaaactggatctaggatagagaaagaccagggtcagagggaatagtgagaggactagaggggaagagggggtagagaaagagacaaacgttgagtagggagagatggggtcaaaggtgagacagactggataaaggcaggatccaggctaggaatgtggggggatggttataggtaagtcaggccaagcccctcaccagctgaatggctgtcatgtgctttttccaccaaaggtagggttgtgccacagggccaaaggcagataatccgtagtacaggtacattatgacatgcacggaagagtttatcatggcatggaaagagcccattcctcctgtgagtggacaataagacagggtcagcagagtccagcctctggtgcccaccctttcccatagtggccttcaccactcacccggggcaatctttaccccccaccaccagctccagggaagcacagagtgatggaagacatgtaggaaggtcacctgcccgtctttctttcggagaataaagatcacctgagagaagagtgagggaaggggattcagaacctgggcttctccacctcattctcccctcaagttctcacatctcatataactactcactgtgtccatcagctcaatgaacttggagaagaggaagagccaggccacccgaaccatctgcaagaagttgggatagccttaggacctcatacactattctaagagcctccctaaactgggccttgagcacaggccccaaactggtcatatctaccaggttgcttatgacctagccccagcccctacttaccctaagtgcctcagggctgttggaatagtccacagggtcacagcgccaggtataggtgctcagccagcccgacatcaggaactgggaagggatgtggattagaccaccagagttctcccttcccagccatccctccccttcgctagctgaggacatggatctgaacctctctggaaaggagaaatgccatgctctggctctatggcctgctccttatcctgctgacagaaattaaagcccggcatcccaggggcccacctcatagacaatgtagagggagagtgccaccagtgagaagttgtagacaatcatgaagccacggagctggaagggcttccgattagccatgatgcgaggcccaagtgagagaacgaagtacacgtaggtcaggagaatggaggtcattagcaagggggaccccatcagagggtagccctggatccggggatctatgaataagggtcaaaggaatcaggaagagtcacagggttcgaagggtcttcatttgaagggtctacagacatgaggtcaggtcacaggatcaagggtttcataggaactctccattagaagacagccgtagatccagggatcccgggaaagaaggaaggaaagggctggtggatagcgtcttacctgcgtgcttcatcacctcttggtacaagttcacaacagcctccatcctggctaaggactctggggaggtacagagggcggatgtcagacagatcccactgcacacccccatcccacagagataagacacagaaccagacaagacacctgcaatgcctcattgcagaaaggacagaacagtgaaaggaaggaattactgggaactagggggaggaggcagtttggttgaggcatctgctccccacacatcctgcttgcctgggaagagctgttccacccttcctctccacaccttactctcctctcctctccacagttttacttcctggcctcccttcccctcttcctccacaagataactctcaattccaggtctcttactggagaatcttaccttctcaccaacagggagctcttgaactccgtctcccttcctcacccgagtccctcacctccccagctctgggtctttcttctctccagggattctccccttcaatctctcctctcctgccctctcctcttcccatccctctggacccttcctgaactctcttctccccagggtccctcctgtccctgccaggactctcacctctctgggcccttctgtccctccagaaccttatcctcggattcctccttgcctgtgctgggacacttatgtccctacgattctcctctgcctttcctgggactctcacctccagcctctcctctccagcgctctcctctctcctctcgcagagcccttcctctcctggagcctggctctttgagactcctgccccggcggctccacctgtctgactagatctggcagcagccccgccctctgcccgcccctgctgtactgtgcagggggtggagggtgggtccgggccacaggtcagtgcctgggggagcaggacccaccaggattgggaaagccaagtaaagccccagactcgccacccacccacccacgtgggaccagcctgatgagctaaggtcctagattctgagccagaaacctcctctgaccccagccccagccccagccctggcccaaagcactgctgaaaatccacacccagcatcctctcctaagccggccataactgctcagtttgtcctacttcagaatgggtacaatcactcttcccttcctggg

SEQ ID NO: 1879775 - DNA, 4001 bp, Homo sapiens
gcaatctggtaggcccatgattcaaggaacagtgacattcagtggtccagtccactccctcagaggaggcgggtccagagggtgaaacaggctgtgttgatgacagactccaggtggtggtaggtggagaccagttgggcaggggggctctcgctgtcctggggctgtactgggaagggctctcggaaaaccactgtcagagactgtggggaacacggtggggatgcactggtgagaggagggcatgggtggggataggaggcagggctcagaaagggtgggcaccccaacctcagcaggctccgaggtggagcatttggggtacggcctcccatgaggctgacacaaagccccccactcgttcttaccgtctttcctaagtgggagtccagaaacactagcacaaagcagtcagtgaacttctgattcagcacaacctgcagtgaaagatgaggaggggacacagaccctacagaccctcccacagggcatcctgaggtgaagggaggatgaggagaggcctacttccatctccacacctcaccccgcctgcaccctgaggtcacataggaccgtgtctccaaattgagcctcagtcctcatcctcgctggcttgctggtcagcctgtctgagctgcatcagaatgaggggtaacagttgatcctggaggccccacacagagcctggcacactgaagccaatcaacagagagtgctgtacccctggcacaacctccttgcctcctgtcctgggactcctctctgaccacccctgggattgtcttgtcgtccccttatgtccatctgctccctaacgctctgcttggtgatccatcccgggatgatttgctctcccaaggcttcagttaccgcctgttcacagagctgctgcctaggactctcctgagctcgaatccctgatgcccacagaccttgcagacagtgaagggcctatggaccccagactcagcttgccccaagctgggcttgtcacccttccccaaaacccactcctgctccagccttcccaccacccgcaggagcacctgcctccattcacaaccgccgacactactgcagcctcatcctaactgaccttggcttctctgggagacccttcctgcaccctgaaatgaatcctctgcacaagcactgtgctgcaggacccctcacctggctccacctcctactttctcacttgaagtcttctcttgtaatgcctcctctcttgaacctcagctctggctgggcccatctctgtgggctccttaatgccctgtgctcgtgtccaccaccacagttctctctacctgtcctttacagcagtgctttcacgcctcagtgtgcacacaaatcacctggggagactgtcaacctgcagatcccgagtcaacagtctgaaatgtggccggagagcctgcatttcagcaagctcccaggtgctgcggctgctggtctgtggaccacactttaagtaacaaggcttcaaagtccaaggggtcctttctggggctccagcctactgacaaagttctgacagctccttgggttgtcagttccagagcctggccctcaggatctcaagccaaggcttgtattcttggtgagtctttgagggcagagctgctcagagaatcacatgctgtagctcgatgcccggtactggaagggttttacatgtatctgtgtagtcccgttctgtctaggcctccctccagagcagagcttgtttggtcaggctgaggggcacatctgtttggtgaggatttctgctgtgtttcccttttcagaggaagctcaaggggacttaccaggtactgagttcccaagtctgggctttggaaatggcgacagctctgggggaagcggcttaggagaactttgatcaggctctggtaccaggagaccgtcatggataggaagcagtcctgagggaggagccacaggcctgagtcttctgtgccagtcacctcagattcctgtgccctctgccctggctgccagtggaattcctggcacctatcccagctctttcgggagcccacagttccttaccagctgggggtcgatgtccccaatggatttggcatggactgcttctaggagttcctccagctctgccagggccaggcgcccccctagccgcagtcgatcaggccccggtggctccagcaagaagaggcgcttccaaagggtgtcccgacggcagtgccctccagccagccgcaccagctgagccagccgtgctcgtgccatgcccacctctgcagccagtggtgggaacagaggagccggtccaggcgctagaataagccctgaggcctccccagggctgccagctgaactcccaggagcctctggctcagggggcagtctgggtggcttccggaagcggcgcatgtcagcagtgagcctggggaagagctctcgctggctggtgagcaccacgaagaactgtagcctggggtggggagcagggcaggagagtggtggttgtagcaagagacacacagggcagggtggggcaggctgggaaatgggcatgttcaaggtaggggatctgctgaccgcagaacgtgccgctcagcctctccttgctcctcaaagggtgcagcacagtgacagacaagcagagacacatcaaagtcatcctggtgtcgaagtccctcagagtccaggtaggagccagaactgtgcaggacgggttggggagatgtcaactctggggttctaataaaacaaacctcacccctgcccaagaaaacattggtctccctactgcaagtatgtcccaaccccagctcctgcagcgtgcatgctggatgcccctctcagccttacctgtgccatgccgacaccagggcatactcgttgtgttctgggccccctggccgggccattcgcaatggcttcatgtggtaagagctggcgtgatcagccacgtagttgtatagctggtgggcagcaatgagtggtgtggggagctccaatgtccctgagggataagtaacaggagacagcagacactaagcctaggacagacacactggtctggtggggcacagggatgggagtctttaaggctctgactggcaggcagagtgggtctgctttccttaggagctcctgcattcctgtggaacactgagatgggacagaagtgactcagagggcaggggacatgtgacatggggtccaaactctggtaagaaacagacacaggacagaaacatggggacgtggtatgtgtgacatgagatgattaacaacatgggaccacttgtccagggaggtggtcccaccagccctgacctggaggcacctgtggcctgttcttttttgggttcactggcttgcccttgggcactgaccttggtaaatgtgattgcggccaaagtggggtccgtcagggtggtgggccaggaagtgtcgcagaaaggtggtgaggtggtagccgtgccgcagcaccagatgggcacctagcacgtgctgatgcacgaggcgcagatggaagtcatagctgaacgagtgcacgtgcatcaggtcccgcaccttgtcacactcctctgtgaacagcatggacagctggggaggcagcagcaggagacagggttaaggtatggctgcactggctgcccaaaacacatttccctccttccgtgggaagaagcacaagatttcccctgctgctgtggcctagtggaacgccctctgccagaatggtttctgtgggaaggcctccccattctagcctccctttttcatactgtattgtaactatctccatgaaactagggccattttcagaaactgggccattttgctctatcccagattccatcagggtctgccacagactctagatgactacaggccagaccaggcactgtgctgcctcagggctacagctgaacacgctttggatgaccgatggggtcagccttgtagtgagtgcagtcatggcaccagaatgagcactgacctagccaggccatagcagt

SEQ ID NO: 1879776 - DNA, 4001 bp, Homo sapiens
ggtccttccacctccctggaaaggtgcagaatgagccaggcctaactacagggccatgagcctctagaagcttaggggggaataagaaacactgtgaacttagatatataaatagagagagacccaagcaataggccgggcctgactcccagacccctgcagatcatggctaaggccttacatcctcctctgtcatactggagtaggaggcaggggaagtcatctttggagtattttggtttttcttatttatgtacaaaaaagtccacatccacaatccaaaataaagttctctgtccatctctgaaactgcctgtctcagtttttccacctgtctgtttggccgaagggaatggaatagacatgaagagacaatggatgtgaagaagaaatagagccatgggtttgggtaataagaagagagagcatttggggttcaagagaggtgccccttccccaagaggctctagacatagtcaaggctgagggttcagcccttctcctagctcacataccatcccatttgcctcccactgcctaggttaacatacccaaaggaatgtgccaccatctaaagaacatttccagaaacagaccccagtgtccttaaaaagaggttaaatattaaccctttgggtgctggccttgtcaggcagagatgaggccaaaagtaggcatctgtgaaggtctgtctggcccttggccagagcccccagagggatcagagtagctggggttgggactccacagcatacttgctcagtgttgggggacagcgaagtttccataatccagggaactcagtccagggaaatgatgtctgaccgacagccagtcaaagagggacctgagggcaggggtcctccatgcccctccctcaaggcccccccaggggccacaatgctgctgacacggccaggagggggcgccggagtggcgctgcagtgggagctccccagcgtgggggccagtgggcccagaaagtgagaaggggtccctcggtactggaagaagtggccaagggcatcctgttcatctagtgaggtgatgacagaggggccatagtgctaggaagaatcaagggcatagtttaagatctcaatcccgacttccccacctcccagtcactcatctcagaaatgccgtatgagagcaatcaacccctgtggatccgaaggtattctcttgagaagcaggagagcctctccctctttcccctacttccctacacccttcccctttccctgccttgagagagctcctccaacttgttaggttcttggctttgtgggcgtctgaaatgtgtggaatgtccggttagagcaggcatggtgctctaagtgcacacgggggtaggggtgagtaggccagggcagaaaagtaacaggggatctaggaaggaggcctaagtaggaatctcaggaactaccagtggggctgaggagataataagatacctacaccccactgccctcacgggaaagcagatttacatccccagagatcataagagagggaggggccccatcagtgtctagaaaggaagcttcagagatctgagaccttctgaagaaagaaccacttacctgactctctgtctgaagaaatgaaaataaatctaaacctggcaggaaaagaaaaatcaaaattaacctcctatctgacccctttaccaccaaaagacaaagcactgtggactgtggccccttgcaggagaagcaggaggctttgagaaggaacaggggttctgatgtagctctggggagggtgtggcagtgcagggtccatcttatgacccatgtcataccttggatgtcggctcccagtgggaaggcaggtgggtactcatgtagtgggagactggacaggaaatccccacccaacgtgcccatagcagggctccttagcaccgaggatggctggtggccagatgtcaggactctgtgggtagagaggagctgaggcagccagcaaaccacagatgccctcacccagctcaggtccccaggttccctctctgtcccctccacatttctcttgccccaggctttgtccaatgatcagaaagcaatcctgacttcttcccctgtccgttttgctgtagactcagcctattttctcataccctttgcttccaggtagggccgggatggcagctgaggtgacagaacagtgcttcttggtagggggcagatcctcctcatctgatgagctttctattgtcaagtcaataacttcgaccttcttcttattctctgatggatctcccccctggactgggctgtactggaggcctgtgggtattaagaagactacgtctcagagaagaggccatccaagatttagcttagctggggaacagggggtcactcaccatccagcccataccctggcggggggcaaacctcagatgcctccttcttgggtttcattgggcaccaggatccatcttccatgaattggatctcatcacaatctgaacaggaactaagaatctccataaataaactgggggaagagagagatgaaaattcacggggctgggagatgagcagaacagtagccagagttctgtaactcaccttcctgtatctcagtttcctcatctgtaaaataagaacattatccatcctactggaccgctctgagttgttggaatcaaataacacaaggtatgtaaaagagctttgcaaagtaagtaataggttttaaaataaatacaatctgaggctgggtgcagtggctcacgcctttaatcccagcactttgggaggtacaggcaggtgaatcacttgaggctgggagttcaagaccagcctggccaacatggtgaaacctcatctctactaaaaatacaaaaattagccaggtgtggtggcacatgcctataatcccagctacttaggaggctgaggcacgagaatcgcttgaacccaggaggcagaggttgcagtgagcctagaccacaccactgttctccaccctgggaaacagagcaaggctctgcctcaaaaaaaaaaaaaaaaaaaaagccggcgtggtggctcacgcctataatcacactttcagagactgaggtgggtggatcacctgaggtcaggagttcgagaccagcctggccaacatggtgaaaccccatctctaccaaaaatacaaaattagccggatgtggcggcacatgcctgtaatcccagctactcaggaggctgaggcaggagaattgcttgaacccaggaggcagaggttgcatgagctgagatcacgagactgtgccataccactccagcctgggtgacagagtgaaacaccgtctcaaaaaaaaaaaaaaaaaaaatctgagcacttacgtgtagtataaggaacaaaaggagcagagacacagaagtccataaaccatctccaaaaggcactgggtctttggctttctaaacacttgtgtaaaaataaataaataaaggcactaggggccaggcatggtagctcatgcctgcaatcctagcactttgggaggccaaggtgggaggatcacttgaggccaggaggtcgaggctgcagtgagctatgattgtgctactatactccagtctgggcaacagaacgagaccctgtctcaaaaacaaacaaacaaacaaaaagtgggggagcactgggaacaggaaccataatgtagattccaaaaagaggttaagactagcaagatcaaaagattagaacatccaggccctgaaaagaaccttattgcaatgctcagtgggaagtcaggtagttgttataggtgatatattatgacagttcagtacactggctctgccacttaacaatataaccttgagcaaggctcaatctctctcggcctcagtttcctcatgtgtaatgatactacctatctcatagggtttttttttttctttttttttttctgggtgagtgtcactagccaatcataggattatttctttttttgagacagggtctcaatctgttgcccaggctggggtgca

SEQ ID NO: 1879777 - DNA, 4001 bp, Homo sapiens
tgtggagcagcaaagccaggcacagctccatggcccgagcccggtctcgctgcagccctaccgccagcccctcgaacacggagtggagggccagggagaacaccagtacacaggcacgcaaggctgagggggttgctggggctccactcgcctgtgggacccctggcccatcatgccaatgctgcggcccaccattcactgttcccagcagagcccttgtttcctccagaggtgacggccctgactgctccttgtaagccagtgtgatctgctccatcaccaggaccaggaagaagcccatggccaggatgaactcttgcagtgggaactggagctgtgggcagaagcagcagcaaaatgttcagggaaggaagagtgagatgcaaaatctggtgaaagcccagttacacagacctagggtctgacacagacacagggctactctcagtcacacaaagatagagtgaattggtaacactgacacagaatgatacgtacacacagattatggtgtcactcacagtgttacgtgtagaccaaagtttctcagctttggaactattaacattttggggccaggggcagtggctcatgcctataatcccagcactttggaagaccaaagtgggaagatcacttgaggtcaggagtttgagaccagcctggccaacatggtgaaaccctgtctctactaaaaatacaaaaattggcagggtgtggtggtggatgcctgtaatcccagctactcaggagtctgagccaggagaatcacttgaacccaggagccagagattgcagtgagtcgagattgtgccactgcactccagcctgggcaacagagcaagactctttctcaaaaacaaaacaaaacaaaaacaaacaaacaaaaacattttgggccagataattctttgtcatgggagctgtcttgtgcactgtagattgtttaacagcatttctgatctctacttaccagatgccaatagcaggcacaatgttccctccatccccctccccattgtgacaactaaaaatatccccagacattaccaaatgtttcctgaggggcaaagccacactcctagttgagagtcactgatgtagacatacatgaaaaggtcacacattgcccatctccccaaatactcatacatagagccacatatcacaggacattcaggcttatacgcagtcacacggaaacacaggtcactcagtcacagacacacaaagggatacatccagtgttacttcctcagttttagaggaaaaaaggaaagagcccaggatgactttcctgccccactatccaacggcctcagtttttcctataataaaccaagtcctatgccgtggacttgatcattcctcacagcccacttccttgggccaaagcctaaaaaggttagcaacaccaagacccagggaatcgcttcctatccttctcaggcctacagagacctctatctccagccctttaggaaagtggtgagagagtgaagatgattcttggagcacttgctggtagctagaactgagaacccatagagcaagtcacacacctgagaaaaagtgtcttactgtctcaacgggaatgtaggggtcacacagggaatggggaagggggagggaacacatagaaagaattatgccccataaccaaaaatcacaattcataccacatgccaaaagtcttccacacagtcatggagtggcacatgaatcaatctccacaaaccaacactcccagaggtgtgtgattcccctcccgcaagtcacatgcccaggccagtgctcaccgtcacgtgcaaggctgccagggcctcatctatggcagccaggtagtcaggcagcaggtccaggagacaagtggccaaaaagacgccccccgcgaaacagcttactaggctcagggctttctggcgggaagctgggtaggggtgaagcacagaggggaataagcaaacaaaccccctccagggccgaccaccccaacccaaacaatggctacccttgcctttccctcctcctttggtcactccccgccagccccagagccctccctaagccaagcattcatagcagtgtggggaaaaggagaggcttacctgagccttcatggttagctcctggccggcgcagcacacagatgggcaccaggctgcagaggagggtgagcaccagcagcagcaccagggcccccaacttcacctccagccccacaggcactggaggctctgaagctaccgcctcggggcgccacaccaggagctctggctctccccagggccccatgatgcttctggtagctccagtgactctcagacctaggaagacagaccagagtggttgggaaaaatcatgcaaaggaagatggggcaaggaatggggaagcttggtcagcagagtgcagctccctggccccagccactttgtgaccttcccctacccagggtgactcatctactcctgtaccaggaacattcctctcttctcacactttctttcccaagtgacttattcagggagactgcacgggggaaaccgaggcatgagaaaggctgtatggatatctcatcaccctttcacctggtgcccccagaaaactaggaaactaggagccgcctccaaataggacctggagctggagttcccctaaggaatgtagaggccgggtccccaactcccgaacggagtgggtgaagccaaaaaggctagggctgtgcagagatgtcttgggtagcttcgtgggccacctggacagggtaagtttgggtgctggatcgctccatcgttccccttttcccagcgcagagaacaagcgcttcaggccccaggatgggacctagaggcagatggccaaagagaggggccctaagagtctgcggtcccgggacggactgaggcgacactgagggcggtgcctgaaagtccgggctccaggaggcggggtgcgaggccgccaagcgtcgcgggaagcagatgaagaatgcgtgagctgggactcctgttcccgggcccggggaggcctgggcagccgacatggaccccgctgccagacagcccgcactcacctcgcgagggtctcactacatggtctccgcgcgcttccggcctagagtcgggaattcccgccccctcccatagctcccccctcccccacaggagccgcgtacccacgaccgactgccaatggcagcaccgagtgggcggggacagaccgggagtgacgtcagttaggagcaatcagagatcgggagcgggagcgggcggagcaggcgacctgaggagagtgagcgagagcaagagcggatattaggaaaaggacctcggggctggggccctggggcgcatctgtggaggactgaggggccggagcgggccagtcaacaaaggctttgattatatggatatttttaaaagagggagaccccgcattgtcaagtcttccggcccacatctgaaaacatcttcctggccttgggccaaagtctcatctgtccctcagaaggctctgacacctcgtcagtgcctcttggcgcccaagggaaagcattcccctcttgggaccaacttccttgactgctttccctcaccagcacccacaacaaggaaaaagacaaggcagaattggaaaggggggaaagcaaagagagggtatgtcttgaaaatcatcccttctcgactacttatggcactcagtgcagcctccgccttctccaggtgggtggggacgtggtgggaccggaatgcggggtgctgaagccgcgcccagggaagagcccccagcgcattccaggatatctgcgtaccgcgcctgcgggcgtctggccggttctcccacctgatttccagcccagctcccgccaccctcgccggtcggtttgctgtttgctgttccttgaatgccccaaggtagttgtttcagctcaggactttcaccgtttcctcaacctggattcttgtggcccacaactctgtgccttgagaatcctcttcta

SEQ ID NO: 1879778 - DNA, 4001 bp, Homo sapiens
tttgggaggccaaggcaggcggatcatgaggtcaagagattgagaccagactgggcaacatggtgaaaccctatctcttctaaaaatacaaaaattagctgggcgtggaggcatgtgcctgtagtcccagctactcgggagtctgaggcaggagaatcacttggacctgggaggcggaggttgcagtaagcggagatctcactactgtactccagcctggcgacagagtgagaattccatctcaaaaaaaaaaaaaatttagccaggcgtggtggctcatgcctgtaatcccgacactctgggaggccaagacaggtggatcgcgaggtcagccgttcaagaccaacctggccaacatagtgaaaccccatttctactaaaaatacaaaaattagctgggcgtggcggtgggcgcctgtaatcctagctacttgggaggctgaggcaggagaatcgcttgaacctggaaggcagaggttgcagtgagccaagatcacgccactgcactccagcccaggcaacagtgcaagactccatctcaaaaaataataatgaaataaattaattaaataaaataaaaaaataaataaatgaatttttttttgtagagaaggtgggtctcactatgttgcccaggctggcctcaaaattctgagctcaagcgatcctcctgccttggcctcccaaagtgttaggattacaggcctgagccgccatgcctttttaaaaaagaatctgtttttacttctaaaggttgggaatcaccaaccagttggaggagagaggcccctcctgcttcctagacttccaccacccattcatcatcagacaaaacaggaagtccctccctagagttactacaagcctcacaggtcagttagggcccatttggaagccacagcccaatggcctgtacccaggctgcactctacctctggtccatgtctccgccagggtctcacctcgtggactgtggggcggagacagacggctgctaccttcctcctcgctgccagtgtcagggtcactgctgtcttgcagccgctcttcggggctccccagttcctgcctctctcggtcctcaaagtttcgatggacagagcgagtagtgacaggtagatccaggcggtcagtgcctcggctgggctgtggacagtgggcaggaagaacagcaggtcagggactgagtagtgtgaagattggaggttctgcttggctgaaggcagcagctctcccccctggggctcacccatgagtccccttcaggagatccaccaccaactggcctctttcagcaccacgacccgagttaatttcctccacccctgcacccatctacatttcttttcagttctccaaccagtatctcaatatccttcaagtcagttgactgattgcatttgggctcaaatccccaatggcccaatttctttcgggctccatggacccttatgtccaccccaggtccattcaccactgcaggccaccttacctgtggggggttgaaactcaagtacagggcatcgcctgcggggaggctgcgccgccgaggatccacaggtctgcgggcccagggggcctcagctgggagtggctcggtctggcccagggcggccagctgccttcgagcctcttcggcctcacgctccagcagtgcccgggcctgctcactctcccggagccgggcctccaggctgccagcttcggttgcccgttcttcacctagccgccggcagcgccgtagctcctcctgcagcagcgcatgttgccgctgcagtaatgccagttccgtggcctgcttttcaggggccacaggggcagccccagccctgccagcctccccatcccgagagttggctcggcacagcttctcccgccgctcagggccctcagggaaccgggcttccatcagagtgtcctgctgggccacagctgcctgggagtagaatgcaggcagaagggtttatcagaacccctgtgctcttctacccctcgccttcaccctccaaggcccagatcatcgctcctggagagcttggattgggagggtatttagaaaggcctgttgggatgaccatgccccacctaaacaggcatctctagcctggctcctccccttccccattcaagcccttgtcctactgacctgtaggccatgtagaagtccatagagattgaccaatcgctgtaacgcctcctgaggacagacagggtgggaacagggccccagctttaggatgggagaactgcccaaaagttgaacaagggtgggtgtggggacagtaggatccggagacatacttgaatgtagacgctttccccaccccactccaaactgggctctaactactcagactaagaacatcctcccttcagtctcctataccatcaattcccatctcacctcttgcggtgatctcagctgatttccatttcgatcctgcagaaatgggcaagaatggggagtcagcaggcacacaaatcctgggtgcctgcccctgacagctttgtgttgaggatccagaggctggctgtccctctcccaccctcttgccaagtcccagaacctcttgaggacctaccctctggctagagtctgagtcagctctgcagagttcaatggagccattgaaggttctggcctcaccatctgttgagaaggagaaaaggatggctgagctcacttccctggggccctgataccacttgatccctggtaccactctactaactttggcccctcccacctactaccttggtcccctgccctggtactcactggcagtgaccccaggactcgtgttaccaccgctgtctggttccaagggcagggctggctctcggggtgtcaagagcagttccactcctggccccaccagcaggtctttcagaccctccactgtggggaaagaggaagaggtgagaacaggaatgacacaggaccctgaggggaatgccattcacccccacatgtgggacacttgggcatctgggggaatgccccctgcactggcagtggggtttcactcacacaaccactgatgaggtaaagggcagtaaatgcctacgaggcagcagagtccatgcagcatggacgatatggagcagcagcaaggaccacacctcctcccctgcctttcccaggaactggcccagaagaggcactcagggccgtttatggtttatagggttggcatcccacttgtctgtgtttgtccatgtctagtcacatgtccacattctgtgacggtgagtgcttgagcctggactcttccctgggagctccctcaccctcacggatggcatcctgcagcagccgctcgccacgaggggactcaagggactcagagcggaaaaggcccctgggcagggtgggcagggccatcccactgccaccatcctcttcggcctggaaatgggtcatctcagcaaacagcccgaccttctctcgcagcagctccaccagtgcccggtccttctgctgcaactccactgcagataaggaacaagtgaggacatgagaggacgtaggggtatgcaagagcgccagtagaggacagccctaggggagaggggtagggtggggcagtgtggcagacttaattttgttattttggcatttataaaaaagaaaaagctttctgttggtcaggtgtagtggctcacacctgtaatcccagcactttgggaggccaaggcaggtggatcgcttgaggccaggagttcaagaccagcctggctaacatggcaaaaccctgtctctacttaaaatacaaaaattagccaggtgtggtggcacgcgcctgtagtcccagctactcaggaggctgaggcacaagaatcgcttgaacccaggaggcagaggttgcagtgaggccgagatcacaccactgcactccagcctgggcgacacagcaagactctgtctcaaaaaaaaaaaaaaaagatttgtggaaggggttgcaggttgtccaacagtgttcattctttccatcttcctt

SEQ ID NO: 1879779 - DNA, 4001 bp, Homo sapiens
agctgggtgtggtggcacatgcctgtaatcccagctgctggggaggctgaagcaggagaattgcttgaacccaggaggcagaggttgtggtgagccgagatcgcgccactgcactccagcctgggcgacagacagcaagactccgtctcagaaaagaaaaaaaaaaaaaaaaaagaaaaatagttccaatagtgtgacacggacataagccagtctgcaattggctggtaaactaaataggaaatgaccaaagggaaactcttgactgaaagaaagatagctaatgatccattcataggacagttcttaatcgggatccacagataggcttcaaggaatccagtgtttgacaatgaatataaaattttgtaaacatatatgagtgtccatttctctggcccacatatccacagcttttgtcatcctacagagatatctgttacatctctcaagaaaactattaaaccactacccatgtggtccaagagatatgaacattaaaaataaaagttttcttcacagttcttctgattataaaagtaatataaacttgttgaaacaaacaaacaaacaaaatattttatatatataacagagaatgaaagttctttgtactctaatctcccccagagagaatcaatgttggtaagtatgcctgataggtactgctgtctacctaaaacactctggaaagtaatgggcttattttacccaaagtactttcacattcataccaaactcctctcacagcttgcagctgcaaacatttccataaaatcacaacacaaagtggataattctccaatgaaatcaagtttcactaaggtcagaagctaaacaggcagtgaccacaggtacaaactcagaaaaacccttaaaataacattcatgccttaagcagcttagggctctctcttctcagacatttaaaatggtgttagagctttctgaaaaagctatacttagtttgcctcttaagatgatacttctaattattttagagccaaagatctgcttcacctagattgaagcagaaaaagatgggacggtgtttatggtcataacattaaccatttaattaaaacaggcagttcttgaatgctttctaatgacatataacacacggcatctcaaaagatactcctctgcctcaaaagataagacagggcaggcacatggaaaataaattttgtgttggtagttataggattcagttgagatgtttaagtttgagcctaagatattccttaaaacaacaatggtccttctagtctgcgtaggaatataaataaatgacttttgatccattagtaacactagccttaaaaaagataggtaaaactgggaaaaaataagcagtgtttctaggtcacattatcccagatttggtttctaatataatcaaccaacaaaatgatgtggactctaatcctgcttctatcattcatcaattgtgcaaccctgtgcaaaacatttttctctccaaacctcaggttcttcaccattgagagaaagggagttgcctagatgattccagaactggagcgaatttaaagaggaagaggagcagaaaggaacaggacatcttctggactcacaaaagccatgtctctagcatggtttctttccctgtccttccaacattcaccctgaaggatatcattagcagggatttccaagcaacataatacactggaaaactgtgatttgttatatctaacctgagcaactttcccttaattatcacgctagggtagcatactcacccccagatggctctcactgcagaaattcgaactgatgggggctgtgtctcgtgaagaccactaactgttgcctgtaggaactgctggatcagttcaggggacatagcaacagtgaaccgactggcagcccaaagtgcccggcccaagaggaaaggagacactgggagaaagacagaacaattaggggctggaaaatgaaaattccttttacttgttctttctctttcccacattcattcctcaattttttttttttgagatggagtctcactctgtcacccaggatggagtgcgatggcgtgatctcggctcactgcaacctccgtcccccgggttcaagcaactgtcctgcctcagcctcctgagtagttgggatcacaggcgcctgccaccatgcccggctaattttttgtatttttagtagagatggcgttttgccatgttggccaggctggtctcaaactctggacctcaagtgatctgtctgcctcggcctcccaaagtgctgggattacaggcatgagccaccgcatccggccctccattcctcaattttttagaagtaaatagatgctacataatatgtacaactcatttgagagaaaaagcataaccttgtatgatgaaagcaaatgtgtgacctgtggtacaaaatcaatttcccagttttcccttgtctcttctgagcaaagtagatcttgaatattattagactaaaaagactttaccaccccagtcctcacccccagctctcattattccttacctgtactactagttaatctttttttttttttttttgagatgaagtttcattcttgttgcccaggctggagtgcaacagtgcgatctcggctcaccacaacctccacctccctggttcaagtgattctcctgcctcagcctccccagtagctgggattacaggcatgcaccaccacgcccagctaattttgtatttttagtagagatgggctttctccatgttggtcaggctggtctcaaactcctgaccttaggtgatctgcctgccttggcctccaaaagtgctgggattacaggtgtgagccatggtacccgcccacttaatcttctaagttgccatctccattgctagtttattcccacttttggaccactctttttttttgagatggagtcttgctctgttgcccaggctggagtgtagtggcacaatctcagctcactgtaaccgctgcttcccgggttcgagcgattctcctgcctcagcctcccgagcagctgggattacaggtgcgtaccaccacgcctggctaatttttgtatttttagtagagagggggtttcaccatgttggccaggctggtcttgaactcctgaactcaagcaatccactcggcttggcctcccaaagtgctgagattacaggcatgagccaccgcgtgcagccttggaccactcttaaaacataaattatagctctgatcatgtcattcttctatttaaaatctgtcaattaattccatagtccaccaaataaagattaccttagtcatcacgttattcaaggctccctaagatcagtgactctagcattacctatgatttccctttatggtttccaaactcaagtacacatccctccttagcaacttacatcttactctcccagctctctgccttgttcatattgcaagccaacatattcacctccttgcattacctaattcatctcttaggctgaagcaattctaactatctctatgccacagtaattctgtctttagtgttcttacatgttatatatttcgtttgatagtctagccactaatgtaaggattactacccttgtttactataagctgctgaggagagactattcttattcagcttgtcacagggcttaacttgtttactcacacaataaacatcttgttgacggaaaacactgaacagaacctaataaactgtgccagtcaaattacgcaatacagatgctcctctgcttatgatggggttacttcctgataaacacatcgtaagttgaaaatactgtaagttaaaaatgcatttaaatttaatactgaacatcacagcttagccgggcctaccttaaacatgctcagaacacttacattagcgtaaagttgggcaaactcacgtaacacaaagcctattttataataaagtgttgaatatctcatataatttattgaatactatactgtaagtgaaaacagaatggttgtaagg

SEQ ID NO: 1879780 - DNA, 4001 bp, Homo sapiens
atataagccagcgacatcacaagttcctaaaatccagagccttgaggaagccatcaaagggctcagaatatccccgaacaggcaggcagccctgactttatgcagagcaatgcttcgtctccggtccagcccctccctgctccggaatctgatgacattcagttcatcctgagagcccggggcctttccccaacagggcaactttcacatagtgacagagggtctggctgctgtcccgatcatgcccaagtcacagggcagcagggacctatcctccaagcctttgttcctcttgctccgcctctggcccctttccctcttgtgtttcccacatgacactgtcaccctctttcccgcctctgcgttggctctggccagcttttttccctggggtctcaccagctgaattgcagaaagcactgcaagcctgcaggcctcctcttgtccctagggcaatgccttcaaagccacactagtaaagaggctgagtggtagggtcctcaggtcatttgcccctccctctgtgcctcagatgagtcctagatgagccctgcccacatgattacttcacatatggccgagtgggtcccagtgtgctttcgggaacagcgaggcaggggtcacccacctggttatgcaggaactccttcactttccagaaatcttcctggtggtcgttcttaaggacgatttggccccatcgcagccggagctctgcattccgggcatttgagatacttgggtatgtgtctccaagttttttcacattccctggagaagagaaagaaatggtttgtggctggtcacggtgggtcacacctgtaatactagaattttgggaggctgaggtgggcggatcacttgaggtcaggaatgtgagaccagcctggccaatatggcgaaaccccatctctactaaaaataccaaacaaaactggccgggtgtggtggcgcacgcctgtaatcccagctacttggaggctgaggtgctagaatcaagaatcacttgaactcagaaggtggaggttgctgtgagccaatagcaccacggcactccagcctggtcgacagagcaagattaaagcagacatattcccccaatatctgtcccattttttctcctaccactcatctgctaaaagtcatcttggctctaacttttttttaaccccttggtgaatattatgttgactgagcagccacaaagcattagaggttgagagctctggatgactgggttctgtgcgaactgtttgtacctcaagttcattctgtcacctgggtattaacatcacaccgcctacttcccagaggagttgtgggaattaaatgacttaatagacacaaaagccttacaagagtcgcctgcaggagcttcggacttgagcaatgccaggctttgtgactttgtccttgaggtgcttgtaagtagaacccataacctcccgatggcacattccttgtggagtgccagcctccctagtgtacgtggcagtcccctaacccataacctcccggtggcacattccttgtggagtgccagcctccctagtgtacgtggcagttccctaggggcaagcatcactactttttgtgagcctccctctagcccctgacataaagctgtgcacacaaggagccctggttcaccattttttcttaccaggagggagaggggatttctggaggatcttatccaggaagtagaccagctggtaggtcttccagggagagatggccacggcttcaatggccttcatgtccagctcctcggctgcccacagttgggctagctcttcagcaggcttcatgagtgagtccccaggggagagatcagggaggtacgggggccagccgggggtattcagccatcgatcaaactcaaaacctgtttgggaggagagaagacactatcagaattctctggccaggttacggtcaactggtttaagcaactcccagagacctcaagtttctcctctctccatcccaaactctttccccagcatttaacattactttcccatgtaactattcgctccagcagggtcctagttataacgacatctagagactgtgccgtttcgaccgtgaaagtgcttttcgctccaaattagcactgtgttgtcagagccaagttggtggatgctctattcacgtgcacattctcctaccgatcacaaccacactgtacttaagcacccaggctctaggaccaggctgcctgggttcctacccctgctctgtcattaaccagctgggaggccacgggcatgttacttcacctctctgcacctcagttttatctataaagtgggggtgataggccctgcctccgtgatggttatgaggattacatgagcaaataaacattaaaagcttagcgtatcgcctgatgcatagtaagtactctggaattattaactaccattagctccggagtccccgcattaaaatgcaagcctccaaccgaacagtaggtgctgctaaagtcctgaccaatcctactgtcagaggacgcggacttcatcaaaccaacaatagagtgactcaaggttcaggtcacagcaagaagtgggggtatgtctaatggattgtgtcttccatgacaggacatttttcgttttttctttggaagtggtacctcccaggcagaaactggcggctgggcacagcggctcacgcctgtaatcccagcactttgggaggccgaggcaggtggatcacctgaggtcaggagttcgagaccagcctgaccaacatggagaaaccccgtctctactaaaaatacaaaatagccgggcgtggtggcgcgtgcctgtaatcccagctactcgggaggctgaggcaggagaatcgcttgaacccggcaggcggaggttgcggtgagccgagatcgtgccattgcactccagcctgggcaacaagagcgaaactccatctcaaaaaaaaaaaaaaagaaaagaaaagaaagaaagaaataaggagggccactggggttgccttcactcagaaggctgtaggaggggtgctgcctccgctcctgccctgtgagttttagcttggggcagtggtgcggcagcagtggcagctctccaggcaagttaagggtctgactgtgtgtccaggtgagaggagagagtaaggaaacagactgggagaaaatgaggcagagaggagtgaaaagaagtcattcttgtggaataaatcccaggattctgggtttgcttcccaaaacgcccctacctagctgactctgacccagtgttttcccatccaccaccatctttccgagtgtcaatgagatctcattctctactattttttagaagcctgtgggccagttcctctgcttacctggaatgatatccactctctttttcttaagctcagggaaatattccaagtagaagtccagaaagtcatcggctaagatgcttcggaatttgaattcatgcacataggcctgtgaggagggaaagctctttagaccctctctggccccgtggggagtggtgtccctctgtgtcctgggtcctcctccaaccccttacatctttcgccccctgcctctacccttgatcaggcccagtggctttatccgctcctcttccttctcccctcatgtgactataccttgagaaaactgtcaaactgatcctgatcacccaccaagtgggccaggtatgaaacaaagcagaaacctttctcgtagggggtctcattataggtgtcgtccgggtcaacgcctggcagaggagaaagcagacaagatttgagcttttgtagcctgtcacccgtaacgttcttctctagctccacagtcaaagactagcgatggaagagatcagaattcagcttccccagggacagcaaggccaagaaggtgtccagatcctggcctctctccagatcttggactctctcaaggccaagactctctctcttaagatctctatctcaaggccaagatctctctccagatattggcctctctcaag

SEQ ID NO: 1879781 - DNA, 4001 bp, Homo sapiens
ctcccagctgggctgactccagtcccagccccagtctccaccaactgagcagcgtacgcagggttgtgtctggcttccagcatctaccaccccttcagagcaacttccaacatgggacaggagaggaagctcgcattgcttggtctgaacagatttaaggaggttttatcacaaggacctgaaaacttcctaagcatgctttctccttgcacagctgaggaggggcaatggtgggagcggggcaggggggtggcaggggcggcaggggctctcaactaagggctctgaatcacagaggggacagatgctgccttagtccttcttgcctcccagggccaggcttcttgtgaggagcttccctgggctggagggggtcagtgtggagactgtgggggattccagcttcactctgtctaagagggtcttcttaagggcagctggggagatcttttcttggtcggccatggactgtagctctctgcagacaaaaccccagaaggattaaaggaaggcaataaaccctggggccagagctttgagtctccactatccacacaaccctcaagcttgttgatgtgacaccaccaaaaattagagccccaagacaaacgcttcccaactagtacttcccaactagtacttctaagaagtattagttacctaagttagggtttgcttatttatctcatttgatcagagccccaagtggtatctgtgatcacacgggaagagtgacaggctttggagtcatagattcaaattagaatcctgtctccatcactttttaactgtttgaccttgggaaaattatctctgagcctcaacttcccatctacaagtcaaagttaatcctggttatctgaaatgcagtgagaattaagtgaagtaaggcttgcaaactcttaggtaaacaaaatctactaagttgtggttattaacagagcacagactccaacactgctaaatgggacccaagacagcaggttccgcaaatggtgctcaacccagcccagggaccaaccaggactgaagggtctgggacagaagtccgcgggatggactcaccgtgttcggatacaggaggcctcaactgcattgatgagcagagagcggaagcccccactctctagaaagtgcagggcgtggatggtggctcccccaggggagcagacattgtccttaagctggcatggatgctgctccgagtccagcagcatcttggcagctccctatggggaagggcacattaggagaaagttgctggtgtgcgttggaacaggcttcccatacccactgctcctgcccaactgctaccccagcttcccaaccaactcccacctcagttcagtgatgcacaagaacccccattctacaccctggtcctgaacatgcgggggaaagatactgaccagcaaagcctgggccccgagttggattgccaggcgccgtggcaaacccatcttcaccccaccatcagccaatgcgtccagagccatgaatgcctgtggagacactcactaagccccaggccataggcactgaagggcctttccttaggtctgctttctgatgactagaactagctccaagggtcagcatcctgtaccagccagctgtgcccaagaggtgggcgccacccccagtccaagcctgcctgccagcccatcttgctgcctgggttcctagaaggctgagcgagcaaatgagggcctcacataggcaggcccgctgccactgagccccgtgacggcatcgatgaggtcctcttccacctcagtgcagaagcccacgctgctcatgagctgctccaggagctgcccatcctccaccagggcatgggtgcccgtggcgtacactgtagcgccttcctgcactaccacaggtgtgttggtcatgcagcgaatcactttgggggctggctggaatgccatcagcttctagggtgagggagagagccgaatgagtggccagggcacggctcccaccagcacccacccattagctgccattcgtgggtcaaccctcccctcacacaaggggcatcagggctgagatgggcaccttctccacagagctgatggtgacaccagccgcacaggagaccacgatgtgtctggcttgcacgtcggccccaatctcatccaggatgaaggggatgatatgtggcttcacagccagaaacaggacgtcgctgtgcttcaccgtctccttgttgctgcgtgtcaggttcacacccatcttctgcaagaggagactcccagctcacagtgctggagcagcctggctatgccaaggcctcccagggagcagctgaacccctgccaaaccgattctgccagatgcagcctggaattcttagctttatgccctcagggttctacccctaccccaaataatacagtttcccattgttgctactggacaagtaagcacaggcttggagcatgacaagcttctccatggtaaccaggaagtggctgcccttcttccctgccaatcttctggtatctaaggcactcctctgccaggtaagaaggccctatggtgaaagtggcagggcaaagggaaatgctaatacctggtcgttaaaagcacagctgagtcaggccctatcctaaccctggccgcttgttcgtggggaccgcacagtctccatgtggtccagggctaggctggaagccatccatccctctatgactccaaactgagaagcaggaccctccagtgctagggacatcagcccaccctaggcacagacactgcctgtcacctgcctcatcagccatcctctcccacagagcacaggttttgggtgaagacttggaatatgtttttggagaacagaacaactaactcaccagattcttcccaatatgctcattcacgactcagaataacagcaaagtggccactgttgtaaatgaggaaatagcctcaaagtggctgagtactttaaggtcatacaactcgtctattaagaaaaatggctgagcgcagtggctcacccctgtaatcccagcactttgggaggccaaggcgggcagatcacttgaggccaggagttcgagaccagcctggccaacagtattctctaccaaaaatacaaaaattagctgcgcgtggtggatgcctgtaattccagctactcgggaggctgaggtgggaggctgaggtgggaggcggaggttacagtgagctgagatcgcgccactgcactccagcttgggcgacagagtaagaccctgtctgaaaaaaaatttaaaaaatgagtatttattaggtacctactatgtgccaggtgctttcatcacataatcacctcagttaatcctctaccactccagtgtctggatctgacccccagttatgtctccctgggtgttcccaccacattgagctgcccaagagaaggtggaaagattgtcacgttcctggagtaaaggtcaccgccggccaaagaccagcacttgggcgcaggggccggccagactcacttcatctcaggtcatccttttcctgggcctccacccgcttcccactccgcccggctccacctaccctgagcgcggacaccgtgggcaggttcatttctggggagctggctattatcttgtgagccgacaggatgcctgcagaagacagagcttttcaactaggggtcgcggcccagcccgttaccacgctttccctggctctaaaacccagagccgtcctaacagtgccagtctccctctccccctcaaccctctacgaggacagaagacgcacttgctgctcaaccagagtctcatctaccccaccggacgcaaactcccctttcattcgctcatgctggtgggacggaggccccctcgggcctcgggaccgcccgcgaagccgcctcccgcctccacgcgcttgcctgcggccgtgaagccccgcgccagagcataggccagctggccggccccgatgaagcccacgctcatggtccgcggttcacgcctcctgggagccgcacg

SEQ ID NO: 1879782 - DNA, 4001 bp, Homo sapiens
ctggcccagcacgcaggggccggggtcaaagcgctctgggctgtccggcagggcctgccgtaggtccccccgctgcacgctccgcctgtcttcagacaggatcagctcagggttggcggtgtccgggtccaaggtcacgtcccctgcagagagaggcccaaggtcacccaggcacagccacaggcaagctggggccatctgcccatgtcctgggcatgtaggtacaatcctcccagtcggacggcctggctctctgccctgggcctgtagcctcacaacctcctggagtaactaactgtctccaagtggacatcctctccccacttagctacgtccagttgcaacttacaatgtcctacaaattggtccatgttttgccttcagatatcaagagggaatcttggttgcttttttttttttttttaaagaggcagggtcttgctctgtggccccaggctgcagtgcagtggtgcgatcatggctcactgcagccttgatctcctgggctcaaatgatcctcccgcctcagatcctcccaagctgctgggattacaggcgtgtgccaccatggctggctcatttttttgttttttatttgtagagatgggagtcttgctatgtttcccgggttggtcttgaactgatggcctcaagcaatcctcccgcctgagcctctcaaagtgctgggattacagaggtgagccaatgcatccagtctgtttttcctttcaatctccaaatgaaggatgtgaattagggcagctgtcccaaccctgaccactccgatttcagatctatccacctctggaggcctgcacacagttcctacacaacaggctcctgacctgctagcaagagctgaggatagtacttcctttgggtgactgtgatacaagactcagatttgggttttgtgcccagttcctggcgcagagctcacagaaccctgggaatttcctgactgatagaagcatcttgtgctatcataagatgcccctttccatcacacctgagttgatgccactgcagtggctgaggtggggacctgagagcccagcataaggccagccaccagaaagaccaatcctgtcagtagagggcgggaacactcagccccagcctctgacctcaggaaggggaaaggggtctgaggttgagccccatcaccaatgaccaatgatttaatcaatcataaccatgtaatggaacctccacaaagacacctaaacagctcttggggctcagggagtttccaggttggtgagcacactgaggtgctgggaaggtgcacccagggagggtgggaaagctctgagcccttccccaggctttgcccatgtgtctcttccatttggctcttcctgagtggtatccttcacaataaaccaatgacagtaagtaaagtgctcttctgagttccatgggctgtgctagcgaatgctcacatctgcagaggcgctgagggaacagaagtatgggcagcccctggaagttgtgactggcatctgaagtgggggcagtcttatgggactgagcccttaatctgtggggtctgtactaactcctgtagtgtcagcactggcaattctgttcaatgctgaatggaatccttggatacccaattcgtttccagaagttgaagaattgtttggtgtgaaaatacccacacaactgatgtcagaagtatgagcagaggacgttttcccaacaacccaccaccatgacactgtgagtttggagctggcagtggcagggcacagaacacgtggctggctgcccaggtccttggcaggtcccctcctggagtcatctccccacctggggcctccacacctacctcgaaacctccgcagtgtctctaccagtcccgggaccctgcacacggtcctcagctccataggcacaacttctgggggctgcagcttcacatcctggaccctagaggggacaacccaggtgttgtcgccatggccaacagctgggtcccaccccactccctcctgccccccctccaggagaggctgggttcgtacctgcgcagggcgtccttgatgtcctatgtggggaggagaaacagcacactcggtgtcagtgaccatcgcttgctcctggagtcccctccccgcccctggagcctcgccccgtccccctctcctacatttgagcgtcaggcagcaaaaacacacacagggggccataaaccacccgcagcaaggctcagacacaggaatgctggacagaggctctgacatgtgtgccaggaggcatcaccaatggggtgcagcccagccctgcggaccaaggcccacttctgcctgacacttggatgtagggcatctggctgttggctcactcacccagagccccaagtgggcgcctctgggtgccaaggacaggacaggcacacatcccagccttcagcataggggcacctccaccccagctggagcccaaccctgtggttgcactgcttcctctcccagctccacctgccctgcaggctccctgctcagccccactcttgggcgtgcgtccttcctgtgtcactgcctgatacgtgatagcatctgactccatgttagggcccgaattgtgtccatcccgccaaatccgtatgttgaagccagaaacttcaggacttcagaacttgactattagaaaaaagggcttttaaagaggaaatcatagtaaaatgaggccattagggtgggctgcaatccaaaataacttgagtctcataagaaggggcgactaggacacagacacccacagaggggagaccctgtgaggatacagggaagaaaaggcatctacaggcccaagagataggcctcagggggaaccagctttgacctcagtcttccagtgtgcaggactgggagacaatcagtctctgctggggaagcctcctggcaggtggtactaaatgtggcagcccgagctggcgtgatacacccaggtattggaacatcagctcttaggagacacggtcttgtatctcttagagcagtcttcagtgcactgcaaggatttaacccacactgtcaaatagacgatcccacaccatgttcattctaacacacgtggtgccagctaccaggccaggatgcagaggtcagtaagacataatcccagacaagggtttccctacatgtaggagaaatggcaaaggaagatttccacacatacgggtagttaattctgtctagggggacaacaacacactctaggccccaaaaattttttaaaaaggaggccagcactttgggaggccaaggcaggcagatcacttgagtccaggagttcaagaccagcctgggcaacacagcaaggtcccatctctaaaaaaaaattttaaaattagctgagcttggtggtgtgtgcctacagtcccacctactcaggggactgagatggaaggatcgcttcagcccaggacatcgaggctgcagtcataatcacatcactgtactctagcctgggcgacagagtgagaccctgtctcaataaataattcataaataaataaataaagaggagactcttggtagggttctgaagcccaagaagaatttgttggtagacacagggggagtgcgcagggtgagggaggggtgtgcacagggcaggggcagatggtgctggtgtgagcaaggcagctgggagcagctccaccttggttattctacctggggtgggcggcccacccctggtgtcatttggaaacaggtggtggctgtcacaaggccgggtgcaggggcggcaggagaagggcttgggggtagaggagaaccttggcctcgacaagggggtttggtctctgcacagaacacgggccctccaggggcagcattgacttgaacaaaaccactctgcggctacaagcagggcctgctgaagggggcagccaggaccccagagtccatagcagccagggccccagagtccacagcagccagagccccagtgggtggattcctgggagtcactcaagcctttac

SEQ ID NO: 1879783 - DNA, 4001 bp, Homo sapiens
gatgaagggcaggctgccagtggctgcatggtacaaggtcactccaatgctccagagatccacagtcaccccgaacgctttttgctggggctttcgaagcaccgcccgctcatacatgtcgggatgctgccggagagaaccagaatgaggccatggagccggagggctggcaagggcctgagacctgtcagaccccctttcaccgcctgcaggtgaaaacagaactgttcaaatccttctttgtcatcttaaaaatgggtgtcagcctcaccttttccatcttagagaacagaatgcattcttctggttggggtacaggggagagacataactcctgtggaagcaggaggtgggccacaccccctcatgggggctctggggggctcacaaggcaaggggagccctcagcatagggcagcgggtctcgagcagctcacccaccaggtactcctcagtcccatagaccgagacgaacttctcatcatcatccagctcccgggcagcgccgaagtctgtcagcttgtagatgctctgcccctcctcccctacgaggcgcatgatgttccccggcttgatgtcgcgatgcacaatgccgttctcccgcaggtggttcatgccggccactggggacagacggggaggccactagctggctctggtcggggacagtctagtgtctgaggctcatcttggtgggaaggctgtccttgcatccagagagacaggagttcccatgggctgacagagccatgggacaggcagaaggacagagacatgcatggggcttagggggcatctcaaggacactagggtatggaggtaccatctggattctctaggaaaccaagatgggtggtggctctgtgtcctcaagggcagcacccctctttgtattacttcttttgattaggtgttcaattgtggtaaaatatgcataacgaaatttcccattttaaccaattttaagtgtacacttcattggcactaagcacacccacgctgctgtgccaccatcacaccatccatcttagaacttttctcattctccaattttttttttttttttggagacagagtctcactctgacacataggctggagtacagtggtgcaatctcagctcactgcaatctctgcctcccaggttcaatcgattctcatgcctcagcctcccaagtggctggaactacaggcatgcaccaccacacccagctaatttttgtatttttttagtagagacagggtttcaccgtgttcgccagactggtctcaaacccccaacctcaaatgatccgcccacttgggcctcccaaagtgctgggattacaggcatgagccactgcacccggcctcattcttcaaacttgaaaccatacttattaaacaactcctcattctcctctgcccccagccactggaaaccaccatggtactttctgtttctatgaatgtatgagtggaatcatacaggatttgtccttctgtgtctggcttttttcacttaacataatgtcatcaaggtccatccatgttgtagcaggtgtcagaatttctttccttttaagactgaataatattctattttaggtacctcccacattttgttttcacagttaggatgtttccaccttttggctattgtaaataatgctgctgtgaacattggtgtacaatcttttttaggtttaatttttaagttggaattttaaatggaatgattagcaggagtcagacacctgagtcctgtcagcatctgtcccaggcctgccgctggtctgagggtggaggcagggacagggaggggctcacccacacagcgcagcaccaccaggaactcatcctcaggcagcccaaaggcattctcagggctctccagcacactcagcaggctcccactggagcagtactccatcaccagtaccttctgccggcttccgccctatgggtgggacagagaggggctcatgaggacggcacttctcctccccacccaccaggaagaagtggctcagcctggagcccagagcccccattctccaggtcccagcttctggcctggccttccctccttggcctcacactgatcccgcacactggaatccaaagtcagttattccaggaagccctctgcttaggtactgattctgtccatcgttcctttccagtgcaccgcccccacccccttgccccctttgctcccttctgcaatttgcctgctgtctctgacctgctgatgagcatgggaccaaatctctgttatcatgtggcctgattctccccagaccataagggtcaaggacaagaccattctctgaccaagcaccggacctaccgtctcctccaccgcaaagagcttgacaatgttctggtggttcagcttccgcaggacctcaaactccctcacctgcacctcgcggggccgcaggtagctggtagtgttgaagaccttcacagcaaccagctctccggatttctgccattggggagggagcagtgggagacagcatgggattagcacatgtcccactcccacaggggagcagccaccctctcctgggcctccattcagcctctccggccagcccaaccccagagattagcctggttggatgggggctcccatccgcaccgcctttccctctcaaggggtagagagtccagcactgggaggtgacaagatcctgacactctgatcttctgcaggggatggcttgttgtcattattacaattgctattgacaatcatcacagggcagctaacactccctggggttagcagcagggaagggattggaacctggtctgtatggctccaattcttttttttttttttttttttttttgagacggagcctcgctctgtcacccaggctggagtgcagtgtcaagatctcagctcactgcaacctctgcctcccaggttcaagcgattctctgcctcagcctcctgagtagctgggattacaggtgcacgccaccatgcccagctaatttttgtatttttagtagagacagggtttcaccatcttgaccaggatggtctcgatctcctgacctcgtgatctgcccacctcggcctcccaaagtgctgggattacaggcataagccaccgtgcccggccggctaccactcttgaataagacagagtggatatcatctcatacattctcgcaggataaatccaaacaaggcctaattccccactctgctattcctagattccatttgctgttaccttcctcggatgtttgccttgttacttcacagttctcttgctccaactcgtgcccgacagaggcatcctctcaaggagccgttttcagctccctatgcctctgctcaaacccacagtatgagtgtgctacacaacatccagaggtccctgtcccaccaccctcaatgcccactgggggctgactgggccagcttctgaggcatgagggggccaaggctgggctggacagggcctggccagggttgcttcctaccttgttgcgggccttgtacacactggcagtggccccctgccccagcaggtcatctgtgtgccacaggtaattggctgtgctctgcatctcctgccctgagctggctggtcaccttctgcctagagaaagagcatgctgggggcccaggattccattcctggcacagggtggccgctggtggcctgacctgtaactgtgccccaaggctaccctaagaagggctccatgtggccattccacaagcaagggagcgggggaagtgtgaagcacagaaaggttaagtaacttccccaaaaggacgcacagcacaacaagagggcccccactgagccctcagcccacagccggcacctgttccacctgctgcctgtcctggctccccacgttcccttgaagcccctcctgaggcaggtcattctgcagagacaaacctcttgtctctaccacctctccccagcactgaagattctggggttttggcatccaggcttgagattgtcccaggaaacaga

SEQ ID NO: 1879784 - DNA, 4001 bp, Homo sapiens
agacgcttccctgtcctccccattcacactggctcctggatccccctggcacttgccttttccagaaggagcccacccagggcccaagtacacagcaggagcatgggattggggtcagcagagaagcagggcggagcagcagcggggtggggtggagctgggggtggagcagcagcggggtggggtggaactgggggcggagcagcagtggagtggggcggagctgggggcggagccggggaagggcaggtaggggcggcgttctcaccttcactctgctgactcccggtgctgccgctgccatagctaaagcccgggtcctggtaggcaggcgggaagcagggtgggggtcccgggtactggtaggggtagccctgacccagaggccagggggcagccgggtggggcagcggggccagcgtgtcctgatccgaagtcccactggagccactgttgaggttcagggtggcgagatctggcgggggagggtaggtgagggccgcggaggggcctccggcgttcccctcccccccgccctgaagcccgaagcccccactcactgctgcagagatccccgaagacgtagtagcactgctcggagaaggtgatcttgttgaccgtgtgccgcaggaagccgtgcttcagcaagctgctggcgtacttccgggcctcccgccgctccttgaagccctccacgtgtgtgtacagccagtccaccacgtccgcccctggccggcaccagcggtcagcccgcagcctcgaggcaagcagccctgcccctggcactatccgcccgcggggacggccactcaccgatgacggcattggcgatggtgatcttgagccacatgcggtcgcggatctccagtcccgagtctggcagctgcatgacccggacgacggcgctcatgtcactcttcaccgtcagcggcgcctcttccagctctgcaaagcacagacagccccgcttcagccccagcatctgaaggcgggggactcagggccctgcacccccaggggagcctctgggcagagcctgcgccagggcgcaagctggacggtgcgtgacagcagggccccggcccactgcaggatgcacccccgtgaggctggggcgtgagcaggggggttggacatttagtctcccacttctacagacacttttcatcaggatcctaggcacaaactgggctgacaccccaccctgcagaccaggaagtaatgagaacagggcaggccccttcccctccccgcatgccccacccgagagcgcaggctgttagtcgtgttaatggcaggaagcagaatggagacctggcccctgcctctgacgccgtgggtgctccccgcataggggccctacgtacatcccctgttcccaacacacagaccatgagcaggatgggctgcacaaggtgggcacgggtgcctgtgcacacgtctgtgcagggagttggggacaggcaacacacacgtgtcacagccccatgacggccacaggcggccatgctggaggctggcagagacgccccctccaagcctcggtttctgctggggccctcaggagctgccacttacgtggagcaccaggcacggagctggttagtgaggaggagctggtgcgcgtgacggcgctggagcagggactcgtaccgtagcggggcagggctcctgtcagtgccgccgtgtgggacagccaggcggcggggtcgatgggccgcaccgggtcagctgggtggccgccacgtggcgatgacaggcggacagatggacagggtgggagggcagggtgcagggcacagaggagagaggccttcaggctaggtaggcgccccctccccatcccgccccgtgtgccccgagggccactcaccccgtgggacggtgaagtagcttcggggcgttgggtcccagcacttggccacagtgaggctgatgggcctgcaggaacggtggtcacacagcaaggcccccatggtcccacctccctgcctggcccctcccgctccagcgcccccagccctcaccccgtctgggaaacgatctcccgcagcacccgcacggcatcgtcattgctcatgttctcaaagttcacgtcattcacctgcaggggtggggattagggtggtgcaggcaggatgtgcagctcagtccaccgcccccgcagacccacccacagccgcatgtcccccagcagcccccgcagacccacccgcagccgcatgtcccccagcagcccctacagacccacccgcagccgcacgtcaccccaaagtccccacggacccacccgcagctacatgtcaccccgcagcccccacagacacacctgcagcaacatgtcgccgggctcgatgcggccgtcagcggccacagccccgcccttcatgatggagccaatgtagatgccgccgtctccacggtcgttgctctgccccacgatgctgatgcccagaaagtgatgtctttctgcaggaagagccatgagccgcggccaagcccctgcccctgcccccaaccctcgccccgaggcctcacccatgttgagcgtgacagtgacgatgttgagggacatggtggagtcggttatgctgctgaaggaggaggcctatggaggagagggggcgtgtgtaaaaggcacggggctgcccgacactgacttcgcctccccagccccgccctgctccacccggctgcctacccggtccgcctgccgaaggcgctgcttcctccgccggcgtttgtgcttccggatgagtctggatgaggtgctctgctccgtggagctgctgagcctgggaacagactgtcagagctcagaggagctggagacatgggtaggggggtgggaacccgctcccccaatactgagtgggaatcgggggtctaggccaggcttgttccaaagcaggctcagtgcctgacgtccacgccccaggccctgcacacgtgatatgcatatgagcacacacgaaaatcccagagacaggcaaactgggcacagacacatgtagccagatccactactgacacacctgcacacatgcacacctgcacacacatgcacacctgcacacacgcacccctgcacaaggcacacatgcacacacctgcacacacacctgcacacacgcaaccctgcacacatgcacccctgcgcacaggcacacatgcacacccctgcacacgcacgcatgaacacacgcacacctgcacacgcatgcacacctgcacacacgcacccctgcacactacacacctgcacaggcacacatgcacacctgcatactcacctgcacacgcacccctgcacaatgcacccctgcacacacgcacccctgcacacacatgcacacctgcacacacgcacccctgcacacaggcacacctgcacacacctgcacacgcacgcctgcacatgcacacctgcacgcacaccttcacatacacctgtacaagcacacctgcacacacgcacatctgcacacgcacacctgcacacacgcacacgcacacatgcacacacctgcgcacacgcgtgcattgtgaaaacgctcacgtgcacactgtgaaaacgcacctcacacacacatacatgcacacacagacatgcgcatcatgtacataaacgtttgcacacaggtacatgcacagacacatccgcaatgtgaaaacgcctcacacagacacacatgcacaagcagacacgtgcatcatgtacacgtttgcacgcgggcacacacacaggcgcgcacacacgtgcacagtgaaaacacctcatgtggaacacgtgcacaagcacacgtgcatcatgtacacagacatttgcaggcacacacatgcacacacacgcacacacgtgcaatgtgaaaacacctcatgcagacacatgcacatcatgtacagacatttgcaagtgggcacacaggcatacacgcccacagacactcccacacacctgctcgtgctgccatcctcgtccgagtccacaaagctgctgg

SEQ ID NO: 1879785 - DNA, 4001 bp, Homo sapiens
agtagcctccagaggcctcaggtccagtctctaaaaatatctcaggaggctgcagtggctgaccattgccttggaccgctcttggcagtcgaagaagattctcctgtcagtttgagctgggtgagcttagagaggaaagctccactatggctcccaaaccaggaaggagccatagcccaggcaggagggctgaggacctctggtggcggcccagggcttccagcatgtgccctaggggaagcaggggccagctggcaagagcagggggtgggcagaaagcacccggtggactcagggctggaggggaggaggcgatcttgcccaaggccctccgactgcaagctccagggcccgctcaccttgctcctgctccttctgctgctgcttctccagctttcgctccttcatgctgcgcagcttggccttgccgatgcccccagcttggcggatggactctagcagagtggccagccaccggaggggtcaaccacttccctgggagctccctggactggagccgggaggtggggaacagggcaaggaggaaaggctgctcaggcagggctggggaagcttactgtgtccaagagcctgctgggagggaagtcacctcccctcaaacgaggagccctgcgctggggaggccggacctttggagactgtgtgtgggggcctgggcactgacttctgcaaccacctgagcgcgggcatcctgtgtgcagatactccctgcttcctctctagcccccaccctgcagagctggacccctgagctagccatgctctgacagtctcagttgcacacacgagccagcagaggggttttgtgccacttctggatgctagggttacactgggagacacagcagtgaagctgaaatgaaaaatgtgttgctgtagtttgttattagaccccttctttccattggtttaattaggaatggggaacccagagcctcacttgttcaggctccctctgccctagaagtgagaagtccagagctctacagtttgaaaaccactattttatgaaccaagtagaacaagatatttgaaatggaaactattcaaaaaattgagaatttctgaccacttaacaaacccacagaaaatccacccgagtgcactgagcacgccagaaatcaggtggcctcaaagagctgctcccacctgaaggagacgcgctgctgctgctgtcgtcctgcctggcgccttggcctacaggggccgcggttgagggtgggagtgggggtgcactggccagcacctcaggagctgggggtggtggtgggggcggtgggggtggtgttagtaccccatcttgtaggtctgaaacacaaagtgtggggtgtctagggaagaaggtgtgtgaccagggaggtccccggcccagctcccatcccagaacccagctcacctaccttgagaggctcggctacctcagtgtggaaggtgggcagttctggaatggtgccaggggcagagggggcaatgccggggcccaggtcggcaatgtacatgaggtcgttggcaatgccgggcaggtcaggcaggtaggatggaacatcaatctcaggcacctggcccaggtctggcacatagaagtagttctctgggacctgcaagattaggcagggacatgtgagaggtgacagggacctgcaggggcagccaacaagaccttgtgtgcacctcccatgggtggaataaggggcccaacagccttgactggagaggagctctggcaaggccctgggccactgcacctgtctccacctctgtcccacccctcccacctgctgttccagctgctctctcttgctgatggacaagggggcatcaaacagcttctcctctgtctctgcccccagcatcacatgggtctttgttacagcaccagccagggggtccaggaagacatacttcttctacctacagaggcgacatgggggtcaggcaagctgacacccgctgtcctgagcccatgttcctctcccacatcatcaggggcacagcgtgcactgtggggtcccaggcctcccgagccgagccacccgtcaccccctggctcctggcctatgtgctgtacctgtgtctgatgccctgggtccccactaagccaggccgggcctcccgcccacacccctcggccctgccctctggccatacaggttctcggtggtgttgaagagcagcaaggagctgacagagctgatgttgctgggaagacccccaagtccctcttctgcatcgtcctcgggctccggcttggtgctcacgcacacaggaaagtccttcagcttctcctgagagggccaggatggccaagggatggtgaatatttggtgctgggcctaatcagctgccatcccatcccagtcagcctcctctgggggacagaaccctatggtggccccggctcctccccagtatccagtcctcctggtgtgtgacaggctatatgcgcggccagcagacctgcagggcccgctcgtccagggggcggtgcttgctctggatcctgtggcgggggcgtctctgcaggccagggtcctgggcgcccgtgaagatggagccatattcctgcaggcgccctggagcagggtacttggcactggagaacacctgtggacacagggacaagtctgagggggccccaagaggctcagagggctaggattgcttggcaggagagggtggagttggaagcctgggcgagaagaaagctcaaggtacaggtgggcagcagggcagagactgggcagcctcagaggcacggggaaatggagggactgcccagtagcctcaggacacaggggtatggggactaccttgatggccttcttgctgcccttgatcttctcaatcttggcctgggccaaggagaccttctctccaatggcctgcacctggctccggctctgctctacctgctgggagatcctgccatggagaagatcacagaggctgggctgctccccaccctctgcacacctcctgcttctaacagcagagctgccaggccaggccctcaggcaagggctctgaagtcagggtcacctacttgccagggccgatcttggtgccatccagggggcctctacaaggataatctgacctgcagggtcgaggagttgacggtgctgagttccctgcactctcagtagggacaggccctatgctgccacctgtacatgctatctgaaggacagcctccagggcacacagaggatggtatttacacatgcacacatggctactgatggggcaagcacttcacaacccctcatgatcacgtgcagcagacaatgtggcctctgcagagggggaacggagaccggaggctgagactggcaaggctggacctgagtgtcgtcacctaaattcagacggggaactgcccctgcacatactgaacggctcactgagcaaaccccgagtcccgaccaccgcctcagtgtggtctagctcctcacctgcttccatcctccctggtgcggggtgggcccagtgatatcagctgcctgctgttccccagatgtgccaagtgcattcttgtgtgcttgcatctcatggaacgccatttccccagacatccctgtggctggctcctgatgcccgaggcccaagtgtctgatgctttaaggcacatcaccccactcatgcttttccatgttctttggccgcagcaaggccgctctcactgcaaagttaactctgatgcgtgtgtaacacaacatcctcctcccagtcgcccctgtagctcccctacctccaagagcccagcccttgcccacagggccacactccacgtgcagagcagcctcagcactcaccgggcacgagcgagcctgtgtggtgcgcagggatgagaaggcagaggcgcgactggggttcatgaggaagggcaggaggagggtgtgggatggtggaggggtttgagaaggcagaggcgcgactggggttcatgaggaaagggagggggaggatgtgggatggtg

SEQ ID NO: 1879786 - DNA, 4001 bp, Homo sapiens
gtagcctccagaggcctcaggtccagtctctaaaaatatctcaggaggctgcagtggctgaccattgccttggaccgctcttggcagtcgaagaagattctcctgtcagtttgagctgggtgagcttagagaggaaagctccactatggctcccaaaccaggaaggagccatagcccaggcaggagggctgaggacctctggtggcggcccagggcttccagcatgtgccctaggggaagcaggggccagttggcaagagcagggggtgggcagaaagcacccggtggactcagggctggaggggaggaggcgatcttgcccaaggccctccgactgcaagctccagggcccgctcaccttgctcctgctccttctgcttcttcttctccagctttcgctccttcatgctgcgcagcttggccttgccgatgcccccagcttggcggatggactctagcagagtggcccggccaccggaggggtcgaccacttccctgggagctccctggactggagccaggaggtggggaacagggcaaggaggaaaggctgctcaggcagggctggggaagcttactgtgtccaagagcctgctgggagggaagtcacctcccctcaaacgaggagccccgcgctggggaggccggacctttggagactgtgtgggggggcctgggcactgacttctgcaaccacctgagcgcgggcatcctgtgtgcagatactccctgcttcctctctagcccccaccctgcagagctggaccccagagctagccatgctctgacagtctcagttgcacacatgagccagcagaggggttttgtgccacttctggatgctagggttacactgggagatacagcagtgaagctaaaatgaaaaatgtgttgctgtagtttgttattagaccccttctttccattggtttaattaggaacggggaacccagagcctcacttgttcaggctccctctgccctagaagtgagaagtccagagctctacagtttgaaaaccactattttatgaaccaagtagaacaagatatttgaaatgggaactattcaaaaaattgagaatttctgaccacttaataaacccacagaaaatccacccgagtgcactgagcacaccagaaatcaggtggcctcaaagagctgctcccacctgaaggagacgcgctgctgctgctgtcgtcctgcctggcgccttggcctacaggggccgcggttgagggtgggagtgggggtgcactggccagcacctcaggagctgggggtggtggtgggggcggtgggggtggtgttagtaccccatcttgtaggtctgaaacacaaagtatggggtgtctagggaagaaggtgtgtgaccagggaggtccccggcccagctcccatcccagaacccagctcacctaccttgagaggctcggctacctcagtgtggaaggtgggcagttctggaatggtgccaggggcagagggggcaatgccggggcccaggtcggcaatgtacatgaggtcgttggcaatgccggacaggtcaggcaggtaggatggaacatcaatctcaggcacctggcccaggtctggcacatagaagtagttctctgggacctgcaagattaggcagggacatgtgagaggtgacagggacctgcaggggcagccaacaagaccttgtgtgcacctcccatgggtggaataaggggcccaacagccttgactggagaggagctctggcaaggccctgggccactgcacctgtctccacctctgtcccacccctcccacctgctgttccagctgctctctcttgctgatggacaagggggcatcaaacagcttctcctctgtctctgcccccagcatcacatgggtctttgttacagcaccagccagggggtccaggaagacatacttcttctacctacagaggcgacatgggggtcaggcaagctgacacccgctgtcctgagcccatgttcctctcccacatcatcaggggcacagcgtgcactgtggggtcccaggcctcccgagccgagccaccccagtcaccccctggctcctggcctatgtgctgtacctgtgtctgatgacctgggtccccactaagccaggccgggcctcccgcccacacccctcggccctgccctctggccatacaggttctcggtggtgttgaagagcagcaaggagctgacagagctgatgttgctgggaagacccccaagtccctcttctgcatcgtcctcgggctccggcttggtgctcacgcacacaggaaagtccttcagcttctcctgggagggccaggatggccaagggatggtgaatatttggtgctgggcctaatcagctgccatcccatcccagtcagcctcctctgggggacagaaccctatggtggccccggctcctccccagtatccagtcctcctggtgtgtgacaggctatatgcgcggccagcagacctgcagggcccgctcgtccagggggcggtgcttgctctggatcctgtgcgggggcgtctctgcaggccagggtcctgggcgcccgtgaagatggagccatattcctgcaggcgccctggagcagggtacttggcactggagaacacctgtggacacagggacaagtctgagggggccccaagaggctcagagggctaggattgcttggcaggagagggtggagttggaagcctgggcgagaagaaagctcaaggtacaggtgggcagcagggcagagactgggcagcctcagaggcacggggaaatggagggactgcccagtagcctcaggacacaggggtatggggactaccttgatggccttcttgctgcccttgatcttctcaatcttggcctgggccaaggagaccttctctccaatggcctgcacctggctccggctctgctctacctgctgggagatcctgccatggagaagatcacagaggctgggctgctccccaccctctgcacacctcctgcttctaacagcagagctgccaggccaggccctcaggcaagggctctgaagtcagggtcacctacttgccagggccgatcttggtgccatccagggggcctctacaaggataatctgacctgcagggtcgaggagttgacggtgctgagttccctgcactctcagtagggacaggccctatgctgccacctgtacatgctatctgaaggacagcctccagggcacacagaggatggtatttacacatgcacacatggctactgatggggcaagcacttcacaacccctcatgatcacgtgcagcagacaatgtggcctctgcagagggggaacggagaccggaggctgagactggcaaggctggacctgagtgtcgtcacctaaattcagacggggaactgcccctgcacatagtgaacggctcactgagcaaaccccgagtcccgaccaccgcctcagtgtggtctagctcctcacctgcttccatcctccctggtgtggggtgggcccagtgatatcagctgcctgctgttccccagatgtgccaagtgcattcttgtgtgcttgcgtctcatggaacgccatttccccagacatccctgtggctggctcctgatgcccgaggcccaagtgtctgatgctttaaggcacatcaccccactcatgcttttccatgttctttggccgcagcaaggccgctctcactgcaaagttaactctgatgcgtgtgtaacacgacatcctcctcccagtcgcccctgtagctcccctacctccaagagcccagcccttgcccacagggccacactccatgtgcagagcagcctcagcattcaccgggcacgagcgagcctgtgtggtgcgcagggatgagaaggcagaggcgcgactggggttcatgaggaagggcaggaggagggtgtgggatggtggaggggtttgagaaggcagaggcgcgactggggttcatgaggaaagggagggggaggatgtgggatggt

SEQ ID NO: 1879787 - DNA, 4001 bp, Homo sapiens; identical to SEQ ID NO: 1879785

SEQ ID NO: 1879788 - DNA, 4001 bp, Homo sapiens; identical to SEQ ID NO: 1879786

SEQ ID NO: 1879789 - DNA, 4001 bp, Homo sapiens; identical to SEQ ID NO: 1879785

SEQ ID NO: 1879790 - DNA, 4001 bp, Homo sapiens; identical to SEQ ID NO: 1879786

SEQ ID NO: 1879791 - DNA, 4001 bp, Homo sapiens; identical to SEQ ID NO: 1879785

SEQ ID NO: 1879792 - DNA, 4001 bp, Homo sapiens; identical to SEQ ID NO: 1879786

SEQ ID NO: 1879793 - DNA, 4001 bp, Homo sapiens
aggctggaatgcagtggcacaatctcagctcactgcaacctctgcctcctggcagagttcaagtgactctcctgcctcagccttttttgtagctgggattacaggcgtaggccagcacacccagctaatttgtgtatttttagtagagacagggtttcaccatgttggccaggctggtctcgaactcctgacctcaagtgatccgcctgcctcaccctccccaaagtgctgggattacaggtgtgagccaccatgcctggcctggttttcattatctttatgaggtgaatttactggtaggacaaaaaggaattaatagcctcattttatagatggggaaaataagtaagatttacccaaggccaccgcgccatggggttttgccatgttggccaggctgatctcaagtgatccacccaccttggcctcccaaagtgctgggattataggcatgagccaccatgcccagtctaagttcagagctttttgctctacacatctgcatttccccttgctcccttgtaactcatcccattccatctagtaactcttcttgtccagaacagtattttcttttcttttttttttttttgagacggagttttgctcttgttgcccaggctagagtgcaatggcacgatcttggatcgccacaacctccacctcccaggttcaagtgattctcctgcctcagcctcacaagtagctgggattacaggcatgtgccaccacgcccagttaattttgtatttttagtagagacggggtttctccatgttggtcaggccggtcttgaactcccgacctcaggtggtccacccacctcggcttcccaaagtgctgggattataggcgtgagccaccatgcagaacggtattttcataaaaagcatgccctttactaaaggtattttccctgtgcctgtcaaatggtgttcatcttcctcctggaccacgccccctctctctacaacccttccctgtatgacccatccagcttgctcacaccctcctgctccacccctccaccccccttaatactgacatcatattagggcatctgaattggcttctgggccctagcaggctgtccagtgtgtgccatcaaacgggtttttagaatgtggggacaaagtttctttctcctgtattccccgctcagcttatgagagtacagggccaggctcagtggctcatgcctgtaatcccagcactttgggaggctgagaagggaagatcacttgagatcaccctggccaacatggtgaaaccctgtctctactaaaaatacaaaaagtagctgggcatggtggtgcacacctattatcccagctactcgggaggctgaagcaggagaattgcttgaatccaggaggcgaagcttgcagtgagccaagatcgcgccactgcactccagcctgggcgaccgagagacttggtctcaaaaaaaaaaaaggggggtgccgacagaaagtatcaccttccgattctcctgctcatcccagtgaaaccaggaatttttttttttttttttttgagatggactctcgctctgttgcccaggctggagtgcagtagtgcagtctcggctcactacaacctccgcctcccaggttcaggcaactctcctgtctcagcctcccgagcagctaggactacaggtgtgtgccaccacacccagctaatttttgtatttttagtagagacggggtttcaccatattggccaggctggtctcaaactcctgactttatgatccatctgcctcagcctcccaaagtgctgggattacaagcgtgagccaccatgcccggctcaaaataggaatcttaacctaactctgtcccacaactgaccgatagcagcttcagtcctccaatctgtccagtatgccgaaggtgggggccctggcaaaggtcaaccaatgtgccacacctaggagaaagaagaggccagttagtgattttcagaatcttcagcttctagctttctccctctcatggtctttagctgacagaagaggtgaagagaaaggaactgtcctactgagagagggcaatggcagataaaaatcaattccctggcagggcgcggtggctcatgtctataatcccagaactttgggaggccaaggtgggtggatcacgtggtcaggagttcgagaccagcctggacaatatggtgaaaccccgtctctactaaaaatataaaaattagctaggcatggtggtgcatgcctgtagttccagctactcgggaggctgaggcagaagaattgtttgaacccgggaggcagagatgcagtgagccgagatcgcgccactgcattccagcctgggtgacagaacaagacttcatctcaaaaaaaaaaaaaaaaaaaaaaactagccaggcatggtggcacatgcctgtaatcccagccactctggaggctaaggcaggagaatcacttgaacccaggaggcggaggttgcagtgagccgagatcgtgctaccgcactccagcctgggagacagaccaagactccgtctcaaaaaaagaaaaaaaaaaaatcaattcccattcccatttctttttctggagcaacacaaattaccttctatctttcttcccttatcgcatttctggccttcttcaatgcttccccacctctctgtttgccttaatcttgacaactcttacccatatactgttgctgttggacctgtcactttctcctcaatcaagtgaagcttaaaggggttatcctggaaaaaggtagaagggagattgaagaaaagtgtttattcccacaaagatgtcctggaagagccacctcttccctccaccccaccttgaacaactggcgaagctgatcccgtgaagcctctagcctccggaagggtcgagcagcagctgtaagttcctggcaaatccgctccaaaacaggcagctctgagccccggattgtcctggaaagaggagaattggttgggttgcatcctatgaggtgcatcaatcacctgggtgacacacctgttggctagcgggtaaggtcctgtccttcaagagaaatctagagttataggcaaagacagacaaactcagagaaaatataaataggatatcaggtaacagatattacagctggagaaaaagctctatgcatgaagttaaaagttgaatgcaggaaatctggatagacaaagttagaacaatagtaatgagggcgattaagtaaaacttgaatttatgaaagctaacaagtaacaaagtaagttgtttcttctttttctttttgttttttttttgagaaagtgtcttgctgtgtcacacaagttgggtgcagtggttaagatcatggctcaccacagcctcaacctcccaggctcaagtgatccttccacctcagcctcccaagtagctgggactacatgtgcaccagccaagaaggtaaatttcaagcaaagttagaagagggacatggactagcacagaaggagatactaatgtcatagttgagacctagagaaacccttctcctccagcttcctcatccaaatggagcatgcccaaggcccctgaaaagagcctcagaaaccatcccagaatcattctcctccttcctttcattactcacctctcctttcccaggaagaaatcatggtaaaagccatattctgtacttggacctctgcagagaacagcacctaggaattgttcagctgctgcccccaggacatgggtgctggagtgccagaacacctgggttcacaaaaaaggggttcacaagttcataaacttctcccttaacccctagatctctgagctcttcctcacaaaagctggtaggaaagccggtatggttcttctaggaataactaccacaaaatggggatcctagattttgggggtgaccactaaaaagtaacaagcttaaaaaaaaaggctgggcacagcagctcatgcctgtaaccccaacacttcaggaggtcaaggcaggcggatcatctgaggtcag

SEQ ID NO: 1879794 - DNA, 4001 bp, Homo sapiens
tgaaagaaatttatatggaattagcagctaaatagcaaacttctaaatttatatggaattagcagctaaacgcaaatttcttctctgagtttggaaagttgatgatcttagtttgatcctatgggagaaaaaggaagacagcaaacaagaggccacgatttttcttttgatgcttcagagggcctatgtactcaaagtctacagtcttttagtccagaaactctacatcctcagtccttgtttggtggcctgagagtctccgagtgtttttctgcctctatatctctgtctcagcctcaaacaggaagtactggctcatttcttcaagatggtgtgcataggattaacatgtgggggtggtaggtgcccttgtttgagggttaataaatatttacgcactaaagagtcttggtctcagactggtttctaaaacaggccagtctagcccacctcttctgtcttttgaagaatgaatggtaagattagtcaaggtttcttggcagacaaactttcctaatttgagctatgctcagcaactggccttgttgcagagactaagaagagaaaaggcccaggcttcccagcatcttgcaaatcatctttcagagcctgatgccctagggttcccactttggtcacctgggctctcctctaagtataataacttggtttcccaaagatgctcatcctgccagacacctattcgttttcttcagaggagatcaatacacaaatagcttttagagtagcaactctactggggtcagggatcgaagtcttttatcaagaggggtgtcatgtttttggctctgacaacaataaacctttgagctgtttctcctcttaggttaaagttcttccaggaagagagatttatttttgtcatgcagcatctaaacattccttatcctggtttggatgctatgctgaattaacactttgcatctctaatatgcccgtcttggaattatctctatgttctgtagtgaaacactggatcctttcctgactagttattgcagattttattaatttacttaccctagaaattggaatcccattaaaattttaatagaaggtgtttttaacacaaaaaatgccttctaacaaaaattcaggttgaagctgaccactatgaagaaaaaaataagaatttgtgagacatatcttcccatattcatatggcataatttgggggaaccatgccaatttcatgttgccatggtatgcttggggttaagcttttattccatcacaaatcactttaaatttgattcatctaagttttggacattttattggcatcaatctgactaaagaaacagttaggtttctaaaaatatcataagattgattcggcacctaggagtagggggcaattggaaaccagctaaagatgctacaggatcaatttccttattcaggaagaccatctctttggaaaaaaaacttatctgactccatattgatcccctaaaaagagaattaaatttacatatttggttactgtgatttcagaggtgtcaagataagttattcatgtaagcgagttgtttccacatgttaaaactctgtccaagcagcagaaaagtgctttctgggactcagaaggcagcgctggaaactgcaggaacatctaccccagctgtgagcctgccatcagctggaattcactaaattcactatgccatttagaaagacactcctagctgaaggtcatacttccttgggtcttttctcaaacctgactttctaaagactgccctagtttttttcttccttcacctgacctcagtgaaaactacaataaacctcagcggaatttccacatgaggaagcagttgtaaaaggaattctggtactcaagttcccattgtgggccccgtgagctgaaggaaaggatatgcgggctggggaggcaggaatggagataaccacagaaccagttccccaagtggctgcagcctgccatgcacactctgacagccagtttgagaacaagccctgcagaatgatttgaggaagaatttttttttctttttagaggaagcaggtggggagagtgagggaactaacatttagtgcggttggggagctttaaggaaatacctatgctccaaccccatagactctgcttcggatgacttggagaggaactcaggcacaggtattttagaaagtgtcttaggtttgaaccaaaataaacaatgtcagtattggattataaaaccaataaaataaaataaatatccatgagtccatgataatttcaataaataactgaataaataaacaaataaatggaggagaagaaacagcatttcaagacagaaaaattccaataaacaatgtagaaaaaatgagggactaggaaaccatcctcagaacgttgcagtaattgtcgcaggcaagatgcaccaaatgaacagaacattaatggggaaaaagatgaggagaaataggctacctgcataacctgaaagtatctctcccaagttatttattaatgacaaagggaaaaatactatctttacaataggtaaacccagcagacattaccttaaccaagtgatgaaggttaacattgccagtaataagacgtatggacatcacatacttcctgttatgagattctgggaagggcctatggcttctgtggtatccttctcagtaatgcataacctcaatctaagcacaggaaaacattagataaaccccaagtgaaggacattctatgaaatacgtgactagtcctcatcaaaagtgtcatgaaatgcagggaaagcctgaggaacggccatggatttagagactgaggacacctgataaataaatgcaaagggaacctggattcgttcttggaggacataaaggacattagtagagaaactggtaaaatctcaataatgcctgtagtttagctgagcattatactcatgttaatttcttacttttgataattggaccataggaatgcaaatccgcattaggggaagctggataaaagttatatgaactctcagtattatttttgcaacctttctgtaactctaaaattatttgaaacaaaaataaacatatttttaaataatacatatcataacaacaaagctttttagaagattcaaatggtggaaagctccttgagattctaatatgcagctaagtttgagacaactgattttgtaagtacctgctcagcttctgcgcttaactgatgtgatctcctttacatcctcatcagccctctgaggcaagtattgcagctcccatttgatagggagcatctgatacccagggagacagtccactgcctggctttcagcacacaacctgacttattgtccatccaagctgctggacttgactatttcagctcagaacacagtgctcagcactccacatacactcacttatttagtcctcacaacacccctataagacagtgtcagtccattttgtgttgctagaaaagaatacccaagtctgggtaatttataaagaaaaaagccttatttggcccatgattctgatgtctcaaaaaattcaaggttgggcatctggggagagccccaggctgcttccactcctagcagaaagtgaaggggagctggcatgtgcataaatcacaaggcgagagaggaagaagagaaagggggaggtgccaggctctttttaacaactagctctgttgggggcaaatagagtgagaactcactcatgccccgccccagggagggcactaatctattcatgagggatctgcccccatgacccaaacacctgccactaggccccacgtccaacactgaggatcaaatttcaacatgagatttggtgggaacaaacaaaacatatccaaactatagcagagagctactattagcacccctactctgcagacgaggaaactcatgcacagaaaaactgaagtttcgcagccaaggtttggaccaaagccagttgactccagttgactctgtactcttaagagtgaggtt

SEQ ID NO: 1879795 - DNA, 4001 bp, Homo sapiens
tacctgtacttgtgtacaataataaaagaacaaggatgttcactgatgcattgtttgtaataggaaaatactggcaatctaaatgtccagctattagggactgttaaatcattaccatacatacgtacaatggaacgaggcagctctacatatattcataagtaaaacaagccagtatagcatactaccattgtgtttttaaaaggatatgtatcaataacattgttatttacgacatatttatgacaaaagatgttaaaaatgctgatatgggcataaaataaatctgaaaatatttccaagaaaccattaccactaatggcttgtggagagaattgcaaggctggactataggaataacatggatgtttacttttccctgtatcttttttgacaattttggattttgtatcttttgtgtgaattacctttcattgttgttttacgagttttaagattccattcattcctggatttatttgctaaccttgtacaaagttaacagttgtcagaaaaagatatagtaattcctgtcttgaggagctgatgggcactgggcctaggacctctttgcactggaataatgggggaggggagcgggtgaccttatcagaaatgcagattcctgggccccaccccagacggaccgaattaagagtcccagagtgacggcagaaatctccatttttgacgggctcccgctgggattcgggtgtctgctcatctggaagcctccatgctggagaggtagtcagcacagcgcacgcagggcgtaggcgtgttttctcgtccctccctcgcaaccacagtcccgctcaaggcgtgggggtgtcacccgagacccgggcctcccctgcactttcctttaggccgaaaccgcgagccttcgcttcagtgtcgcttttccttcgccgccgccgccgccgccgccgccgctcttctcaggacctacatcgactgcccagtcggctgagctgggccctgggccaccgaggcccggggagctgaggggctcgggaccctgcgagccgcttaagaaaggaccgcaagaaccgaatgcagtgaactgcgagagcagggaatgagagagaagttaaaccgtttagcaaaaaaaaaaaataagagacatgatggaggcagaaaataaattgtaggggggagggaaaaaagcgttacgactccgccgggactcgaacccggaacctttgaatgccttcagcctctagaagtccaatgcgctatccattgcgccacggagccacctgttggagtctcagcgcatctgctatgttaagccagaggcgacggccccgcgctcttccgaccgcgcctcccgtcgtcagtgtcaccgagacccagccgccgcgctcagggcactgccatccgcctcaaacgccagccgcaggctctcggtctccccgcagtggtcgcccctcaacaaggtcggcgacccagttgagccaagggcggccgcagtccgacggtcccacctggtcggtgtgagggcagccgcaacccggtccccttcacggtccgggcccagccgtacgaatcacagtcgcgcttttccctccccggctcccttcctgccccaagcgccccgcctaccaggtctctccggcggccgctccagcccggccgggaccccagagttgcaggcccaggccagccgttgcaccgttaagccgggccggtgacgccgggcctttacgtcgcgcctgtgagcggccgaggccgagcggcctcccctcgggctgcgagacgtaagcggcgacccctctcgggcctgggctcttccctcgcgcccggccgccgcgcccgacccagccgcggctggacctgcgcgcgagcgccgccgcgcgacgtctgtgtgcgtgcttgtgcgtgtttatttgcgcggggttcgaaaaacggggtttgggttgcatttcgctccccacagacccagagccgaatttctgaggtatccgggctctggtggactgaggggggcgacgcgccccgcgccgcagcatcctccgagagctcgtcttgccgccagcacctgcctccaaggacgccgcgcagctgccccgagcccgcgcgcccggggcccgcgactgcgtgggcggaagccgggagggtgtcagcacgcgtgggagcgctgggagcatgcgtatgcgggtgcatgtggtcggagggcgcgcgctcgagcgcggccgcggggtttcctggtggctgcgagcggtggggacggcagcgggcctggcgccgctgcccagaagggtgcggtcgccacgaatctgagaggcggctgggtgggggccggcaggtttccagtgcccgcagtgatccccatccgcaagaccccgaagccctttgaaatagacggtcaaagccgcgtggttgctctgcgactgcagcggcgagaccgaacgcccggcccccgttcctattagctcacagcagtcccggccccgcctacggaggattcgcagggcggccgctgggcgcgctttctcggctcggccacagcccgtttctgcaccaaacccgccagccgcggcccaccctgtgcttcacccatacccgcccctgcccagcatcgccaggcctcaaatgcagaatagtctctggcagagttcaaagagggaaagggaagtcctgggaagagtccagtgtggtagggattttacagtcttacttaaccccaagacgaagctatggggcgggtacatacacaccaccgtcccctttataatataaagaagggaaactgcagctaagagaggttaaaaaactcgtgtagggacgcccagctagtgagcgtggagaactgtgatgaatcatattttgttatgtttgcaaactaacacgttagctttcacggtttcatgaatgctgacagaacacaccagacttctgagtcagagataaaagactattacaacaaaagcaatagccagagtatcaccatttttgagttggctccctggaccccagttctcacaggaacgaagcacacgggcccagatgcatgcttacacacaagatgggttgcattacagaagaggaatgctgagcttggggaacccaccatgttatagtgagcagtaagcaagcctgctctttgttccatagggagacattacctcatccctcaagattgctcgctgcaaacacaacgctgagaaatggcccaagtaaagcgtgatcagggtcttgcattcttggcacatctaggaagaacgtgcaaggatgcgaattgtgaatcgcttctccaaacagtaagtggcagagccctgattggtgccaggcctatttaattatactctaatgtaaacaaagttttatatatatatatatatatatatatatatatatatatataaaattgttatgcccctttaatgaattaaatgtcttcacattgcatgcagggagaattctcatatggataaaattagcctttaaaatggaatatggttttaaattgtatttatttaaacaaatcttttttgaattctgaaatatgccaggcactggtggcatctcagggtctccactggtcttaggagttgctcacagccgaaatgggagaagagatgctctgtatgcctgtgggaaaaccatacagaggaattctgcctggggtattggagccaaatctcaaatgatgaggagtcattgacgtgattaagtgacagttgagatgcgtatataaaaattctggaaagggggaattgggaaagaaacaatgtgctaaggaaagatgtgtatgtgtttgattccacttaatgattcaaacgaataattttagatattttattccactagatgaagccaaaaaaattcctgtatcatggaaaatattagagatacagtgttagcagacagtgtgggaaagccaggctttccctgtgcagccttctgtgagctatcaaggttgtacttcttataccctgcaattagaagactggggccaggtgcagtgactcacgcctgtaattccagcacttctg

SEQ ID NO: 1879796 - DNA, 4001 bp, Homo sapiens
attcttgaacctcctgggttcaagtgtctcagcctcccaagtagctggattacaggcacttgccaccatgcctggctaattttttgtatttttagtagagatggggtttcaccaggttgcccaggctggtctccaactcctgacctcaagtgatctgcccacctcggcctcccaaagtgctgggattacaggcgtgagccaccacacctgaccctaaataatactttcttcattacatttgattttgtaactttctattatgctcatgttacttttatactaaaaaaaaaaaatttcatctttaaagaaagataagacgaacatataacttataaagagatcacaaatatatttaagtctaaatagattaaaattcaccttttattaattagattaaaattcaaacaaattcacaaacatatatgcagattaactgctactgctgttacaacttaatctcttcaattaaatttaaggagattaaaatttaagcacaaacatatgcagattaatggctactataaaaattcacaaagtaagaagtataccctcaaatactttagaaaaccagaccattaaaaaaagagtaatttaaaataaatatttgtaaaataaaaataaatatttgtaactatataacatccacatagagtttttttgtttgtttgtttgtttttgagctggagtctcgctccgtcacccaggttggagtgcaatggcgtgatctcggctcactgcaacctccgcctcttggattcaagtgattctcctgcctcagcctccagagcagctggaactctaggtgtgcgccaccatgcccggctaatttttgtgtttttgtagagatggagtttcaccatgttggccaggctggtctcgaactcctgacctcaggtgatccacctgccttggcttcccaaagtgctgggattacaggagtgagccaccgcgcccggccccgtgtaagttttatttaggtacattccaaattaaatgaaaagcttctattgttttgtttttatattaatcatgccttttgaatttctaggttttttttgtttcttgtttttttttttttttttttgagacagtcttgctctatcacccaagctggagtacagtggcacagcctcagctcactgcaacctctacctcccaggttcaaatgattctcttgcctcagattcccaagtagctgggactacaggtgtatgccaccacgcccaactaatttttgtatttttagtagagatggggtttcaccatgttggccaggctggtctcgaactcctgacttcaagtgatccacccacctcagcctcccagagtgctgggattacaggcgtgagccacctcacccagggaattcctgtatttctgatgtttggctgggggccttgctaaccctggaagggactgccctccccaggactggtcatttcctagaaaatggcaatcatctcctgatccgttggccttaacatagctcaacaatagtgacatctacagtttaaaagttttctgtgtggtttcattctaactctcaatataagtacactcagattgtttcccccacgatattcataaatcaaggattttttcttagccttttctcttgctaaatatatcatacttctgtcaaatcacttgctaatctttgatatcaattcatataagtttggaggggggaaaaaaacacaccaggaatgatattttacaaattcttactgtgctccaaaaagtgtgccagccccggcaggtcatctggatcagcgaaactcccaactccaacacaaagagccgctgcagactggagtaattagaacacatacaaatagttgagtcaaccctaaaggaataatattcgcatcttatcttaaggattcatttggagatggatgttttccaataggagtaacaaaattctttccctgagaatcaggaggagcagcaaagtgaaactcaccagaactgtgtcagtttcaccctgctgctcctccgcttgccatcctgccaaatgctgaacaggtgcagacctaaggaaaaaaagcagaaacagacagaaaaaaagggaagagggactggacagcccacccaaatatcatttcatgtcagcatttcataattctgaaccaagttttttccctgaattactagattttggaaatctgcggaagtaacatatctagatagatatctctgaagatctctaagcaattaaaagctttgtgttgagtgactcagttactagatgtgaaacctgtcaacatgtaacttagaaaattttgttaagatagaataagataacattttaggaaaacatctaacaaaaatagtaagtgataaaaaaagataaaatcggtagctattaaaaagtataactaaattttaaagaggctttttagttcttcacttctaattgaagatatacagcatatattacttatcagtatatattctcccaatactttgggaaaatcagagtttttaacaaaattgatggccaagaggtacaccaaactgcacttaaaatgattgggacttttttttttttttttttttaagacaggggtcttgctatgaggcccaggctggtctcaaactcctggactcaaacaatcctcccacctcagcctctcaaagtgctgggattataggcgtgagccactgcacccgaactattggggcataattacagtaagttaaaagacaaaaaaaggagaaaaaacggtcaatttgaatccttgaagatagaaaggcgaattattaactttcccaaatttgttttcttcaaacttttgtaaatgtcaattttacagggctaacatatttggtgaaacagattgttttaataaacagttacctcttaaaaaagagcttttcaaaaatagcatgtacctggcataaagtctagccatgtgtcagaaaatgagtgtgttttcagaagaaccaaacagcctcacttgatactataaaccccattttgaagacttaggcacataaactcagttaaaacattggggaatatccagttcttcaaaccacaatctaacctgttctgtgatgttttaataggtgcctaacctgctttcagctccaactaccccataaagatttcttgtctcgaccagcagggttgaagacatttttgaataagttgacttaaaccacagtctatcagtcagctttgaccacagcaaaaacaggctctgcaattgctagaaaagaaattcatacttgagaattttctacctaaaaaattcagacctgagaaattcatacttgagaactgaattaagaaagccctgaacaaatcttaattcaatgtatatcatattcaaatttcaaccttgttaatttatcaaacttttaaaatcaagaacaacttcttttgggaggaggaaaacggagagggataaaaaagatgcctcagaaaagtagttaacttcttaattaggtaaatgttattcaaaaaacgatcaaatatctttcttctcaattcctttattaattctcacatttaccttaaacaagtttcacacatttttcaaataaaacttagatcataaaaccactcttaagccacctcttaccaaggctaatctactttatttccttttttcagagagttattcaacaaatataaacatttaccacttacgatcgtgggatctttcctttcactagtgaacccattgcttctgaatcaaaacaatttctcgtcttcaaactacttaggttccactgtcccggtaggataatccataaaattagctgtcaatatcttataaggattatatcacactgagttctcagaaaagaaaggtagcatctaagccattttaaaaacgatcactagactctgaccctgctgctagaaaagatcaacttagaatttgatctacctaagcaaaataaaaaggggtaccaaaaaggctgaacagacatgttcatttgtcaaaggtgttcacaattgctgtataaatctaaagtattttata

SEQ ID NO: 1879797 - DNA, 4001 bp, Homo sapiens
  modified_base (1)..(17): a, c, t, g, unknown or other
nnnnnnnnnnnnnnnnngatcctgggacgccctccggtcctccgccctgtcgcggaggcagcgttttggatccctcgccgcacaggggctcctgcgaggccccctcttgccccacccacccagagccgtcagggctggccgaaggcgaacagccggcccagccgcgcggggcctttctctcacaacgcccccaccacggtcgcttgtcccgaccaagacccggccgggggggcaagagggcgtggggtgtagcgggtcggggggtggccctgttttgccccgggctggcactagaggcggcggcctgatctcgggtgagagggcctgagagaaacccagacacaccccaccgccaccaggagcaaatccactcccccacacacagacacacccgggcgcgctcgcacgcgcgcgcgcggactcacacacacacacacagacacacagacacacacgcacacacgcacgcgcacacgcacgcacacacacacgcggcttgaaggagagcaaggacgagatggatggagagatagaaaccgagggagggagagagacagcgatcgagagagacaggggagggcgagagggaaggagacagacagagaggctgagaaagagagaggcacagagaaagagagagagagagacagagagacagagggaaaacgacaaaagtagcgcgaggtccagggggaaacccagaagagagaggcggagggagctagagagcgagagcgatagagccttagagaggaagcgcccggctccgttaggcagcgccctcttgagcaggccgggatagggtggagggggcttgggctgcgcccagaacacgggggccaggcggtccgtgcgagaggaccaacggagcgctgaggcgggcgttttcttggatgaattgcttgctttggaggtgggtttcgtaggctcctgcctttcttggcacctccctgtgctctgggtgccttgcggcgggccccgagatttgcagagcgcgcccgcccgtttggcgggagccgtggcaccgggcgggcccggaggcctgggtctctggcgagtcctcgggactggagtcgtcgacacgaagcggggggcattgggaatcccgggtgcacagggcctgttttcccggtggctggcgaagcaatgtccttcccccgggtaaagcagcccatgcgttccggagccgacgtcttggctggcgtctgtggcacccgctgcccctgcccgccccttcccccggtttggaagggtgcgacgacggcgcccgatgggtgaattgaatcgcctgggcgttccgggagcgggaaggcaccgcgaacggcagggaacccagcggctgcgcctttggggtccggccccctgccctcccaggctggagccgggctcctggcggggcggcggcgaggcggaagcggtgggatgctgctgcccggccggcgtgcagtaggggcggacccccagcaggaggaccccggctgcggctgcggcgggggtgtaggtgggcggtaaagggggagcagagtcaggggaggttgggaagcatggcgactgtggggggaagggaggcagcggggaagccacaaaagcctacagcaggccgggcgggcgcggtggctcgcgcctgtaatcccagcactctgggaggccgaggcgggtggatcacgaggtcaggagctccagaccatcccggctaacagggtgaaagcccgtctctaggaaaaatagaacaaagtagccgggcgtggtggcgggcgcctgtaggcccagctactcgggaggctgaggccggggaatggcgtgaacccgggaggcggagcttgcagtgagccgagatggcgccactgcactccagcctgggcgacagggcgagactccgtctggaagaaaaggaaagaaacagcaaaaagccaaagaaaaagcctacagcacccggtattcccaggcggtctcccatccaagtactaaccaggcccgaccctgcttagcttccgagatcagacgagatcgggcgcgttcagggtggtatggccgtagacgctgaaggaggcgcctggctgccccaagagcccagcccggcccggccgtgcccgccggattgcagccgacaccgccagcccggggccgcggggctcggatcggggacccccgagccgctggcccgcggccttcccccggctcccgcgctcccgagcttccaccacatcgggcccgctcggagcagggagtgctccgaggcgtcagggcccagggcccacgatcctgggacgccctccggtcctccgccctgtcgcggaggcagcgttttggatccctcgccgcacaggggctcctgcgaggccccctcttgccccacccacccagagccgtcagggctggccgaaggcgaacagccggcccagccgcgcggggcctttctctcacaacgcccccaccacggtcgcttgtcccgaccaagacccggccgggggggcaagagggcgtggggtgtagcgggtcggggggtggccctgttttgccccgggctggcactagaggcggcggcctgatctcgggtgagagggcctgagagaaacccagacacaccccaccgccaccaggagcaaatccactcccccacacacagacacacccgggcgcgctcgcacgcgcgcgcgcggactcacacacacacacacagacacacagacacacacgcacacacgcacgcgcacacgcacgcacacacacacgcggcttgaaggagagcaaggacgagatggatggagagatagaaaccgagggagggagagagacagcgatcgagagagacaggggagggcgagagggaaggagacagacagagaggctgagaaagagagaggcacagagaaagagagagagagagacagagagacagagggaaaacgacaaaagtagcgcgaggtccagggggaaacccagaagagagaggcggagggagctagagagcgagagcgatagagccttagagaggaagcgcccggctccgttaggcagcgccctcttgagcaggccgggatagggtggagggggcttgggctgcgcccagaacacggggtccaggcggtccgtgcgagaggaccaacggagcgctgaggcgggcgttttcttggatgaattgcttgctttggaggtgggtttcgtaggctcctgcctttcttggcacctccctgtgctctgggtgccttgcggcgggccccgagatttgcagagcgcgcccgcccgtttggcgggagccgtggcaccgggcgggcccggaggcctgggtctctggcgagtcctcgggactggagtcgtcgacacgaagcggggggcattgggaatcccgggtgcacagggcctgttttcccggtggctggcgaagcaatgtccttcccccgggtaaagcagcccatgcgttccggagccgacgtcttggctggcgtctgtggcacccgctgcccctgcccgccccttcccccggtttggaagggtgcgacgacggcgcccgatgggtgaattgaatcgcctgggcgttccgggagcgggaaggcaccgcaaacggcagggaacccagcggctgcgcctttggggtccggccccctgccctcccaggctggagccgggctcctggcggggcggcggcgaggcggaagcggtgggatgctgctgcccggccggcgtgcagtaggggcggacccccagcaggaggaccccggctgcggctgcggcgggggtgtaggtgggcggtaaagggggagcagagtcaggggaggttgggaagcatggcgactgtggggggaagggaggcagcggggaagccacaaaagcctacagcaggccgggcgggcgcggtggctcgcgcctgtaatcccagcactctgggaggccgaggcgggtggatcacgaggtcaggagctccagaccatcccggctaacagggtgaaagcccgtctctaggaaaaatagaacaaagtagccgggcgtggtggcgggcgcct

SEQ ID NO: 1879798 - DNA, 4001 bp, Homo sapiens
cagggcccagggcccacgatcctgggacgccctccggtcctccgccctgtcgcggaggcagcgttttggatccctcgccgcacaggggctcctgcgaggccccctcttgccccacccacccagagccgtcagggctggccgaaggcgaacagccggcccagccgcgcggggcctttctctcacaacgcccccaccacggtcgcttgtcccgaccaagacccggccgggggggcaagagggcgtggggtgtagcgggtcggggggtggccctgttttgccccgggctggcactagaggcggcggcctgatctcgggtgagagggcctgagagaaacccagacacaccccaccgccaccaggagcaaatccactcccccacacacagacacacccgggcgcgctcgcacgcgcgcgcgcggactcacacacacacacacagacacacagacacacacgcacacacgcacgcgcacacgcacgcacacacacacgcggcttgaaggagagcaaggacgagatggatggagagatagaaaccgagggagggagagagacagcgatcgagagagacaggggagggcgagagggaaggagacagacagagaggctgagaaagagagaggcacagagaaagagagagagagagacagagagacagagggaaaacgacaaaagtagcgcgaggtccagggggaaacccagaagagagaggcggagggagctagagagcgagagcgatagagccttagagaggaagcgcccggctccgttaggcagcgccctcttgagcaggccgggatagggtggagggggcttgggctgcgcccagaacacggggtccaggcggtccgtgcgagaggaccaacggagcgctgaggcgggcgttttcttggatgaattgcttgctttggaggtgggtttcgtaggctcctgcctttcttggcacctccctgtgctctgggtgccttgcggcgggccccgagatttgcagagcgcgcccgcccgtttggcgggagccgtggcaccgggcgggcccggaggcctgggtctctggcgagtcctcgggactggagtcgtcgacacgaagcggggggcattgggaatcccgggtgcacagggcctgttttcccggtggctggcgaagcaatgtccttcccccgggtaaagcagcccatgcgttccggagccgacgtcttggctggcgtctgtggcacccgctgcccctgcccgccccttcccccggtttggaagggtgcgacgacggcgcccgatgggtgaattgaatcgcctgggcgttccgggagcgggaaggcaccgcaaacggcagggaacccagcggctgcgcctttggggtccggccccctgccctcccaggctggagccgggctcctggcggggcggcggcgaggcggaagcggtgggatgctgctgcccggccggcgtgcagtaggggcggacccccagcaggaggaccccggctgcggctgcggcgggggtgtaggtgggcggtaaagggggagcagagtcaggggaggttgggaagcatggcgactgtggggggaagggaggcagcggggaagccacaaaagcctacagcaggccgggcgggcgcggtggctcgcgcctgtaatcccagcactctgggaggccgaggcgggtggatcacgaggtcaggagctccagaccatcccggctaacagggtgaaagcccgtctctaggaaaaatagaacaaagtagccgggcgtggtggcgggcgcctgtaggcccagctactcgggaggctgaggccggggaatggcgtgaacccgggaggcggagcttgcagtgagccgagatggcgccactgcactccagcctgggcgacagggcgagactccgtctggaagaaaaggaaagaaacagcaaaaagccaaagaaaaagcctacagcacccggtattcccaggcggtctcccatccaagtactaaccaggcccgaccctgcttagcttccgagatcagacgagatcgggcgcgttcagggtggtatggccgtagacgctgaaggaggcgcctggctgccccaagagcccagcccggcccggccgtgcccgccggattgcagccgacaccgccagcccggggccgcggggctcggatcggggacccccgagccgctggcccgcggccttcccccggctcccgcgctcccgagcttccaccacatcgggcccgctcggagcagggagtgctccgaggcgtcagggcccagggcccacgatcctgggacgccctccggtcctccgccctgtcgcggaggcagcgttttggatccctcgccgcacaggggctcctgcgaggccccctcttgccccacccacccagagccgtcagggctggccgaaggcgaacagccggcccagccgcgcggggcctttctctcacaacgcccccaccacggtcgcttgtcccgaccaagacccggccgggggggcaagagggcgtggggtgtagcgggtcggggggtggccctgttttgccccgggctggcactagaggcggcggcctgatctcgggtgagagggcctgagagaaacccagacacaccccaccgccaccaggagcaaatccactcccccacacacagacacacccgggcgcgctcgcacgcgcgcgcgcggactcacacacacacacacagacacacagacacacacgcacacacgcacgcgcacacgcacgcacacacacacgcggcttgaaggagagcaaggacgagatggatggagagatagaaaccgagggagggagagagacagcgatcgagagagacaggggagggcgagagggaaggagacagacagagaggctgagaaagagagaggcacagagaaagagagagagagagacagagagacagagggaaaacgacaaaagtagcgcgaggtccagggggaaacccagaagagagaggcggagggagctagagagcgagagcgatagagccttagagaggaagcgcccggctccgttaggcagcgccctcttgagcaggccgggatagggtggagggggcttgggctgcgcccagaacacgggggccaggcggtccgtgcgagaggaccaacggagcgctgaggcgggcgttttcttggatgaattgcttgctttggaggtgggtttcgtaggctcctgcctttcttggcacctccctgtgctctgggtgccttgcggcgggccccgagatttgcagagcgcgcccgcccgtttggcgggagccgtggcaccgggcgggcccggaggcctgggtctctggcgagtcctcgggactggagtcgtcgacacgaagcggggggcattgggaatcccgggtgcacagggcctgttttcccggtggctggcgaagcaatgtccttcccccgggtaaagcagcccatgcgttccggagccgacgtcttggctggcgtctgtggcacccgctgcccctgcccgccccttcccccggtttggaagggtgcgacgacggcgcccgatgggtgaattgaatcgcctgggcgttccgggagcgggaaggcaccgcgaacggcagggaacccagcggctgcgcctttggggtccggccccctgccctcccaggctggagccgggctcctggcggggcggcggcgaggcggaagcggtgggatgctgctgcccggccggcgtgcagtaggggcggacccccagcaggaggaccccggctgcggctgcggcgggggtgtaggtgggcggtaaagggggagcagagtcaggggaggttgggtagcatggcgactgtggggggaagggaggcagcggggaagccacaaaagcctacagcaggccgggcgggcgcggtggctcgcgcctgtaatcccagcactctgggaggccgaggcgggtggatcacgaggtcaggagctccagaccatcccggctaacagggtgaaagcccgtctctaggaaaaatagaacaaagtagccgggcgtggtggcgggcgcct

SEQ ID NO: 1879799 - DNA, 4001 bp, Homo sapiens
cagggcccagggcccacgatcctgggacgccctccggtcctccgccctgtcgcggaggcagcgttttggatccctcgccgcacaggggctcctgcgaggccccctcttgccccacccacccagagccgtcagggctggccgaaggcgaacagccggcccagccgcgcggggcctttctctcacaacgcccccaccacggtcgcttgtcccgaccaagacccggccgggggggcaagagggcgtggggtgtagcgggtcggggggtggccctgttttgccccgggctggcactagaggcggcggcctgatctcgggtgagagggcctgagagaaacccagacacaccccaccgccaccaggagcaaatccactcccccacacacagacacacccgggcgcgctcgcacgcgcgcgcgcggactcacacacacacacacagacacacagacacacacgcacacacgcacgcgcacacgcacgcacacacacacgcggcttgaaggagagcaaggacgagatggatggagagatagaaaccgagggagggagagagacagcgatcgagagagacaggggagggcgagagggaaggagacagacagagaggctgagaaagagagaggcacagagaaagagagagagagagacagagagacagagggaaaacgacaaaagtagcgcgaggtccagggggaaacccagaagagagaggcggagggagctagagagcgagagcgatagagccttagagaggaagcgcccggctccgttaggcagcgccctcttgagcaggccgggatagggtggagggggcttgggctgcgcccagaacacgggggccaggcggtccgtgcgagaggaccaacggagcgctgaggcgggcgttttcttggatgaattgcttgctttggaggtgggtttcgtaggctcctgcctttcttggcacctccctgtgctctgggtgccttgcggcgggccccgagatttgcagagcgcgcccgcccgtttggcgggagccgtggcaccgggcgggcccggaggcctgggtctctggcgagtcctcgggactggagtcgtcgacacgaagcggggggcattgggaatcccgggtgcacagggcctgttttcccggtggctggcgaagcaatgtccttcccccgggtaaagcagcccatgcgttccggagccgacgtcttggctggcgtctgtggcacccgctgcccctgcccgccccttcccccggtttggaagggtgcgacgacggcgcccgatgggtgaattgaatcgcctgggcgttccgggagcgggaaggcaccgcgaacggcagggaacccagcggctgcgcctttggggtccggccccctgccctcccaggctggagccgggctcctggcggggcggcggcgaggcggaagcggtgggatgctgctgcccggccggcgtgcagtaggggcggacccccagcaggaggaccccggctgcggctgcggcgggggtgtaggtgggcggtaaagggggagcagagtcaggggaggttgggtagcatggcgactgtggggggaagggaggcagcggggaagccacaaaagcctacagcaggccgggcgggcgcggtggctcgcgcctgtaatcccagcactctgggaggccgaggcgggtggatcacgaggtcaggagctccagaccatcccggctaacagggtgaaagcccgtctctaggaaaaatagaacaaagtagccgggcgtggtggcgggcgcctgtaggcccagctactcgggaggctgaggccggggaatggcgtgaacccgggaggcggagcttgcagtgagccgagatggcgccactgcactccagcctgggcgacagggcgagactccgtctggaagaaaaggaaagaaacagcaaaaagccaaagaaaaagcctacagcacccggtattcccaggcggtctcccatccaagtactaaccaggcccgaccctgcttagcttccgagatcagacgagatcgggcgcgttcagggtggtatggccgtagacgctgaaggaggcgcctggctgccccaagagcccagcccggcccggccgtgcccgccggattgcagccgacaccgccagcccggggccgcggggctcggatcggggacccccgagccgctggcccgcggccttcccccggctcccgcgctcccgagcttccaccacatcgggcccgctcggagcagggagtgctccgaggcgtcagggcccagggcccacgatcctgggacgccctccggtcctccgccctgtcgcggaggcagcgttttggatccctcgccgcacaggggctcctgcgaggccccctcttgccccacccacccagagccgtcagggctggccgaaggcgaacagccggcccagccgcgcggggcctttctctcacaacgcccccaccacggtcgcttgtcccgaccaagacccggccgggggggcaagagggcgtggggtgtagcgggtcggggggtggccctgttttgccccgggctggcactagaggcggcggcctgatctcgggtgagagggcctgagagaaacccagacacaccccaccgccaccaggagcaaatccactcccccacacacagacacacccgggcgcgctcgcacgcgcgcgcgcggactcacacacacacacacagacacacagacacacacgcacacacgcacgcgcacacgcacgcacacacacacgcggcttgaaggagagcaaggacgagatggatggagagatagaaaccgagggagggagagagacagcgatcgagagagacaggggagggcgagagggaaggagacagacagagaggctgagaaagagagaggcacagagaaagagagagagagagacagagagacagagggaaaacgacaaaagtagcgcgaggtccagggggaaacccagaagagagaggcggagggagctagagagcgagagcgatagagccttagagaggaagcgcccggctccgttaggcagcgccctcttgagcaggccgggatagggtggagggggcttgggctgcgcccagaacacggggtccaggcggtccgtgcgagaggaccaacggagcgctgaggcgggcgttttcttggatgaattgcttgctttggaggtgggtttcgtaggctcctgcctttcttggcacctccctgtgctctgggtgccttgcggcgggccccgagatttgcagagcgcgcccgcccgtttggcgggagccgtggcaccgggcgggcccggaggcctgggtctctggcgagtcctcgggactggagtcgtcgacacgaagcggggggcattgggaatcccgggtgcacagggcctgttttcccggtggctggcgaagcaatgtccttcccccgggtaaagcagcccatgcgttccggagccgacgtcttggctggcgtctgtggcacccgctgcccctgcccgccccttcccccggtttggaagggtgcgacgacggcgcccgatgggtgaattgaatcgcctgggcgttccgggagcgggaaggcaccgcgaacggcagggaacccagcggctgcgcctttggggtccggccccctgccctcccaggctggagccgggctcctggcggggcggcggcgaggcggaagcggtgggatgctgctgccgggccggcgtgcagtaggggcggacccccagcaggaggaccccggctgcggctgcggcgggggtgtaggtgggcggtaaagggggagcagagtcaggggaggttgggaagcatggcgactgtggggggaagggaggcagcggggaagccacaaaagcctacagcaggccgggcgggcgcggtggctcgcgcctgtaatcccagcactctgggaggccgaggcgggtggatcacgaggtcaggagctccagaccatcccggctaacagggtgaaagcccgtctctaggaaaaatagaacaaagtagccgggcgtggtggcgggcgcct

SEQ ID NO: 1879800 - DNA, 4001 bp, Homo sapiens
cagggcccagggcccacgatcctgggacgccctccggtcctccgccctgtcgcggaggcagcgttttggatccctcgccgcacaggggctcctgcgaggccccctcttgccccacccacccagagccgtcagggctggccgaaggcgaacagccggcccagccgcgcggggcctttctctcacaacgcccccaccacggtcgcttgtcccgaccaagacccggccgggggggcaagagggcgtggggtgtagcgggtcggggggtggccctgttttgccccgggctggcactagaggcggcggcctgatctcgggtgagagggcctgagagaaacccagacacaccccaccgccaccaggagcaaatccactcccccacacacagacacacccgggcgcgctcgcacgcgcgcgcgcggactcacacacacacacacagacacacagacacacacgcacacacgcacgcgcacacgcacgcacacacacacgcggcttgaaggagagcaaggacgagatggatggagagatagaaaccgagggagggagagagacagcgatcgagagagacaggggagggcgagagggaaggagacagacagagaggctgagaaagagagaggcacagagaaagagagagagagagacagagagacagagggaaaacgacaaaagtagcgcgaggtccagggggaaacccagaagagagaggcggagggagctagagagcgagagcgatagagccttagagaggaagcgcccggctccgttaggcagcgccctcttgagcaggccgggatagggtggagggggcttgggctgcgcccagaacacggggtccaggcggtccgtgcgagaggaccaacggagcgctgaggcgggcgttttcttggatgaattgcttgctttggaggtgggtttcgtaggctcctgcctttcttggcacctccctgtgctctgggtgccttgcggcgggccccgagatttgcagagcgcgcccgcccgtttggcgggagccgtggcaccgggcgggcccggaggcctgggtctctggcgagtcctcgggactggagtcgtcgacacgaagcggggggcattgggaatcccgggtgcacagggcctgttttcccggtggctggcgaagcaatgtccttcccccgggtaaagcagcccatgcgttccggagccgacgtcttggctggcgtctgtggcacccgctgcccctgcccgccccttcccccggtttggaagggtgcgacgacggcgcccgatgggtgaattgaatcgcctgggcgttccgggagcgggaaggcaccgcgaacggcagggaacccagcggctgcgcctttggggtccggccccctgccctcccaggctggagccgggctcctggcggggcggcggcgaggcggaagcggtgggatgctgctgccgggccggcgtgcagtaggggcggacccccagcaggaggaccccggctgcggctgcggcgggggtgtaggtgggcggtaaagggggagcagagtcaggggaggttgggaagcatggcgactgtggggggaagggaggcagcggggaagccacaaaagcctacagcaggccgggcgggcgcggtggctcgcgcctgtaatcccagcactctgggaggccgaggcgggtggatcacgaggtcaggagctccagaccatcccggctaacagggtgaaagcccgtctctaggaaaaatagaacaaagtagccgggcgtggtggcgggcgcctgtaggcccagctactcgggaggctgaggccggggaatggcgtgaacccgggaggcggagcttgcagtgagccgagatggcgccactgcactccagcctgggcgacagggcgagactccgtctggaagaaaaggaaagaaacagcaaaaagccaaagaaaaagcctacagcacccggtattcccaggcggtctcccatccaagtactaaccaggcccgaccctgcttagcttccgagatcagacgagatcgggcgcgttcagggtggtatggccgtagacgctgaaggaggcgcctggctgccccaagagcccagcccggcccggccgtgcccgccggattgcagccgacaccgccagcccggggccgcggggctcggatcggggacccccgagccgctggcccgcggccttcccccagctcccgcgctcccgagcttccaccacatcgggcccgctcggagcagggagtgctccgaggcgtcagggcccagggcccacgatcctgggacgccctccggtcctccgccctgtcgcggaggcagcgttttggatccctcgccgcacaggggctcctgcgaggccccctcttgccccacccacccagagccgtcagggctggccgaaggcgaacagccggcccagccgcgcggggcctttctctcacaacgcccccaccacggtcgcttgtcccgaccaagacccggccgggggggcaagagggcgtggggtgtagcgggtcggggggtggccctgttttgccccgggctggcactagaggcggcggcctgatctcgggtgagagggcctgagagaaacccagacacaccccaccgccaccaggagcaaatccactcccccacacacagacacacccgggcgcgctcgcacgcgcgcgcgcggactcacacacacacacacagacacacagacacacacgcacacacgcacgcgcacacgcacgcacacacacacgcggcttgaaggagagcaaggacgagatggatggagagatagaaaccgagggagggagagagacagcgatcgagagagacaggggagggcgagagggaaggagacagacagagaggctgagaaagagagaggcacagagaaagagagagagagagacagagagacagagggaaaacgacaaaagtagcgcgaggtccagggggaaacccagaagagagaggcggagggagctagagagcgagagcgatagagccttagagaggaagtgcccggctccgttaggcagcgccgtcttgagcaggtcgggatagggtggagggggcttgggctgcgcccagaacacgggggccaggcggtccgtgcgagaggaccaacggagcgctgaggcgggcgttttcttggatgaattgcttgctttggaggtgggtttcgtaggctcctgcctttcttggcagctccctgtgctctgggtgccttgcggcgggccccgagatttgcagagcgcgcccgcccgtttggcgggagccgtggcaccgggcgggcccggaggcctgggtctctggcgagtcctcgggactggagtcgtcgacacgaagcggggggcattgggaatcccgggtgcacagggcctgttttcccggtggctggcgaagcaatgtccttcccccgggtaaagcagcccatgcgttccggagccgacgtcttggctggcgtctgtggcacccgctgcccctgcccgccccttcccccggtttggaagggtgcgacgacggcgcccgatgggtgaattgaatcgcctgggcgttccgggagcgggaaggcaccgcgaacggcagggaacccagcggctgcgcctttggggtccggccccctgccctcccaggctggagccgggctcctggcggggcggcggcgaggcggaagcggtgggatgctgctgccgggccggcgtgcagtaggggcggacccccagcaggaggaccccggctgcggctgcggcgggggtgtaggtgggcggtaaagggggagcagagtcaggggaggttgggtagcatggcgactgtggggggaagggaggcagcggggaagccacaaaagcctacagcaggccgggcgggcgcggtggctcgcgcctgtaatcccagcactctgggaggccgaggcgggtggatcacgaggtcaggagctccagaccatcccggctaacagggtgaaagcccgtctctaggaaaaatagaacaaagtagccgggcgtggtggcgggcgcct

SEQ ID NO: 1879801 - DNA, 4001 bp, Homo sapiens
cagggcccagggcccacgatcctgggacgccctccggtcctccgccctgtcgcggaggcagcgttttggatccctcgccgcacaggggctcctgcgaggccccctcttgccccacccacccagagccgtcagggctggccgaaggcgaacagccggcccagccgcgcggggcctttctctcacaacgcccccaccacggtcgcttgtcccgaccaagacccggccgggggggcaagagggcgtggggtgtagcgggtcggggggtggccctgttttgccccgggctggcactagaggcggcggcctgatctcgggtgagagggcctgagagaaacccagacacaccccaccgccaccaggagcaaatccactcccccacacacagacacacccgggcgcgctcgcacgcgcgcgcgcggactcacacacacacacacagacacacagacacacacgcacacacgcacgcgcacacgcacgcacacacacacgcggcttgaaggagagcaaggacgagatggatggagagatagaaaccgagggagggagagagacagcgatcgagagagacaggggagggcgagagggaaggagacagacagagaggctgagaaagagagaggcacagagaaagagagagagagagacagagagacagagggaaaacgacaaaagtagcgcgaggtccagggggaaacccagaagagagaggcggagggagctagagagcgagagcgatagagccttagagaggaagtgcccggctccgttaggcagcgccgtcttgagcaggtcgggatagggtggagggggcttgggctgcgcccagaacacgggggccaggcggtccgtgcgagaggaccaacggagcgctgaggcgggcgttttcttggatgaattgcttgctttggaggtgggtttcgtaggctcctgcctttcttggcagctccctgtgctctgggtgccttgcggcgggccccgagatttgcagagcgcgcccgcccgtttggcgggagccgtggcaccgggcgggcccggaggcctgggtctctggcgagtcctcgggactggagtcgtcgacacgaagcggggggcattgggaatcccgggtgcacagggcctgttttcccggtggctggcgaagcaatgtccttcccccgggtaaagcagcccatgcgttccggagccgacgtcttggctggcgtctgtggcacccgctgcccctgcccgccccttcccccggtttggaagggtgcgacgacggcgcccgatgggtgaattgaatcgcctgggcgttccgggagcgggaaggcaccgcgaacggcagggaacccagcggctgcgcctttggggtccggccccctgccctcccaggctggagccgggctcctggcggggcggcggcgaggcggaagcggtgggatgctgctgccgggccggcgtgcagtaggggcggacccccagcaggaggaccccggctgcggctgcggcgggggtgtaggtgggcggtaaagggggagcagagtcaggggaggttgggtagcatggcgactgtggggggaagggaggcagcggggaagccacaaaagcctacagcaggccgggcgggcgcggtggctcgcgcctgtaatcccagcactctgggaggccgaggcgggtggatcacgaggtcaggagctccagaccatcccggctaacagggtgaaagcccgtctctaggaaaaatagaacaaagtagccgggcgtggtggcgggcgcctgtaggcccagctactcgggaggctgaggccggggaatggcgtgaacccgggaggcggagcttgcagtgagccgagatggcgccactgcactccagcctgggcgacagggcgagactccgtctggaagaaaaggaaagaaacagcaaaaagccaaagaaaaagcctacagcacccggtattcccaggcggtctcccatccaagtactaaccaggcccgaccctgcttagcttccgagatcagacgagatcgggcgcgttcagggtggtatggccgtagacgctgaaggaggcgcctggctgccccaagagcccagcccggcccggccgtgcccgccggattgcagccgacaccgccagcccggggccgcggggctcggatcggggacccccgagccgctggcccgcggccttcccccggctcccgcgctcccgagcttccaccacatcgggcccgctcggagcagggagtgctccgaggcgtcagggcccagggcccacgatcctgggacgccctccggtcctccgccctgtcgcggaggcagcgttttggatccctcgccgcacaggggctcctgcgaggccccctcttgccccacccacccagagccgtcagggctggccgaaggcgaacagccggcccagccgcgcggggcctttctctcacaacgcccccaccacggtcgcttgtcccgaccaagacccggccgggggggcaagagggcgtggggtgtagcgggtcggggggtggccctgttttgccccgggctggcactagaggcggcggcctgatctcgggtgagagggcctgagagaaacccagacacaccccaccgccaccaggagcaaatccactcccccacacacagacacacccgggcgcgctcgcacccgcgcgcgcggacacacacacacacacagacacacacgcacacacgcacgcgcacacgcacgcacacacacacgcggcttgaaggagagcaaggacgagatggatggagagatagaaaccgagggagggagagagacagcgatcgagagagacaggggagggcgagagggaaggagacagacagagaggctgagaaagagagaggcacagagaaagagagagagagagacagagagacagagggaaaacgacaaaagtagcgcgaggtccagggggaaacccagaagagagaggcggagggagctagagagcgagagcgatagagccttagagaggaagcgcccggctccgttaggcagcgccctcttgagcaggccgggatagggtggagggggcttgggctgcgcccagaacacggggtccaggcggtccgtgcgagaggaccaacggagcgctgaggcgggcgttttcttggatgaattgcttgctttggaggtgggtttcgtaggctcctgcctttcttggcacctccctgtgctctgggtgccttgcggcgggccccgagatttgcagagcgcgcccgcccgtttggcgggagccgtggcaccgggcgggcccggaggcctgggtctctggcgagtcctcgggactggagtcgtcgacacgcagcgggagggcattgggaatcccgggtgcacagggcctgttttcccggtggctggcgaagcaatgtccttcccccgggtaaagcagcccatgcgttctggagccgacgtcttggctggcgtctgtggcacccgctgcccctgcccgccccttcccccggtttggaagggtgcgacgacggcgcccgatgggtgaattgaatcacctgggcgttccgggagcgggaaggcaccgcgaacggcagggaacccagcggctgcgcctttggggtccggccccctgccctcccaggctggagccgggctcctggcggagcggtgggatgctgctgccgggccggcgtgcagtaggggcggacccccagcaggaggaccccggctgcggctgcggcgggggtgtaggtgggcggtaaaggcggagcagagtcaggggaggttgggaagcatggcgactgtggggggaagggaggcagccgggaagccacaaaagcctacagcaggccgggcgggcgcggtggctcgcgcctgtaatcccagcactctgggaggccgaggcgggtggatcacgaggtcaggagctccagaccatcccggctaacagggtgaaagcccgtctctaggaaaaatagaacaaagtagccgggcgtggtggcgggcgcctgtaggcccagctactcgggaggctga

SEQ ID NO: 1879802 - DNA, 4001 bp, Homo sapiens
tcggagcagggagtgctccgaggcgtcagggcccagggcccacgatcctgggacgccctccggtcctccgccctgtcgcggaggcagcgttttggatccctcgccgcacaggggctcctgcgaggccccctcttgccccacccacccagagccgtcagggctggccgaaggcgaacagccggcccagccgcgcggggcctttctctcacaacgcccccaccacggtcgcttgtcccgaccaagacccggccgggggggcaagagggcgtggggtgtagcgggtcggggggtggccctgttttgccccgggctggcactagaggcggcggcctgatctcgggtgagagggcctgagagaaacccagacacaccccaccgccaccaggagcaaatccactcccccacacacagacacacccgggcgcgctcgcacccgcgcgcgcggacacacacacacacacagacacacacgcacacacgcacgcgcacacgcacgcacacacacacgcggcttgaaggagagcaaggacgagatggatggagagatagaaaccgagggagggagagagacagcgatcgagagagacaggggagggcgagagggaaggagacagacagagaggctgagaaagagagaggcacagagaaagagagagagagagacagagagacagagggaaaacgacaaaagtagcgcgaggtccagggggaaacccagaagagagaggcggagggagctagagagcgagagcgatagagccttagagaggaagcgcccggctccgttaggcagcgccctcttgagcaggccgggatagggtggagggggcttgggctgcgcccagaacacggggtccaggcggtccgtgcgagaggaccaacggagcgctgaggcgggcgttttcttggatgaattgcttgctttggaggtgggtttcgtaggctcctgcctttcttggcacctccctgtgctctgggtgccttgcggcgggccccgagatttgcagagcgcgcccgcccgtttggcgggagccgtggcaccgggcgggcccggaggcctgggtctctggcgagtcctcgggactggagtcgtcgacacgcagcgggagggcattgggaatcccgggtgcacagggcctgttttcccggtggctggcgaagcaatgtccttcccccgggtaaagcagcccatgcgttctggagccgacgtcttggctggcgtctgtggcacccgctgcccctgcccgccccttcccccggtttggaagggtgcgacgacggcgcccgatgggtgaattgaatcacctgggcgttccgggagcgggaaggcaccgcgaacggcagggaacccagcggctgcgcctttggggtccggccccctgccctcccaggctggagccgggctcctggcggagcggtgggatgctgctgccgggccggcgtgcagtaggggcggacccccagcaggaggaccccggctgcggctgcggcgggggtgtaggtgggcggtaaaggcggagcagagtcaggggaggttgggaagcatggcgactgtggggggaagggaggcagccgggaagccacaaaagcctacagcaggccgggcgggcgcggtggctcgcgcctgtaatcccagcactctgggaggccgaggcgggtggatcacgaggtcaggagctccagaccatcccggctaacagggtgaaagcccgtctctaggaaaaatagaacaaagtagccgggcgtggtggcgggcgcctgtaggcccagctactcgggaggctgaggccggggaatggcgtgaacccgggaggcggagcttgcagtgagccgagatggcgccactgcactccagcctgggcgacagggcgagactccgtctggaagaaaaggaaagaaacagcaaaaagccaaagaaaaagcctacagcacccggtattcccaggcggtctcccatccaagtactaaccaggcccgaccctgcttagcttccgagatcagacgagatcgggcgcgttcagggtggtatggccgtagacgctgaaggaggcgcctggctgccccaagagcccagcccggcccggccgtgcccgccggattgcagccgacaccgccagcccggggccgcggggctcggatcggggacccccgagccgctggcccgcggccttcccccagctcccgcgctcccgagcttccaccacatcgggcccgctcggagcagggagtgctccgaggcgtcagggcccagggcccacgatcctgggacgccctccggtcctccgccctgtcgcggaggcagcgttttggatccctcgccgcacaggggctcctgcgaggccccctcttgccccacccacccagagccgtcagggctggccgaaggcgaacagccggcccagccgcgcggggcctttctctcacaacgcccccaccacggtcgcttgtcccgaccaagacccggccgggggggcaagagggcgtggggtgtagcgggtcggggggtggccctgttttgccccgggctggcactagaggcggcggcctgatctcgggtgagagggcctgagagaaacccagacacaccccaccgccaccaggagcaaatccactcccccacacacagacacacccgggcgcgctcgcacgcgcgcgcgcggactcacacacacacacacacacgcacgcgcacacgcacgcacacacacacgcggcttgaaggagagcaaggacgagatggatggagagatagaaaccgagggagggagagagacagcgatcgagagagacaggggagggcgagagggaaggagacagacagagaggctgagaaagagagaggcacagagaaagagagagagagagacagagagacagagggaaaacgacagaagtagcgcgaggtccagggggaaacccagaagagagaggcggagggagctagagagcgagagcgatagagccttagagaggaagcgcccggctccgttaggcagcgccctcttgagcaggccgggatagggtggagggggcttgggctgcgcccagaacacgggggccaggcggtccgtgcgagaggaccaacggagcgctgaggcgggcgttttcttggatgaattgcttgctttggaggtgggtttcgtaggctcctgcctttcttggcacctccctgtgctctgggtgccttgcggcgggccccgagatttgcagagcgcgcccgcccgtttggcgggagccgtggcaccgggcgggcccggaggcctgggtctctggcgagtcctcgggactggagtcgtcgacacgcagcgggagggcattgggaatcccgggtgcacagggcctgttttcccggtggctggcgaagcaatgtccttcccccgggtaaagcagcccatgcgttccggagccgacgtcttggctggcgtctgtggcacccgctgcccctgcccgccccttcccccggtttggaagggtgcgacgacggcgcccgatgggtgaattgaatcgcctgggcgttccgggagcgggaaggcaccgcgaacggcagggaacccagcggctgcgcctttggggtccggccccctgccctcccaggctggagccgggctcctggcggggcggcggcgaggcggaagcggtgggatgctgctgcccggccggcgtgcagtaggggcggacccccagcaggaggaccccggctgcggctgcggcgggggtgtaggtgggcggtaaagggggagcagagtcaggggaggttgggtagcatggcgactgtggggggaagggaggcagcggggaagccacaaaagcctacagcaggccgggcgggcgcggtggctcgcgcctgtaatcccagcactctgggaggccgaggcgggtggatcacgaggtcaggagctccagaccatcccggctaacagggtgaaagcccgtctctaggaaaaatagaacaaagtagccgggcgtggtggcgggcgcctgtaggcccagctactcgggag

SEQ ID NO: 1879803 - DNA, 4001 bp, Homo sapiens
gcagggagtgctccgaggcgtcagggcccagggcccacgatcctgggacgccctccggtcctccgccctgtcgcggaggcagcgttttggatccctcgccgcacaggggctcctgcgaggccccctcttgccccacccacccagagccgtcagggctggccgaaggcgaacagccggcccagccgcgcggggcctttctctcacaacgcccccaccacggtcgcttgtcccgaccaagacccggccgggggggcaagagggcgtggggtgtagcgggtcggggggtggccctgttttgccccgggctggcactagaggcggcggcctgatctcgggtgagagggcctgagagaaacccagacacaccccaccgccaccaggagcaaatccactcccccacacacagacacacccgggcgcgctcgcacgcgcgcgcgcggactcacacacacacacacacacgcacgcgcacacgcacgcacacacacacgcggcttgaaggagagcaaggacgagatggatggagagatagaaaccgagggagggagagagacagcgatcgagagagacaggggagggcgagagggaaggagacagacagagaggctgagaaagagagaggcacagagaaagagagagagagagacagagagacagagggaaaacgacagaagtagcgcgaggtccagggggaaacccagaagagagaggcggagggagctagagagcgagagcgatagagccttagagaggaagcgcccggctccgttaggcagcgccctcttgagcaggccgggatagggtggagggggcttgggctgcgcccagaacacgggggccaggcggtccgtgcgagaggaccaacggagcgctgaggcgggcgttttcttggatgaattgcttgctttggaggtgggtttcgtaggctcctgcctttcttggcacctccctgtgctctgggtgccttgcggcgggccccgagatttgcagagcgcgcccgcccgtttggcgggagccgtggcaccgggcgggcccggaggcctgggtctctggcgagtcctcgggactggagtcgtcgacacgcagcgggagggcattgggaatcccgggtgcacagggcctgttttcccggtggctggcgaagcaatgtccttcccccgggtaaagcagcccatgcgttccggagccgacgtcttggctggcgtctgtggcacccgctgcccctgcccgccccttcccccggtttggaagggtgcgacgacggcgcccgatgggtgaattgaatcgcctgggcgttccgggagcgggaaggcaccgcgaacggcagggaacccagcggctgcgcctttggggtccggccccctgccctcccaggctggagccgggctcctggcggggcggcggcgaggcggaagcggtgggatgctgctgcccggccggcgtgcagtaggggcggacccccagcaggaggaccccggctgcggctgcggcgggggtgtaggtgggcggtaaagggggagcagagtcaggggaggttgggtagcatggcgactgtggggggaagggaggcagcggggaagccacaaaagcctacagcaggccgggcgggcgcggtggctcgcgcctgtaatcccagcactctgggaggccgaggcgggtggatcacgaggtcaggagctccagaccatcccggctaacagggtgaaagcccgtctctaggaaaaatagaacaaagtagccgggcgtggtggcgggcgcctgtaggcccagctactcgggaggctgaggccggggaatggcgtgaacccgggaggcggagcttgcagtgagccgagatggcgccactgcactccagcctgggcgacagggcgagactccgtctggaagaaaaggaaagaaacagcaaaaagccaaagaaaaagcctacagcacccggtattcccaggcggtctcccatccaagtactaaccaggcccgaccctgcttagcttccgagatcagacgagatcgggcgcgttcagggtggtatggccgtagacgctgaaggaggcgcctggctgccccaagagcccagcccggcccggccgtgcccgccggattgcagccgacaccgccagcccggggccgcggggctcggatcggggacccccgagccgctggcccgcggccttcccccagctcccgcgctcccgagcttccaccacatcgggcccgctcggagcagggagtgctccgaggcgtcagggcccagggcccacgatcctgggacgccctccggtcctccgccctgtcgcggaggcagcgttttggatccctcgccgcacaggggctcctgcgaggccccctcttgccccacccacccagagccgtcagggctggccgaaggcgaacagccggcccagccgcgcggggcctttctctcacaacgcccccaccacggtcgcttgtcccgaccaagacccggccgggggggcaagagggcgtggggtgtagcgggtcggggggtggccctgttttgccccgggctggcactagaggcggcggcctgatctcgggtgagagggcctgagagaaacccagacacaccccaccgccaccaggagcaaatccactcccccacacacagacacacccgggcgcgctcgcacgcgcgcgcgcggactcacacacacacacacagacacacagacacacacgcacacacgcacgcgcacacgcacgcacacacacacgcggcttgaaggagagcaaggacgagatggatggagagatagaaaccgagggagggagagagacagcgatcgagagagacaggggagggcgagagggaaggagacagacagagaggctgagaaagagagaggcacagagaaagagagagagagagacagagagacagagggaaaacgacaaaagtagcgcgaggtccagggggaaacccagaagagagaggcggagggagctagagagcgagagcgatagagccttagagaggaagcgcccggctccgttaggcagcgccctcttgagcaggccgggatagggtggagggggcttgggctgcgcccagaacacggggtccaggcggtccgtgcgagaggaccaacggagcgctgaggcgggcgttttcttggatgaattgcttgctttggaggtgggtttcgtaggctcctgcctttcttggcacctccctgtgctctgggtgccttgcggcgggccccgagatttgcagagcgcgcccgcccgtttggcgggagccgtggcaccgggcgggcccggaggcctgggtctctggcgagtcctcgggactggagtcgtcgacacgcagcgggagggcattgggaatcccgggtgcacagggcctgttttcccggtggctggcgaagcaatgtccttcccccgggtaaagcagcccatgcgttccggagccgacgtcttggctggcgtctgtggcacccgctgcccctgcccgccccttcccccggtttggaagggtgcgacgacggcgcccgatgggtgaattgaatcgcctgggcgttccgggagcgggaaggcaccgcgaacggcagggaacccagcggctgcgcctttggggtccggccccctgccctcccaggctggagccgggctcctggcggggcggcggcgaggcggaagcggtgggatgctgctgccgggccggcgtgcagtaggggcggacccccagcaggaggaccccggctgcggctgcggcgggggtgtaggtgggcggtaaagggggagcagagtcaggggaggttgggaagcatggcgactgtggggggaagggaggcagcggggaagccacaaaagcctacagcaggccgggcgggcgcggtggctcgcgcctgtaatcccagcactctgggaggccgaggcgggtggatcacgaggtcaggagctccagaccatcccggctaacagggtgaaagcccgtctctaggaaaaatagaacaaagtagccgggcgtggtggcgggcgcc

SEQ ID NO: 1879804 - DNA, 4001 bp, Homo sapiens
agggcccagggcccacgatcctgggacgccctccggtcctccgccctgtcgcggaggcagcgttttggatccctcgccgcacaggggctcctgcgaggccccctcttgccccacccacccagagccgtcagggctggccgaaggcgaacagccggcccagccgcgcggggcctttctctcacaacgcccccaccacggtcgcttgtcccgaccaagacccggccgggggggcaagagggcgtggggtgtagcgggtcggggggtggccctgttttgccccgggctggcactagaggcggcggcctgatctcgggtgagagggcctgagagaaacccagacacaccccaccgccaccaggagcaaatccactcccccacacacagacacacccgggcgcgctcgcacgcgcgcgcgcggactcacacacacacacacagacacacagacacacacgcacacacgcacgcgcacacgcacgcacacacacacgcggcttgaaggagagcaaggacgagatggatggagagatagaaaccgagggagggagagagacagcgatcgagagagacaggggagggcgagagggaaggagacagacagagaggctgagaaagagagaggcacagagaaagagagagagagagacagagagacagagggaaaacgacaaaagtagcgcgaggtccagggggaaacccagaagagagaggcggagggagctagagagcgagagcgatagagccttagagaggaagcgcccggctccgttaggcagcgccctcttgagcaggccgggatagggtggagggggcttgggctgcgcccagaacacggggtccaggcggtccgtgcgagaggaccaacggagcgctgaggcgggcgttttcttggatgaattgcttgctttggaggtgggtttcgtaggctcctgcctttcttggcacctccctgtgctctgggtgccttgcggcgggccccgagatttgcagagcgcgcccgcccgtttggcgggagccgtggcaccgggcgggcccggaggcctgggtctctggcgagtcctcgggactggagtcgtcgacacgcagcgggagggcattgggaatcccgggtgcacagggcctgttttcccggtggctggcgaagcaatgtccttcccccgggtaaagcagcccatgcgttccggagccgacgtcttggctggcgtctgtggcacccgctgcccctgcccgccccttcccccggtttggaagggtgcgacgacggcgcccgatgggtgaattgaatcgcctgggcgttccgggagcgggaaggcaccgcgaacggcagggaacccagcggctgcgcctttggggtccggccccctgccctcccaggctggagccgggctcctggcggggcggcggcgaggcggaagcggtgggatgctgctgccgggccggcgtgcagtaggggcggacccccagcaggaggaccccggctgcggctgcggcgggggtgtaggtgggcggtaaagggggagcagagtcaggggaggttgggaagcatggcgactgtggggggaagggaggcagcggggaagccacaaaagcctacagcaggccgggcgggcgcggtggctcgcgcctgtaatcccagcactctgggaggccgaggcgggtggatcacgaggtcaggagctccagaccatcccggctaacagggtgaaagcccgtctctaggaaaaatagaacaaagtagccgggcgtggtggcgggcgcctgtaggcccagctactcgggaggctgaggccggggaatggcgtgaacccgggaggcggagcttgcagtgagccgagatggcgccactgcactccagcctgggcgacagggcgagactccgtctggaagaaaaggaaagaaacagcaaaaagccaaagaaaaagcctacagcacccggtattcccaggcggtctcccatccaagtactaaccaggcccgaccctgcttagcttccgagatcagacgagatcgggcgcgttcagggtggtatggccgtagacgctgaaggaggcgcctggctgccccaagagcccagcccggcccggccgtgcccgccggattgcagccgacaccgccagcccggggccgcggggctcggatcggggacccccgagccgctggcccgcggccttcccccggctcccgcgctcccgagcttccaccacatcgggcccgctcggagcagggagtgctccgaggcgtcagggcccagggcccacgatcctgggacgccctccggtcctccgccctgtcgcggaggcagcgttttggatccctcgccgcacaggggctcctgcgaggccccctcttgccccacccacccagagccgtcagggctggccgaaggcgaacagccggcccagccgcgcggggcctttctctcacaacgcccccaccacggtcgcttgtcccgaccaagacccggccgggggggcaagagggcgtggggtgtagcgggtcggggggtggccctgttttgccccgggctggcactagaggcggcggcctgatctcgggtgagagggcctgagagaaacccagacacaccccaccgccaccaggagcaaatccactcccccacacacagacacacccgggcgcgctcgcacgcgcgcgcgcggactcacacacacacacacagacacacagacacacgcacacacgcacgcgcacacgcacgcacacacacacgcggcttgaaggagagcaaggacgagatggatggagagatagaaaccgagggagggagagagacagcgatcgagagagacaggggagggcgagagggaaggagacagacagagaggctgagaaagagagaggcacagagaaagagagagagagagacagagagacagagggaaaacgacaaaagtagcgcgaggtccagggggaaacccagaagagagaggcggagggagctagagagcgagagcgatagagccttagagaggaagtgcccggctccgttaggcagcgccgtcttgagcaggtcgggatagggtggagggggcttgggctgcgcccagaacacgggggccaggcggtccgtgcgagaggaccaacggagcgctgaggcgggcgttttcttggatgaattgcttgctttggaggtgggtttcgtaggctcctgcctttcttggcagctccctgtgctctgggtgccttgcggcgggccccgagatttgcagagcgcgcccgcccgtttggcgggagccgtggcaccgggcgggcccggaggcctgggtctctggcgagtcctcgggactggagtcgtcgacacgaagcggggggcattgggaatcccgggtgcacagggcctgttttcccggtggctggcgaagcaatgtccttcccccgggtaaagcagcccatgcgttccggagccgacgtcttggctggcgtctgtggcacccgctgcccctgcccgccccttcccccggtttggaagggtgcgacgacggcgcccgatgggtgaattgaatcgcctgggcgttccgggagcgggaaggcaccgcgaacggcagggaacccagcggctgcgcctttggggtccggccccctgccctcccaggctggagccgggctcctggcggggcggcggcgaggcggaagcggtgggatgctgctgccgggccggcgtgcagtaggggcggacccccagcaggaggaccccggctgcggctgcggcgggggtgtaggtgggcggtaaagggggagcagagtcaggggaggttgggtagcatggcgactgtggggggaagggaggcagccgggaagccacaaaagcctacagcaggccgggcgggcgcggtggctcgcgcctgtaatcccagcactctgggaggccgaggcgggtggatcacgaggtcaggagctccagaccatcccggctaacagggtgaaagcccgtctctaggaaaaatagaacaaagtagccgggcgtggtggcgggcgcctgt

SEQ ID NO: 1879805 - DNA, 4001 bp, Homo sapiens
agggcccagggcccacgatcctgggacgccctccggtcctccgccctgtcgcggaggcagcgttttggatccctcgccgcacaggggctcctgcgaggccccctcttgccccacccacccagagccgtcagggctggccgaaggcgaacagccggcccagccgcgcggggcctttctctcacaacgcccccaccacggtcgcttgtcccgaccaagacccggccgggggggcaagagggcgtggggtgtagcgggtcggggggtggccctgttttgccccgggctggcactagaggcggcggcctgatctcgggtgagagggcctgagagaaacccagacacaccccaccgccaccaggagcaaatccactcccccacacacagacacacccgggcgcgctcgcacgcgcgcgcgcggactcacacacacacacacagacacacagacacacacgcacacacgcacgcgcacacgcacgcacacacacacgcggcttgaaggagagcaaggacgagatggatggagagatagaaaccgagggagggagagagacagcgatcgagagagacaggggagggcgagagggaaggagacagacagagaggctgagaaagagagaggcacagagaaagagagagagagagacagagagacagagggaaaacgacaaaagtagcgcgaggtccagggggaaacccagaagagagaggcggagggagctagagagcgagagcgatagagccttagagaggaagcgcccggctccgttaggcagcgccctcttgagcaggccgggatagggtggagggggcttgggctgcgcccagaacacggggtccaggcggtccgtgcgagaggaccaacggagcgctgaggcgggcgttttcttggatgaattgcttgctttggaggtgggtttcgtaggctcctgcctttcttggcacctccctgtgctctgggtgccttgcggcgggccccgagatttgcagagcgcgcccgcccgtttggcgggagccgtggcaccgggcgggcccggaggcctgggtctctggcgagtcctcgggactggagtcgtcgacacgcagcgggagggcattgggaatcccgggtgcacagggcctgttttcccggtggctggcgaagcaatgtccttcccccgggtaaagcagcccatgcgttccggagccgacgtcttggctggcgtctgtggcacccgctgcccctgcccgccccttcccccggtttggaagggtgcgacgacggcgcccgatgggtgaattgaatcgcctgggcgttccgggagcgggaaggcaccgcgaacggcagggaacccagcggctgcgcctttggggtccggccccctgccctcccaggctggagccgggctcctggcggggcggcggcgaggcggaagcggtgggatgctgctgccgggccggcgtgcagtaggggcggacccccagcaggaggaccccggctgcggctgcggcgggggtgtaggtgggcggtaaagggggagcagagtcaggggaggttgggaagcatggcgactgtggggggaagggaggcagcggggaagccacaaaagcctacagcaggccgggcgggcgcggtggctcgcgcctgtaatcccagcactctgggaggccgaggcgggtggatcacgaggtcaggagctccagaccatcccggctaacagggtgaaagcccgtctctaggaaaaatagaacaaagtagccgggcgtggtggcgggcgcctgtaggcccagctactcgggaggctgaggccggggaatggcgtgaacccgggaggcggagcttgcagtgagccgagatggcgccactgcactccagcctgggcgacagggcgagactccgtctggaagaaaaggaaagaaacagcaaaaagccaaagaaaaagcctacagcacccggtattcccaggcggtctcccatccaagtactaaccaggcccgaccctgcttagcttccgagatcagacgagatcgggcgcgttcagggtggtatggccgtagacgctgaaggaggcgcctggctgccccaagagcccagcccggcccggccgtgcccgccggattgcagccgacaccgccagcccggggccgcggggctcggatcggggacccccgagccgctggcccgcggccttcccccggctcccgcgctcccgagcttccaccacatcgggcccgctcggagcagggagtgctccgaggcgtcagggcccagggcccacgatcctgggacgccctccggtcctccgccctgtcgcggaggcagcgttttggatccctcgccgcacaggggctcctgcgaggccccctcttgccccacccacccagagccgtcagggctggccgaaggcgaacagccggcccagccgcgcggggcctttctctcacaacgcccccaccacggtcgcttgtcccgaccaagacccggccgggggggcaagagggcgtggggtgtagcgggtcggggggtggccctgttttgccccgggctggcactagaggcggcggcctgatctcgggtgagagggcctgagagaaacccagacacaccccaccgccaccaggagcaaatccactcccccacacacagacacacccgggcgcgctcgcacgcgcgcgcgcggactcacacacacacacacagacacacagacacacacgcacacacgcacgcgcacacgcacgcacacacacacgcggcttgaaggagagcaaggacgagatggatggagagatagaaaccgagggagggagagagacagcgatcgagagagacaggggagggcgagagggaaggagacagacagagaggctgagaaagagagaggcacagagaaagagagagagagagacagagagacagagggaaaacgacaaaagtagcgcgaggtccagggggaaacccagaagagagaggcggagggagctagagagcgagagcgatagagccttagagaggaagcgcccggctccgttaggcagcgccctcttgagcaggccgggatagggtggagggggcttgggctgcgcccagaacacgggggccaggcggtccgtgcgagaggaccaacggagcgctgaggcgggcgttttcttggatgaattgcttgctttggaggtgggtttcgtaggctcctgcctttcttggcacctccctgtgctctgggtgccttgcggcgggccccgagatttgcagagcgcgcccgcccgtttggcgggagccgtggcaccgggcgggcccggaggcctgggtctctggcgagtcctcgggactggagtcgtcgacacgaagcggggggcattgggaatcccgggtgcacagggcctgttttcccggtggctggcgaagcaatgtccttcccccgggtaaagcagcccatgcgttccggagccgacgtcttggctggcgtctgtggcacccgctgcccctgcccgccccttcccccggtttggaagggtgcgacgacggcgcccgatgggtgaattgaatcgcctgggcgttccgggagcgggaaggcaccgcgaacggcagggaacccagcggctgcgcctttggggtccggccccctgccctcccaggctggagccgggctcctggcggggcggcggcgaggcggaagcggtgggatgctgctgccgggccggcgtgcagtaggggcggacccccagcaggaggaccccggctgcggctgcggcgggggtgtaggtgggcggtaaagggggagcagagtcaggggaggttgggtagcatggcgactgtggggggaagggaggcagcggggaagccacaaaagcctacagcaggccgggcgggcgcggtggctcgcgcctgtaatcccagcactctgggaggccgaggcgggtggatcacgaggtcaggagctccagaccatcccggctaacagggtgaaagcccgtctctaggaaaaatagaacaaagtagccgggcgtggtggcgggcgcct

SEQ ID NO: 1879806 - DNA, 4001 bp, Homo sapiens
tccgaggcgtcagggcccagggcccacgatcctgggacgccctccggtcctccgccctgtcgcggaggcagcgttttggatccctcgccgcacaggggctcctgcgaggccccctcttgccccacccacccagagccgtcagggctggccgaaggcgaacagccggcccagccgcgcggggcctttctctcacaacgcccccaccacggtcgcttgtcccgaccaagacccggccgggggggcaagagggcgtggggtgtagcgggtcggggggtggccctgttttgccccgggctggcactagaggcggcggcctgatctcgggtgagagggcctgagagaaacccagacacaccccaccgccaccaggagcaaatccactcccccacacacagacacacccgggcgcgctcgcacccgcgcgcgcggacacacacacacacacagacacacacgcacacacgcacgcgcacacgcacgcacacacacacgcggcttgaaggagagcaaggacgagatggatggagagatagaaaccgagggagggagagagacagcgatcgagagagacaggggagggcgagagggaaggagacagacagagaggctgagaaagagagaggcacagagaaagagagagagagagacagagagacagagggaaaacgacaaaagtagcgcgaggtccagggggaaacccagaagagagaggcggagggagctagagagcgagagcgatagagccttagagaggaagcgcccggctccgttaggcagcgccctcttgagcaggccgggatagggtggagggggcttgggctgcgcccagaacacgggggccaggcggtccgtgcgagaggaccaacggagcgctgaggcgggcgttttcttggatgaattgcttgctttggaggtgggtttcgtaggctcctgcctttcttggcacctccctgtgctctgggtgccttgcggcgggccccgagatttgcagagcgcgcccgcccgtttggcgggagccgtggcaccgggcgggcccggaggcctgggtctctggcgagtcctcgggactggagtcgtcgacacgaagcggggggcattgggaatcccgggtgcacagggcctgttttcccggtggctggcgaagcaatgtccttcccccgggtaaagcagcccatgcgttccggagccgacgtcttggctggcgtctgtggcacccgctgcccctgcccgccccttcccccggtttggaagggtgcgacgacggcgcccgatgggtgaattgaatcgcctgggcgttccgggagcgggaaggcaccgcgaacggcagggaacccagcggctgcgcctttggggtccggccccctgccctcccaggctggagccgggctcctggcggggcggcggcgaggcggaagcggtgggatgctgctgccgggccggcgtgcagtaggggcggacccccagcaggaggaccccggctgcggctgcggcgggggtgtaggtgggcggtaaagggggagcagagtcaggggaggttgggaagcatggcgactgtggggggaagggaggcagcggggaagccacaaaagcctacagcaggccgggcgggcgcggtggctcgcgcctgtaatcccagcactctgggaggccgaggcgggtggatcacgaggtcaggagctccagaccatcccggctaacagggtgaaagcccgtctctaggaaaaatagaacaaagtagccgggcgtggtggcgggcgcctgtaggcccagctactcgggaggctgaggccggggaatggcgtgaacccgggaggcggagcttgcagtgagccgagatggcgccactgcactccagcctgggcgacagggcgagactccgtctggaagaaaaggaaagaaacagcaaaaagccaaagaaaaagcctacagcacccggtattcccaggcggtctcccatccaagtactaaccaggcccgaccctgcttagcttccgagatcagacgagatcgggcgcgttcagggtggtatggccgtagacgctgaaggaggcgcctggctgccccaagagcccagcccggcccggccgtgcccgccggattgcagccgacaccgccagcccggggccgcggggctcggatcggggacccccgagccgctggcccgcggccttcccccggctcccgcgctcccgagcttccaccacatcgggcccgctcggagcagggagtgctccgaggcgtcagggcccagggcccacgatcctgggacgccctccggtcctccgccctgtcgcggaggcagcgttttggatccctcgccgcacaggggctcctgcgaggccccctcttgccccacccacccagagccgtcagggctggccgaaggcgaacagccggcccagccgcgcggggcctttctctcacaacgcccccaccacggtcgcttgtcccgaccaagacccggccgggggggcaagagggcgtggggtgtagcgggtcggggggtggccctgttttgccccgggctggcactagaggcggcggcctgatctcgggtgagagggcctgagagaaacccagacacaccccaccgccaccaggagcaaatccactcccccacacacagacacacccgttcgttctcgttccggaacccgcacgcgagcacgggtgcgcagacgcacgcacacacacacacggtgaaacacagacacacacggcttgaaggagagcaaggagaagatggatggagagatagaaaccgagggagggagagagacagcgatcgagagagaccggagaggtggagaggtaaagagagagaggctaagagggacagagaaagggagaagtacagaggtacagagggaaggctagagaaataacgcgaggtccagggggaaacccagaagagtgaggaggagggagctagagagcgagaacgtttgagccttagagaggaagcaccctacttcggtaggcagcccccttttgagcagtccggaatagggtggaggggtttgagctgtgcctgagcagggcggccaggcggcccgtgcgagaggaccaacggagcgctgagacgggttttttcttggatgaattgcttgctttggaggtgggtttcgtaggctccattctttcttggcacctcactgtgctcttggtacctcactgtgctcttggtgcggtgcagtgggccccgagatttgcagagtgcgcccgcccttttggcgggagccgtggtaccgggcgcgtccggaggcctgggtctctggcgtgtcctcggtactggagttgacacgaagtgcggggcaataggaatccgggtgcacagggactgttttcctggtggttggcgaagcaatgtccttcctcccgggtaaagcagtccatgcgttctggagcggagatcttggctggcgtctgtggtacccgctgcccctgcccgccccttcccccggtttataaggttgcgactgcgccggatgagtgaattgaattgcctggtggatccgggagcgggaaggcaccgcgaacggcagggaatcctggcctgcaccttagtgatctgaggcgtggtgtttctgctggatccggtttcatcgtgttgcgccgcccatcctgaatagttgtgatgttgttgcctggctgtgctgcaggttagcccacactaagcggtcccgggctgttgtgtgggcttgggcgtgtgaaaagagggagcagatttacggtgcggttgagaagtacggcgaccaaacggtaaagagggaggaacttgaagtctaaacaagcctgcgtctcctggttttctcaagtggcgtttcatctaagtagcggtctggcccagaccctgcttatcttcacgagatcagaggagaccggacgccttcggggtggtatggccttagacgccggtagtgcagcctgtctgccccaaaggcgcggctcagccacgcccgtccgactccatgcgccacctctaatccagtgccatgggg

SEQ ID NO: 1879807 - DNA, 4001 bp, Homo sapiens
tgaggattgtgagaggtagaggagtcagggttgggctggaagagacagaatttgtcactttaatccaacactgaatgccaggagacagaggtgaatggttacagtcttggtgatgtggctgcgtctgtgggaggatgtggatggatgatgacagtgatgaactggccaggcctgaggcaaccctcccacttagatttggcttttaaagtcttcaagctcattgagggcagctcatgagacctcttgactctgggtccactgctcctttatatacacatatatgtgtatatatatgtgtgtgtgtgtgtatatctatatatgtgtgtatatatatgtatctatatatatatctgtgtgtgtgtaactgagttcagtgtcttgtcatgttttctccatgggggttgtacaacttaagtttgcccagtccctagttcagtgagtgcacagctgaagctctgggagggaacaggcaagatctgggtctgggggtgagagggctccctctggttcccactatccaatcctaaccagtcttacagggaacaaacaccgtaccttttatcacagcgattccaagaaacacacacaccaccactgaaggatatttaacttttcttaaaaaaaaaatcttaaccatgaaaggaagaaaataaaagagtatacattatcttaacagcagaacagtcatttccatatctatattttatatattatatatatatttatatatatatatatgtatatatacacctagcacagtgtgtatattctattcatcagggagagttgggtgaggacgtggtgatggggccaatgctgcggtggccccttggatggtcctgggtgaattcagggactcggcattcagacccctgtccccacctcctggggcccagtcctcagctccgtacctgcttcactggttttctacagggacagggtggggaagagggggacataggtggggtaagaaacccccatgatccccatcttgtgaagatgagaagtccagggagggagggagtagcttggcagcaagctgtggagggcaggctctggagccaggtgggatggggagccagaagaccttcccactcacagggacaggaacactcaggcctggctcccgctttaggctcgatcctggaactgggttgttaactaaggagatacaagtgaaacccctcttccctaagcagctccttccataactgcctccagcacttcaggaacaggaacaaaaaaggtcaaagttatttacaatagcaaagatgcacatacgatacatacatatttataggaaaccaaagtgacaaagaggggaggggaggcacccacctctgcctggggtcttatggagaaagaggggaggaagaaagtgcatttacacagaagcctcctcctttcacttgcatgtctgagggcagcgcacatacaggcgtgcgcgtgtacacacatatgtggggtgagggcagaccatggtgagtgggggcctttcggatgcagtcagcatgcttaggagacatgaggccttggagggttgggctaagggagggaaaagacactgaaacctgactccgacttgagcagaccaagcaacatgcgggtctccccccgggccttggctggatcctagtttccctaactgcctcctccacagggaggagtgttgggatcccccctaccctgtgccccggtctcaggccagtccctgaaggaggagtggggacgcagaggatttggtggtttgtacggttatggtcctggtgacgcggctgcgtctgctgtgctgtcttccaggggggcgtcagagcctgtgggaggaggatgaaggtgaggaactggccagcctgaggtgaccgcttccacatgttttgtctagaaagttcaggctcacgagaacagatccttcatcaccttccttctcctccagaaaccccagtttctcgtagggcttgaaaagggctgtctactgaactccactttcatcagcgcctaaagcccttaggtcaggtaggtatgtgccttgtcttcctgagttatgacatagctgtgtccctggcccacccagtgtggttctgaatcatttaatcagcacgagtcttaggccgacaccatggtgtgcacctgcaatcccagctgctttggaggctgaggtgggtggatcacttcggcccaggagtttgagaccagcctgggcaacatagccaggccagcccttgtctcaaataaatagaaaaaaaaaaaaaaaaaatatatatatatatatatatatatatataaaattaaaaaaagaacaagtcttagaggtgagaacaggctcctcctggtttgttacctccatagcacaaggaaaaagagggctcagtgctaagctccccattttgccagggagcttctgtgggacttccctaaaaagatccctctctgaagctgagagaatgaactcgtttcactcaaggggaaaccactctcagaaccaccatctctcactgcttagtgatgtgtcctcacgagttggcagacttctcccccaatggtaggaaccgagagggacctggcttcactcaccatcctcagggcagggccccagttcatggctgttcctggagtcagaagctaggggctccttagcgggaggtgagagggagccatctgtccatctagctgcttctgtgtggaaactgcccacaggcgtggtgccaccagatgactctcccccaagggacttgagcagctctctgtgggccagctccatatcctggaagagtcggcgggggaatgtctgctcgagtccttctattcctaaggcccctggggaaggggtctgtgctgggccttggggaggagggtgtgatttaagggtggctgggcgggctgggggaagatccctgggccaggacaggatctagggctcccgcgaagacacacatctcactcatggggaatggttttggggtgatggactgaaggcctgcagggacccaagccctgcttccctcaccttgagcctgttgagcttgagagtgagctgctcaatggtatggaagatcatgcccacgtccctgagggccaggcttggaggagagcggctggggcgtcttggatcatcgttgcctccctgcagctgaggctgaggctctgtctgccctgcagggaggctgtcaggctgaggggggctcatgggtgcctctgagtggtcggtgcttgagtccgggggtcctgatggcatgctgacataaaagcagttccctgtccccacagtaagagaatgagatcaggaggcaaacagagaagtcgaagctatcctcccgttcctgtgggattccccagccacctgacagagcaggccaggcagtcctctccagacaaactcagagaacgtgggccttgctcactgtctgccagccccctaaaagccctgctcccgagaccttctagatgacacttgctcagtctggccccaagctgggggagatgctgagcgatgaactcaagggagaagtggcagagctgcagtgtttcatttggggaaattggagtggctccccctccttgagtaaacagattgtgagctggtttcaggctcttctgaaaggagcaggcagcagccctcttgccctgcctgactccagctctggatgaactacagccctgccctgcccctcttccatccatgccacgatcctctggaggtcccttgacccaaccaaggggtgtcagagagagctggaggaaggacgtggagggttcctgacaggcaggaagcacagagaaccaccgcggaatctgggaggctctttcagccgatttccacagtgacactggagcggcggctgaggtggggaagtggctgcttgcatatcaggtgaaggacactaggtccccacccccaggccaggcttccctgcccctcccacaattgcacacaggcatttatccctgccattctgaacaggagcctggacaggtggcttcttaaggctggatggacagccagc

SEQ ID NO: 1879808 - DNA, 4001 bp, Homo sapiens
tcaggtaccttactctggcctgggatctccaggggagtttctgcctcaaccattgggagccacaggaggctccccaggcaaacagagaggtgcctcatgcttgagaagggtctctctgccaaggatcagcgggagagggggcagggccgggagaccagctacaaggctgcggcaatagtccgggtggggtcgtggggagcagggatgagggaggagggaatatgagctgccgcaggagctggtcaggaagggaaggaagtgggagggaacctcctccagctactccaggactgcagcctggtgtcctgctgagccctgtgcctgacacccctctcccatccaggggctcacatgaccccagagttcacccaggcaggcccaagctcagcggcaggaagaccccctctgaggccagagtatatggcatgaccccaaagtcaagctggggaccacggtcgtccccattcacactcggccctagagtggggactctcctgacccaaaggccacccaggacttactctggggcagttctccaggacccactcctgacacccactgtcggtgagtcaattctagtctgacagcccccatcttccacccacaagaactggactctctggcctcagatcaacaagtcaccttatgtcaccacagaagccagtgccacctcccaccttcctcctcggtcaagatgtcagatgggggcagatgggccatgtgtccatcaggggcggctctgaggaaggatgaacgcccaccttccccgcagcctcagggcacaggggccgaaggcaggagaggccccctttggaggaagagttccccccagacccttccatgaaatacaagttctctgagcctcagttttccttctctaaaaaatggtttatcttatcttaccaaaccatggagacagtaaaacaaaaatggggttatcctatgttaccagaccaggagacagtcaaaaacaggcaaagggtgcacagtcccttgtacgcccgttgctactgtgggagtgacgttcatattgaataggagccctagggtttctgctgtctccattttcctgcggcccccggagacttcatttgccttgctcgattaccagcccagacctccctcgcttgccctgtccccagaggccgcagaaaacagactctgcagtagcccccggacgcatcggaggaagcagacaggcagctcgccctccagctgtgccctcagtggacctgacacacacctggtcctgctcttcagacacaggaccctggtatttctaagaaatcggaaaaccgtcgcccagaggaaaaggaagtcttttgaagagggtgcccggcgtgggcagtggggcagcgccccggcacagccccttctccaccgcgtgggagggaagggctgtcgcggcagtcgccggggtgagggaagaggggtcccgggtctagcgggggtctgcccaggacccgctgctcagccccaaatgccccggcctgcgctcgcggaggaaccagggtgcgcccctgtcacgacgcgggtaagaggggcttcgggggccagagttgtgccccgagcgcacgtgtgccgggcccggagtccccagcgggtccccagaggcgcgcgtgtctgatgcggatggggggcggcgactgggactcccagcctcccagcccgtgacagcgccccgggagagcgcggcccgggcacccgaaggctgcgcaccagccgggtggacatgcggggcggctgtcccccgtgggccgcgcgagtcacccacctgggcgggcaaggcgtgcgccgcagcccagagctccagtccgacggccagcgcggcccagacggcgacgggcgccatgggtgcgggcggggtccggttgccccctgccctcgcgccctcgcgccctcgcagcccagcgccttctctccaggctccgctgcgctcgctagccctcgactgaaagcgaaagcccgcgccccagcgggccagaggccaggcggcggggcggggcggggccagccggccttggacacgcctcccccacgcccctccccagacgctgctgggcctccgacccgaccactccagcatcgctgggccgatacctccagcgtcactcccagcactcgggtgacccctcaacctcctcctatcgtcccctcctcttcgaatcaccatctccacctgcccggcctccacctgcccggcctccacctgccctcccagctcccacaggcttccctgtcccgtgagggtgaggcactaatttggaaaaacatcccccaaagctgacagctgctttaggggaaccaagagaattctagatcattcacttatttagactctattttaaatatatttaattcttattttttaattttttttgagacaaggtctcactctttcacccatagctcactgcagcctccaactcctgcgctcaagcgatcctcccacctcagcctcccgagtagctgggactacaggctcgggccaccatgctaggctgatttctttatagagatggggtttcgccatgttgtccaggctggtctcgaactcctgagctcacgtgttcttcccaccctcaagtgatcttcccgcctctggcctcccaaggtgctgggattataggtgtgagccactgcactcggcctgtttagactctagagccagaccacctgggtctggatctctgaactgacctcataggactattctaaaaatttaaagatatgtaatatacataatgcagtctgtactttatatatacttaagtaagtatctacatatataacaataggcatttataaatcttggctgttgttactactcttcgcgtgttcatttatccttaaacacgcatccagccttctcacagggagaagactctgcacttccctgctcaagtctcctgcccaggcagggggcagatgaacagaggctgggagagaatgtcaccagggaagctgcagggccctgaggggctgctgagaccaggcccaggagagctggcttccccaggatttacatcatgaccgagcacccattccagctgcaatctgtccccccatccccactttgagtgccagccctaatacagggccagccctgcggggccagagcacattcctccagccctggattacgggggtcctagcccccagcacatagggcatttctaagggttggggtgggctgggtggcaggaggctattctgttccctgtttcctcactgcaggctgcctgaagaggtacagagacccttgctcccggccaccagccccacagtggagcctgcaaggatggtgcttctaggtgctgagtgctgagtgagaaactgggaagtgactccctggggatggaaaaccccacctcctgaccaggaggctgggaaatcacctggtttccacatgtttctgtgacatggaccacgctgagggtgtggctggtatgacccacagccttaactctgcagagccgctggacagacatgcagagctcttctggcccttatgagaatgcctaggagcagctccaaggactccttgatccctaaaatagagctgaaggcaggagggagatgtcacctcgtggaagcaggggacaatagttctctctagttgtcccccacacacctcaagaccaatgggaccaacagactgtctgcacccccaaccctcaacaaccggctcctcctgccagtttccctatcccagtgaatggcaccatcacctcctgaaggtggggatcctcccaggcttaggtcccatcctgggaacgaattcaagcttaatctctatgcaacatggggcttctccccttctccaggccgacccaggcttgagagcaggcgacttctctctgaactctgccaagtgcagttcttgactccagggtcaggcccaggggtgagggtttgggaaggaaagggcacagtgttccatggcagccaaagttgtcacccatctggcactggggactttggggacagtttccagctca

SEQ ID NO: 1879809 - DNA, 4001 bp, Homo sapiens
aaagaaatagatactttcataatttatttttaggaaataataactgcattgtgaaaaaagtcatctaggaaacttttctgcccccacccttgtaggtaggacaaccatttttattctttgtgccctctcagaaccacatacatactttcatcatcttcatcatatacttgaaccatttattgaactcatttgtttgtttttctaatgtatagtaagcttttggagagaaggcattgcatctagttcatctctacatccttagtactcagagggtatttgttgacaaatggactgagtgtatccctttcttagactgagacattattatttttttagaatgaagaaccttcccattacttaaaatactttgtttttaaatggaactacattgcttagaatagtttaaaagatgttttgttttttatgttcatgtatagtatataatctgttgcatgaatattttacttacatattttatgggatatgtgttttcagtagatatatttttataggagatacatttttaaatacctacaaaaatcccagtactgtgaagtatctgtgtcattaagtgtaataaaacatattacagtaacagtaatctgctgaatgcttcctattaccctgcagggaccctagagattgaaagctttattttggaaaagtcatctttatggtaataatgtaaatggatgtattaagtaacagagcacttataaagagatccttgtctaaaggcttggtatgtagggcagaaaaccatgcttcactcagaaggccactggctgtggtggaaacttgctgtttcttcatggagttgataacaaatattttttcatgttattttttctcacatttatttttcaaagtaaaaacatttatttttcatatttgtagaattcttctatttataaaagtaatttctacttatgaagagagcagaaataagaggaactctcactacccagaaataaccattgttaaatttgttgtgtgtaattccctacatgtatacatgcattatatatatgtattcacgtgatgatactcgttcccccatattttccaaaatgaggtcatagaacaggtgctgagttttgatctgcttccttttttttttaatttaataatgacattctttgcccaaaggagtaataaaacctatttttatctaaaatctctggagaacaaaacattttacctaatagttttcaagttaggtaagggttttcatactcatattttaaactttttagcttttcataaaaaatcttttaagatgtggcacactctagtggttatgagactttgggttttattgaacagtgtagggaaaagagcaagaggggattttagaaagtaaggtacagcaataaaatttcataaaatatgtcttaatgtgtactatccctttcatttcataaaggagaggaccgattctagcaccatacatgaaggaagagtataatctcagaatgccaggctgccattcaggaagtaccagcatgctgtctcagataagcggttctgaggaactgcagtctatggtttatgcacttactgagttaccgtggtgtcatgggcagggtgaatgcacctgaggtggtgcaggacgccaaatagtgtaactagaagtcccagaggaggctaaagccttcttgactaaactgcgaccctggtgctgtgtgggtagctcctttcctgcctcacttcctccttttccttccctcgtggcattctcagctttccatatgccctttctgggtcctggttgctcctgttccctcccctgttgctcctgatactcacctcttcttgtcttttctctctttctccctctactttttcaattctcatggttttctctgtagagaaaagctgatcttttaagacacagtggtctttttgtatgaagtatgtaaatgcctttgactactacatacatatgcctacatatgaaagtagtagtaggcatatgtatgtagtagtcaaaggcatttattaatttagttgttcaatatatatttactgctgtgtctctaggcaacagagatgcaaggccaagccaaacctcctcccttgggaattctcaggacagtggcagttactttgggtctttagcacttatggcaggtgtcagtgctgctccggctccttgtgttgccatctgggtactgtttaaaccttattgtggactgtggatttctttgggtgaaagtctgtttttctcacccttctatctgttgagtgctgtgcagtgtcttgtacagaatagatttattttcctgtctatttctggagaggggctttttttgaagatctgatcaatgattggagtcaaactctttagtcccacatgtgatccattgtaaactaactggcaaatgtttcatatttcccctctaatacataacaaaaacagtttaagtctgaaaagtggtataaatggaacggaacatgacattcctgtagccatttttttaatacagattatatccctgattaataacaaaattgccagtctttttaaatataaaattacaacaaccatatagaatcacacacctccaacctctgctgatcttgatcttagtacatgaggcttgggttgcgattagatttattgtggcaggaggttttgtgtttgaggaactaaaggactttctagtaaacatagatgcaggagagcaaatttgtgagtaaataccttaaagtctttatataagttttttgtagttaaagtcactaacacagaacaataataacagtacaataaatacagagaatgtacgtggcattttagatatcaagttggtaataatggctgctgtgcgattaatttgatgaaagaggacagtgatgatcctgattggaagattgatagctcttgggtggggtggggatggggagaggcactccacttgcttttcttaaggacttgctcaaagtaagtctgtgtctctaagtggagagctttatcaattgatttctttttaacatttgatatatgtccagtatgttctgccaaatgcaggttgccaaccagtaagttacagaaatggctccatggttctgcagtgctctggctgcctaaattgaacattatgtatctgtgttgttctgatggaattagaatcctgcaggtgcttgtggccatgggagaaagtgtgtggcagcacctctggcacggagagttacttcctgcaagaagtccaagctgaaaatggatccccgctgggccacatttctggtgccacttcattgagcactttctgtgtagcagcagtttcctggtgttactgctgaattgtttcaggggtaatttcctgtgagttcagtatgcatagtaacaataaagaattttcatattgctatgtgattaatgtttattaagtataaaatttcacagttgtgtaaaaatatgcaaaatttataactaattcatttttgagcaaggacacatgattggggtgggattactatttaataaaaatgctactctattatttattgtaagtcttttacaagtgtacagaaatcagtgacgtggccaataataccagtttttctttcctgtgtcactgggtagtctaaaggcatagtgaggtgtttagtaacttcatagtttagtaactgtgaagccaggctgcctcagtttgaatcctacctcctctaactattggctgtatgacattgggcaactatttaacatctctctacctctgtttcctcatctgtaaaatgggggtagctgtgagaactggataagattgcttaggatagtgtctgacagagtaagacctttgtaagtgttagttctactaattattatttttcagattcctgcattatttttataacagcagatgacaagcaatgtgaaaaagtaccattataagtacaatgtaagtggaatacaaatgttagccatggttttctacacctttgaggaaataatattgatttttgttccccactcacgtcccatgggtgagagtccg

SEQ ID NO: 1879810 - DNA, 4001 bp, Homo sapiens
ccaccctctgaaaggccccactgtgtgttgttcttctccatgtgtccacgtgttctcatcatttagctcctactttttaagtgagaaaatgcagtatttttttttgcaaaattaaaatccagatcatatttggaagatagacagggaatgcttcctaaaactgccttgaaagtaaaagaaaaaagacttgtcaccatctttggactgctcctttaaaaaaaatttcattaattaaaaaaatattgagtgcttactatgtgctaggcattgagctaggagaaggctatgtggctactaacaggatacacatgatccatattctgatggtataaaaagtaaaacaggaaaaagaaacagactgaaaaatatcccaaaaaacttgacgtacaattctaattaaaataaattcaatttttgtaatgtaagtttcaataatttaccttatccttacatcaaggaacatatatgtaagtataactttgctccttctctcattctattaccatgtcttcaaatgtctatagatttgcatgaataaactaaaataagaattttaattaccaatttttcaccataaaatactaaaagaatagcttgcaaaactgtattatagtatctgcatgaaaatgatgttttacgaactaagtagatgggaatttaaaaatcaagccctgacatgagtgccctcaactggtgaaatcattccaaagcattcttttaacgcatctagcaaaactcagaaggacggctggacacctggccctgaagctccctaatggtgtgttcctggtctgcacacttccccttgcagcactgcagactctcctgacactcgtgaagcctccgttccgccgccgtcaaggaatcgcagacacgctctaactccttcagatgagactccatctggcctctcatctgagttgtggcagtagggaaataagtgcaagatcacacattcagcattaatatttttattatcttaaatactagatatgcttataacgtaagtattttaggtataatggctttaaataagaacacaactgaataaatattaaactctgttaaataagaatgtataactaaaaagtggggtagactttagttttcaaaaagtttgttgagcacataaatagggtaaattagctgacagggtggatgtttaactaatttttaagagcaaatttttaaaatcctgacattatattcaagcatagattatcactaataaccattactaataaagccgtaattgtctactgcccagctataggttctaaaggaattgtcacttttagtcattcaatcttataactcagatacttacttaaattagagcagcttgcttcactcatcttagccaaaactgatagggtttactgtatattatttaaaaattgctagtatcatcagttctcacttgcctttaatttggccattaatgttactatcaacaaatctctctaatttcatctacattaatctgttttggctactgcagttcctcgctgcagcactttcgtggagatgtgaaaagcagcaaccttaagaaatgtttgcactgctaattacaaaaaatagccagactctttccctgagacaggaacacctaatagtttctgtgtagtatctggcattcttgatcaggaaagataatgcagtatttttttttttttgcaaaattaaaatccagattatatttggaagacagacagggaatgcttcctaaaactgtcttgaaagtaaaagaaaaaagacttgtcgccatccttggactgctcctttaaaaaaaatttcattaattaaaaaaatattgagtgcttactacgtgctaggcattgagctaggagaaggctatgtggctactaacaggatacacatgatccatattctgatggtatataaagtaaaacaggaaaaaaaaaaaacagactgaaaaatgtctgttttaaggacactgagggatccagaacaaaggatccctcagtgtccttaaaacatcttagaggccatgagaaaaccaggagacttaaaacagtgaagtaagaaaaagaaaaatttcattaaaaaaatagttgtcttgttaaatactagttagaaaacattgtgacctcacagtatctgaaaaagacaggctccaaccctttccgtcatttgaacaggattgtaaaatatgcttttatttacagtgctgcctagcagaaaaggagacatttgcactggtatgtttcatgagaaaatgagaccaaaagacatgaaatggtttattcgctggcctgctaaaaataggtgaaaagtaattccatgaaagcagtaagttgtgcattcagtgagctatctttatgtctgtataactggaggacgcttgctctggctgacctcttcttcacattattgccttgctctgacttctcaatcctaagatagggagcaacccagagagagtaaccttattagattcagatggaagcgaccactaacatcgcatgacctctgctgccaggagtcagcatcctacaactttcactgcttctttaccaaaacaacacaaaaaaccaaacagagatgcggtttcatttaaaaattttaaaatattcacaaaaacatcataactcgccaacactggccttcccttcattctgttgcaatagaacaaataaaaggaaatgatcgttttttaaaagatattatttttcttcaaaaatgcatttagcagatattggctttgcttttgtagacgtaaaacatttataaccagaaaaaaagggtgagattaaaaatgagagatacttaggtttgtatacttatgattgataaccattttttgagctatttaaagtctgctcttgcatcagaaaaattaaacatttatgctattttccaaatattaacaaaaaagtgaaaaaacattcacataaacaaacaacatttccagcctggaagaaacattatttccttggaaaacaaactcttacagaggctaagactagccctttcctaagtatgaactagagaaaatgaccaaaatgaatgaatttgtgtactattcataaagtaaaaaatatataaaatattatttatttgaaattccaaacgtaccttctctacatttttatttttggtttttgttatttggttatttttatgtagcaaattttcacatctgctttttactatttcagctgcttcttgcaacttttgtacctgaaaataaagtattagagaaacatattatttttagaatcataacatgagataaaaatctaaaatttaaaatttcattttaaacaagtcattattttcctatcaatatccttgactggttcatctaatgttattacttctttaaatatggaatcactcagtgctctactctaacccacaatctttgtctgatttacctgtcttctctcatcaatacttctaaactctccacttgagctttgaagactacaaagattttcatttgcagatcaatgtcacttcaaagaatcagtctctggtccaaactagcttccatttaaattatttttcccaccaaatcaaaatctgctaaaaaaaaaaaaaaaaattctaggccctgcacccagaatatggtcactcaaccacagtattcctgctgagggattaaacccaaataaccagctggaagaccctgatgaataacaagtcccacagtccaccacaacctccattcctacctcagacctggatgactgaaatattctaactggatgtctcaacttaattttcccatctaatccatcgagatgcagccccttcctacttgcccacactttggcccccttaagctttcatccttagttcattctttttttttttttttttttttgagatggagtcttgctctgttgcccaggctgggagcacattggtgcagtctcggctcactgcaacctccacctcctggattcaagcaattctcctgcctcagcctcctgaatagctgagactacaggtgcatgtcaccacacctggct

SEQ ID NO: 1879811 - DNA, 4001 bp, Homo sapiens
gaggagcacaccttccttaaacccagccacagtctcaacgaaccccagccccagggagagggtcccctggcagcaccaccacaccttccttctgtaatggggttcagtcaccaccctttgacccattgctgccagtgaccagtcccccgcccccatgccttggtcttggacttcccctgccatctcagctggttgccccagtctctcactaggcccttggccagccccacccctcagctcctctacccccccaatacagagatcatcgagcgggtgactcggggtgagcagccccccttccggccctccctggccctgcagagtcacctggaggagttggggctgctcatgcagcggtgctgggctgaggacccacaggagaggccaccattccagcagatccgcctgacgttgcgcaaatttaacaggtccctggtgtttgtcatggatcccccaggcccttcctccacagccaccatttacctaatgcttctggctctggcttatcccagcagtggcagagggagaccactcacctcctccctgtacatagtcagctccagctcagcacagcctcatgaccctcttcgcaagtacagcatgactcagctgtccccacagtcccctgccattcatgccccttccctccaccatcgacaccccacacccttcctgcccactcgccttgctggcctctagacttctcagcagtgtgtaggatagatgggcctcccgcctcctgccctgtaggctcttggccctccacgggagctcctgccccaccccttgatttcccttccccagcgtgcccaccaggcccagttcctccagacacacccttctgtggacatcactttgtccgcaattgacccttgtcattctccacctcctttacctccttctaactcactgggttcaacaaagatgaacaaaatgtccatatgtctgaagcttcatacttgaccttggggtctcagaaaagaattgaactttcttccttctgttttcccctgctccccggtatcctgctatgccctcaaccctgagcgtctctagagacctcactgcagtctggagggggaagtgcctaggggcgggcgctcacggtaggctgtgctgctcctctcttaccacccccaccgccaccctctgcccccagggagaacagcagcaacatcctggacaacctgctgtcccgcatggagcagtacgcgaacaatctggaggaactggtggaggagcggacccaggcatacctggaggagaagcgcaaggctgaggccctgctctaccagatcctgcctcagtgagtgcctgagtctggggaccccccccaacacaaagcccctgtcccgacccccaactctgatcctgcacctgccctgaccccttagctcagtggctgagcagctgaagcgtggggagacggtgcaggccgaagcctttgacagtgttaccatctacttcagtgacattgtgggtttcacagcgctgtcggcggagagcacacccatgcaggtaggccagggttcagccacaggtgccaggcaagctcagcatctggatcccaccagacctgccttctggttctgctttacccacctgaccccaggtggggtcccctacttcctgtctctcttagcttctcttcccttccaggtggtgaccctgctcaatgacctgtacacttgctttgatgctgtcatagacaactttgatgtgtacaaggtgagggtgggagtggggatgggaagggacagacagacatggacaaggtcagaaaaagatgaggggtaggcagaatgatgtggagtcttaagagaggagatcggggacacgggcagagacagtgacacagggagacccgggaacaggcagagaacccatgtgggatgggggatgagcaaagacagatgagggtacagaatgacagacgctgcacccggtgtgacggtgtggccggccgcacagttgcagccgtcaagtcctgcaccccctcgccactcccacaggtggagacaattggcgatgcctacatggtggtgtcagggctccctgtgcggaacgggcggctacacgcctgcgaggtagcccgcatggccctggcactgctggatgctgtgcgctccttccgaatccgccaccggccccaggagcagctgcgcttgcgcattggcatccacacaggtaaggccactgaaggtgcaggcgggcatccagaggccaaggcttcgcaagggaaacttgtcccctggcccagcccctcgccctttcatctctctctctctctctctctctctctctctctctctctgtctctctctctctctctctctctctctctctctcacacacacacacacacacacacacagagctgggacctcagatcctgcctcctgcctgtcttggattgtccacctacctcccttaacacccctccctccctcactcgctgatgggctctgctccttcccttgctcctcccaggacctgtgtgtgctggagtggtgggactgaagatgccccgttactgtctctttggggatacagtcaacacagcctcaagaatggagtctaatggggaaggtacagtgccccctcctagagggaatggggagggcagggtggctgagggaaatgccatcctggggcagcctgtgcctgcacagcccgtttcagctcctagccctttcgcctcccaagttccccttctcataatattaagagttcaacctgggctcatcaacttgactgtaaccagagactcaggttcctgctgcccctcttgtcaaacgatgtaaaagtatttccgggccagtgctggagagttcccagcaggaatctgattttaagaccctctgtgggccgggcgtggtgactcacacctgtaatcccagcactttgggaagctgaggcaggcggatcacctgaggtcgggggttcgagaccagcctgaccaacatgatgaaatcccgtctctactaaaaatacaaaaaactagccaggtgtgatggcaggctcctgtaatcccagctacttgggaggctgaggcagaagaattgcttgaacccgggaggcagaggttgcgatgagccaagattacaccacgcaccccagcttgggcaataagagttaaactctgtctcaaaaaaaaaaaaaaaaaaaaaaaaaaagaccctctgctccacctttgatgtggtaaagatggcttcagagccagcataagtgaggctgtgaatctcagctccacagctggctgtgtgtcagtttgctatacctctctgagccatggttttcctcatctgtaaaaagagggaaaaaatctatctcacaggaattatgtgagaaacccattaaaaatgtctaccacataattgtcatttaacttttccaagccttagcggattatctgtaaaatgatgtctatctcaggattgcaagaagcctagcacaaaccctggtacccagcaggcacctaataaattcttactcctacccgccccttgctcttgcctcctgtttatcttctatccttctgctgtattcgacacaattcaatgcagtaaacatttattgagtgactactgagtgccaggccctgggatagtaacatggcccagatccagagttagctgagaaattcatgtggaccccatctaaaccttatggtgaaagaaaggctgcttgggagccagtcctgggagcccagagggatctagttcggcaaatattccctgggcactattttgggggctgtcagagtacagccccttgttgagggtccagtcctcaaggagcacattcccagaaattgttcaacattctgggcgctgggggtgcttgtaatcccagcactttgggaggccgaggtgggcagatcacttgaggccaggagttggagactagcctggccaacatggtgaacctcctgtctctactaaaaatacaaaaaattagctgggcgtggtggcacgtgcccgtaatcccagctactcagg

SEQ ID NO: 1879812 - DNA, 4001 bp, Homo sapiens
tgggaggccgaggcgggcagatcaagagatcaagagatcaagaccatactggccaacatggtgaaaccccatctctactaaaaaaaaaaatacaaaaattagctgggcatggtggtacgcgcgcttgtagtcccagctactcgggaggcagaggcaggagaatcacttgaacccaggagggggaggttgcagtgcgccgagattgcatcactgcactccagcctggcaacagagtgagactcaatctcaaaaaaaaaaaaaaggaaaaagcactggattggaaaccactgagtaacattagcaactcatttgagtccgtggttcctcatcagtaaaatggggttaataatgactatctcacagtgttgaaagataagagaaagggatgcaggcccagcgcccaggaagtagtgttaggaattattagtcctcgcctaaaacctgctccctttctccctaatccagtctccacctgcccctcccccagaaaacccaaattccaaatggctgagaaagtaagaggctactaatctcgccttcctctaaatctctaaaggaagaagacatatgtattctaggctccctgaagcacaatttttttgagtttggattctccaatatttctcccacataatatataattgaatcattatcttctagctataaaatcaggtcctgggaggaaatgttaaatttacacaggaaactggagtcagtcaaggtcattttgtccagttcttccacccccttattactccttcctgccccgtgtctgggaaggccaggtgccggcgtatgggatgcagacttgtagtaaatgcagacagagctacttctagctttggctacattgacttctattccacaaagtgactctagactatactactttcaacgcacctaaacactctttcacttaaaatatttaggtcaagccagataaatggattcttttaggaaaggccctgattaatctctctaattctttgctttctctgggcagcatagatactaagctacaaattcctttgtgtttgagatcctcagagcttcttgaggccatttgttcttggagatgatttccaagactgaagatggggtgggaaggttgggtgtcctaaaaggccccaactcagcccctctggtcagtaatgacaaagcagcataaggatcttttaaagagattggcctcaggtcctgggtcggaaggaggaatgtgaatggaaatggaaccgagattgccctgcactccactgccccagaacccagactgggcaaaaggttcttctgccaccctgtttacatttttgagcaaccctcccacccttggcaccttcaattctatttcctattttcacgtagacaccctcatcttccaaccaagctggatagccctacatggctttaaggagccgacttaagcaaagaccagtgttctcaggtgacttcctccaaactcccccacccagccatagctgtggacagcctgtgggaaagtgttcaccagctcccgctggagggagaggcctgggccgggaggcggaataaccctgcagctagatttcaactgatttctcccttagatcagcttcccaagcagtgacccagactgccagaaaaggccccatcctgagcggggaccaccagagggcaccacaatgaggcttccttgctccccctcaactctgctgggggaaaaatatggcacctggctgaagtgaaatgggactgtgactcctacctgtgccgactggggtgctgggggggtgaaatgtcgcccgaaccagtgaggtctctctcctcctcttgtatcctctggtgctggtcagtcctcgcggctctagcccctcgctcaagcctctccctcccgcccgtgaggccggctttccccgggcccctctgcgcagtgtatggggttatttttactttcggttatctagctttatgaagactccacaccactcatacagctagataaccaaagataacaaccaaccccgcctcctggctgctgtcgccgcctcttccacgcagcctcccggccgccgccgccgccagcacctccgcagcttcccggtcgcccgtcagcgggagtaggagggaagggacacgagtggagttgagggggagggtgaagagagaaatgaagtccgagacaaaacaacaacaaaaacctcagacacggagatacagacacgacagagaccgaaaaaggcgtggaaaggacgcgatgacccgtggcgtcgaagtcggggagttgaccccgatccagacccaaaaagtttctggtgccccatttcccgctctcccattcgggccaggagcaggagttccgctggtcccaggtggaagggacgcgcgggcttttcgtgccacccgggaagaccgcagcgacccaggcagaggcctccccagcctcgccgggtctccactgcccttctctggaagatcgagggcgcatccgacagccagagccctgccttcggcggagcccgagcctggcgcgggatggaaatggggagccgcggtgccggcccggccacgtcgccaactcagaaaggcgttggaagcgaagcggagcccttgtgggggaaagagccggattcaagaggccgactaaaaggggaaatgggcagccaaaccccggaggtaaaaaccccagagatgtcctaataggaagcagggaaatcccggcgacccaaagagagaggaaaggctgtggggggcgggtgggggcgacccagagactcccaagcgagtctctcaaggagagaaggaaacagcagagaccccacccgggaagagatccgggagagtacccatgagaggggcggaggggaggaaagcagagggcgacagggcaggtgaccagagtcccaggccctgcagagccccggataaacggctttgttcaaagaggaccagagatcacccagggttgtgaaaatggccgggggttcgaggcgagcggtgctctaggggtgggaaaggggtgcgatcaggaacgggaaaccgcagccccgaagagggtgggggctcggccggcccctcgtggcggacgcgcgggcacgccggattccgaggcgctcgcccacctcgtgctccacgctggccaggccacttacatcgagcccagggtgcccatccgtgctctcccgcgcggtcctcccggccagttcccgcccctggagcgccagggccctgagttccagatgccggggctcagcgggcgccgggcagaggaggctgccctgctcttagcctccgccgagcctaggcgagcagggtggagcgggtctcacctcctagctccctcctctgcctctgccgcggctctggccccggcgcgctccggctccggacttttcattcatcctttcacactccctccccaggccatcctctgattggctctaccgcgtctgacgtcaccagctcgttccccgccggccccgcccctcccccttcccgggccggccggggagcgcaattggggcgcccctccccactggagaatagggatcgggggactactacgtctctgtgctgattctcagcctcttgctgcctcactcacccccgagacccgcctgccacctccaatccattgccatttgtggttttgatctccaacctcactcattttgtaggttctacattttccattttggccctaggtatgctgcaccaacaccagggcacaaagatggaaaagaggtcaggtgaaagcccctcagaaagaaccagatgactgcagactctactcctatcgcctcctcccatcagaatattctttgtgcttctcgggttctgatccttagcagactgtgatcctaaccttttagaatgggcaggaacctgtcttgctggttttcaacccaaaacaatgagggaaagatcctggaagtttgggattcctacagggagatgcgggggttgagcggtgctgagcctccttttccgccttgcagaaactggaatatctcttgaatgtgttcgca

SEQ ID NO: 1879813 - DNA, 4001 bp, Homo sapiens
tcccaagtagctggaactacaggtgcacgccaccacacccagctaatttttgtatttttagtacagacgaggtttcaccatgttggccaggatggtctcgatttcttgacctcatgatctgcctgccttggcctcccaaagtgctgggattacaggcgtgagtgcgcccagctggtactctggttttaactgttcccagcttcctcaccagacatccagaactctagctgagttgcccctttagatcacaagtaattttctttataaagatcatccatggtttttggaaacccactcatgagatgaaagtagacgcccagccaggcttggaggcaacgtggaagacagagtgactcatgggctcccaagagaagggtgaatggttctgctccaagggtggagaacagctttgctcttccagctgtggctccttccatatttatctctccagagagagagggggagcacaagtcagggagtcaatgagaagtggggggatccaggggtctggggaagggcatctggctaaagccctgcagcttgaaagagtgactatcccaagacaagcagagggtcagaaaccaagccggtagaacttgggatggacacaaagatgaacaagtagttcaaaggcaggcaggaacctggcaacaaatactgagaatcaggcagcagggccaatcgatcagacaggcaggagccctgtgagttataggacttggaacaggacatgccaggcaggcaggacaacagtgaagggtccacatagcccaagaaacatgaggatgcctcctcctctacgcaggtctccagggagggtagaagcctggtcccagtgcaagcttagagaaggagggccaggctgcaacaggactatgtaagggggaggtggaccacatgacatcgccctggattcccagagtcctcatgacaggaagtgtggagtggtacagaaactacagctttagagtaagccaggcaggcagtgatggcaggatgctcggaggtatatactcgtctccctctgcagtcctccctctataccccccttagatcccaacaagggcaaagcaaaatggggtgttgcctagacctgttccctcccattcttccccaaccccacctcctttagggtgagcagacacagcaccatttgatcatgcccctatgctgaaatgcctcaataaaacaaaacaatgacaaaagaattgactgaaaccaactaaaagccacaacagagacagggtctccaggctgctaggatatccctctcagacttctcccatctgttctgctccacagaggcctcccagctgagccctgctgtcaggggagggcccctggccccctcacaatctgtcatctttgacgctacttggatcttatttcttctagagctgccaggggctaggaagataccttgcctgtgtgtgggtaggggccaggagggccatgcatgccatcagcaccagggctagggtaaggggggtattgaggggtggaagaaagggattctgggttgttgggaatcccggctaaatctcaatttctccatactttccccttcccttgggctgccaagccctcccatctcctgccatctgtgacaggtgtctctggggagaccctcttctttcttgcttgctaatcactgcatatagacactgaaaacaggctggactctctgctcctggcaactgtgtagacatcccttgggctgatgtgagttcctctctgtgctgccaagggatggattcttcctgcaccctgtgcactttcctttcctgggcaggtggccatctctgcctgaagacctggaccctcagcaaacctggctggggggcaggggcaggcagtgatgaaaaaacagggggaggtgaccactgactgctgctttgaagactaggtgtgctgggtgcctccagccctgacccacagaattagccagtgatccaggcccatggacctgagtctgaatcctggttctgtccctcactagttgtggcactgcccttttctgggcttcagcgtccccatctgtaaaagaagcaaatgagctagatgatttcccgcaccatcctaacaccctgtaagttaaaaatgattctgttgatctaccacttgcattcttctggccatttctctactctttaatcaagaccctgctgtgactggtagctggtaacagtcacctgtgaggtagctgaaaggacagaggactgcctctggtgctgggatggtcccctgggtctgatcccaagaccctggtttcattactatcacatcctgagcagctgagtgaaccaggcagctgggaggcaaggagactagtcatttccaatttgatttaaaccttttgtttcccaagtctcctcagcaaggacgaaagcaaacactcaagcaatatcctgaatacttcctgatcattcattcatttggacattcattcattcaacccttatgaggcagtacaacatcataaggagtcacaggaattagtttgacctgctttctaaatctggctctggcactacttagctgagtaatgctgggcatgttatccgaccgctgtaggcctccgtttcatctctaatatgaggaaaataatggtgctacctactttacagacagtgcatctaaagcatctggcacacactagttgttatcatcatcaagttgagtaagttgctcatggtttcacggggagacagacgagcacatagctgcccatcactcagtgtgtgcaggtttcttagcaaaagacaggctccttggttctgaacgtcaagaaaataacttcaacaggaggttgggggttagtttgtggcacaaatcactcatccttcctaaagaaagtgaagatggttcgtggaagcttgaaacagattctcaaatcattaagtgataacaaaaaatctattcttgaattgatttgcccagctcaggtgtggggactgccattttggaatggaggctcagcgtgtgtggtctcgggagagggaatagaaggtaagtaagatcctgctctcacagaacgggcatgtctgattcccttcacgcctctcttcccctacatatcccagcctgagcccccatgcagagggcaaagcaacatctaatttgcctgtttctggcagctcttggacttgccaaagcctgtacctgccgccacacatgccccagaagcctctgcctgctccttcgggatgctgcagaaagtgctgactgcggatgccgatttaccgcttcccattagccaggcctctaacagcctctgagagcctgtgccggacacaggcccaccagccagctctgaaaggtcaggccccaggagcaggagccagccagaggctttgcgaggcaggcctcgcacagtgaccctgttgatgtgccatcctttattttgttttaataacaaaatggccttatttatcttgttttaatctgacagcctgaaaatttctctttgcgcttgttgaagacatttaggtggtcctgtttaccctctcttgtcttcagacatcataaatgatgcccttaaaagtgtccacatgctgtctgagccagaggtgcccaatgcacatggctctgaggatgacctctcccatccctgactcccattcttggttggctgatcatggactcagtatggagggcactgggagaggaggtgggatgcctgagcatcaggcctgagtctaccagtgcttgccaggatgaccttgggcacataatttaatctccttaggcctcagcttgcttatctgaaataggaataactgttgtcctacatgtttcatgattattgtgaggttaattatgagaggtccccttataaagaaaacaaaaatcatgaaagggacctgcaaagaataaagtaccttaaaaatagctttggacacaaatgatttcaggtgttggtctcactgtccccctaaggtggaaattgcacaaccttcctgagcatgaacagcatggctcacatgctccagcatcacccc

SEQ ID NO: 1879814 - DNA, 4001 bp, Homo sapiens
cgaaatgccctgtggcatactggccacacccctgatcaggtacgactgctgtggacagacccacgaaatgtgggctggcgggacaagacctcctatcgctggcagcttctgcaccggcctcaagttggctacattcggtaaggagaggggctgagcccacctgtgggactcaggccgggcctgtccttcctctttagctgggattcaccagtgacctctccatgggtgggaactgcagccacttctctccatcacccttctcaccacggacacaagcacctatgagtgatgttggtgaagtcactcctccatgacccattttcccgtctgtaaaatgagggcattgggttagatgccctttacagttctccagaagcctccaaacccaggccaatctgtgaaggggcacatcacatctggtcccttagttggtatgacctggaacctgtcttatcaacgtggatagggatcatctgacctggaaggcatcatcatttacagaagagaaaatcaaggccctgacttcacaggcctcggttcaacactttgtccacaactttgcatttctctccaacaagtagccctagttggtggagatgaacaggaagggaggggaaatgggtctgcttagaggctggactttccatggccaagagcccagagtccaggaacctgggttggttcccctttaaggtgcctggggctgtggggtgccaggacaggggataaaagggggtggactagagcctgggaagcgggtgacttcaccccccagcccattgtgcttattgtcatggcaacccaatcctcgcttggaatgcggctggtgctttgagatgcaaaaggagctggacaaagagctaggggccccaggcctgagaaaagcaccccccttccctctccttcctgcctccctttccctccctcccttctctctcaggcctggtgagctcaaggggggctggggaaaagcaaggccccaggcatggtggcacagtgcccactggcaccctagcaccaatggatactcctatcctggaatcctggacagggtgaagctctatgagggaccccagcttgtggcggattctggggtgatcattgacacatccatgcgaggggggcgtcttggtgtattctgcttctcccaagaaaacataatttggtccaatctccagtatcgatgcaatggtgaggtggctgattgagatcaacctaatccttcatgccttgtgggagagccacatcctctgaccttacttatttccccttcttcagacacagtgcctgaggactttgagccattccggaggcagctgctccagggaagggtgtgaggaggaggccaccagattcagaattcagaattttagaccctttggccttggggtccatcctggagaccctgaggtctaagctacagcccctcagccaaccacagacccttctctggctcccaaaaggagttcagtcccagaggggtggtcaccccacccttcaggggatgagaagttttcaaggggtattactcaggcactaaccccaggaaagatgacagcacattgccataaagttttggttgttttctaagccagtgcaactgcttattttagggattttccgggatagggtggggaagtggaaggaatcggcgagtagaagagaaagcctgggagggtggaagttagggatctaggggaagtttggctgatttggggatgcgggtgggggaggtgctggatggagttaagtgaaggatagggtgcctgagggaggatgcccgaagtcctcccagacccacttactcacggtggcagcggcgacactccagtctatcaaagatccgccgggatggagagccaggagggcgggggctgccccgctaggggtagcggggaggccggggggccgggggggccggaggccgggacgagtgcaatattggcgggggaaaaaacaacactgcaccgcgtcccgtccctcccgcccgcccggggcccgggatcccgctccccaccgcctgaagccggcccgacccgggaacccggggcgcgctggggagttgggttcaccttggaggccagagagacttggcgcccggaaggcaaagggaatggcaagggggaggggggagggagaacgggagtttgcggagtcccagaaggccgctttccgacgcccgggcgttgcgcgcgcttgctctttaagtactcagactgcgcggcgcggagccgtcgccatggtgacgcgtgtcccagcaaccgaactgaatggctgttgcttggcaatgccgggagttgaggtttggggccgcccacctagctactcgtgttttctccggcctgcgagttggggggctccccgcctccccggcccgcgctcccgggcgcgctgacgtcagatgtccccaccccgcccagcgcctgccccagggtctcgccgcacacaaagctgcgcctcgggcgccgcgcggcgcgcgggcgagagctgtggtctctcgcctgctgatctgatgcgctccaatcccgtgcctcgccgaagtgtttttaaagtgttctttccaacctgtgtctttggggctgagaactgttttctgaatacaggcggaactgcttccgtcggcctagagcgcagcctgcgactgcgggacccaagttccacgtgctgccgcggcctgggatagcttcctcccctcgtgcactgctgccgcacacacctcttggctgtcgcgcattacgcacctcacgtgtgcttttgccccccgctacgtgcctacctgtccccaataccactctgctccccaaaggatagttctgtgtccgtaaatcccattctgtcaccccacctactctctgccccccccttttttgttttgagacggagtcttgctctgtcgcccaggctggagtgcaatggcgcgatctcggctcactgcaacctccgcctcccgggttcaagcgattctcctgcctcagcctcctgagtagctggggttacagcgcccgccaccacgctcggctaatttttgtagtttttagtagagacgaggtttcaccatcttggccaggctggtcttgaacccctgaccttgtgatccactcgcctcggccttccaaagtgttgggattacgggcgtgagccaccgtgccacgcccgatctgcctcttaagtacataacggcccacacagaacgtgtccaactcccccgcccacgttccaacgtcctctcccacatacctcggtgccccttccacatacctcaggaccccacccgcttagctccatttcctccagacgccaccaccacgcgtcccggagtgccccctcctaaagctcccagccgtccaccatgctgtgcgttcctccctccctggccacggcagtgacccttctctcccgggccctgcttccctctcgcgggctctcgctgcctcacttaggcagcgctgcccttactcctctccgcccggtccgagcggcccctcagcttgcgcggcccagccccgcaaggctcccggtgaccactagagggcgggaggagctcctggccagtggtggagagtggcaaggaaggaccctagggttcatcggagcccaggtttactcccttaagtggaaatttcttcccccactccctccttggctttctccaaggagggaacccaggctgctggaaagtccggctggggcggggactgtgggtttcagggtagaactgcgtgtggaacgggacagggagcggttagaagggtggggctattccgggaagtggtggggggagggagcccaaaactagcacctagtccactcattatccagccctcttatttctcggccccgctctgcttcagtggacccggggagggcggggaagtggagtgggagacctaggggtgggcttcccgaccttgctgtacaggacctcgacctagctggctttgttccccatccccacgttagttgttgccctgaggctaaaactagagcccaggggccccaag

SEQ ID NO: 1879815 - DNA, 4001 bp, Homo sapiens
cactttgggaggccaaggcaggtggatcacctgaggtcaggagttcaagaccagcctggccaacatggtgaaacctcatctctactgaaaatacaaaaattagccaagcttggtggcaggagcctgtaatcccagctacttgaaaggctgaggcaggagaatcgcttgaacccgggaggcggaggttgcggtgagccaagatagcactattgcagtccagcctgggcaacaagagcaaaactccgtctcaaaaagacaaaaacaaaaaccaaccaaacaaaaagaattctctttgtataactcagaacagttaattatgcggctctgatgtgaccagcttgtacctgagggcctctggagtggttaaatgcctctaccaagtccattctctgcttgggattgacagagccatcgatggtggcataagtcagtccatgcttcttcaggtgcaatgctacaactttcagcatgttggtccactgagagacaatgacactggaaagaagaataaaataaaaaaataccctaacatagattaaacagactcatctgcagggctttaatgccctcatcattcttaaggttagctatcaaatgttgacaaggaaaggccttctgctacctaagggagaaggcacacatttaggtcatatctgaagattataatgcttccagttatttctaggtcctttctacaatttatttagtgctaaatgaagtcagaaaaaaatggtagctagagtaaagtgatgactccagccttctttcatttggggtcctagtgctcatccagaaatctgtggtcctgcacaaaagggacacactgaccacccttcttgtgccagccagaacaacaggctcctccctgcccccacgctgtcttaattcgagttctaaatttttatattgaattattttataaataatgcaggtgtatagcacatatgtcaggtataacaaatgagtccttgtatccaagtactcagcttaagaacgttatcagcactgctggagcctcctcactcgcttgcttttctttatatgcttctctacttttaaacactttttcagatgcttcgcttaccctgatcctctagggatctccttttcaatttgtaccacaaatattttaattagaaatcacagggaatgtgtgctataacctcagtgctttctgctgagcatgactcacagtccttgatttataactcttggcaatatcaaattttctcacataattatgaccaatacttggataatgagaaaacgcagttacctcttttgggatgctgaatttctttgaattgcctccaattctgccaacagagatgaaatctgggaaaaggttacatcaacattgtatgtttaagcaattcacttttctccatctcccctcacctgccatgcgaagcagcctcctacatggcgtctgtgctctggcctcacctgtctttattccaccctcctctctgcagccagaaagctctttctaaaatgtgagtttgtcacttcacccctctggctaaagcccttccatagcttcccactgaggataaaggccaagctcctcaaggcagcttgccggattcttgctgctccagcctctgcttctctgggttcgtttctcaccatgccctcctcaaacgacacagcaagcacaccaaaattcttcccataaatcacacactggccatcttgtccattctgctccctctgcctagaacacccttttgtgtcagcttaatgtcacttcttcttggaggtcctcccaacccccaaagtacaggttaggtgcccactgcccaagtactatcatagcaccttttgtttctattatcacggtccttgtcatactgtatattaattgcttattatctcttgcttccaggacttgagacactccaaggaggcaaatattaggaaagtaacttctctgtttcggccatgtgtgaggggctgtgagtacacacatggccaaaacagagaagatactctcctaatgtttgctgaagaagaaagtgaaagagctttacccactttatggcctgctccaaatgttgttgaaaaggacctgtccagacggaggaaccattgttaaagcttccgaacaggctccctgggtattccccaagaacccttagggtgcacttgagtccacaggggagctgtcagtaagaacacgtggggcatgactttggagtgcagctgggctcattcttcccagctgctcatgtgaaaaacctttcaagagcctctaagggccccagagttcacccccagaatgctggagaaggaagaaaactgggctgtaagtcaatcaggagacaaatatacagaagttcttcctctgtcctcatatggctggaccactttgggactcagattcctcatcagtgaaaagaaggacttaggccagataaattctgaggtgccctgagctcccacattctaggatgtcattacagtggtcaccacatggggctgctttccaatcttaacaaacattctggtgcctaggcaggaagtgagtcacagaactgtaccattcaaattagcagacagaaaagcagctacatctgttatttagttaacaatagaacagagacactgatgtgcctggtgtcttggcaacttgagattgtggaaggcgctgtgactcccacatgaaaaagctagccatggtgttttgagaaaactgcagcaggagggctggatttatggcccacgagccggggtcaaattccagtaagaagcctccttccctacttgaaacaaccgtatgtggtttgaactattaatggacatatgttaagaaaacttgtgaataaatattacctgcatttaattaaacaaggaacacaaatgattaggaatttaaattttagcccaatagctcactctgaaggcactagcatgtgtgttctggccacatgggatgctcttcttatgtttctctcagctatcagtggtaaagacctaggtaaatgttttcaaattttaattaaaaggcagcattccttttaaaaaataatgccattcccctggaagtgacctttctagttattaatacactttttcaaaaaaagcctttgaagagaggttgagcccaagaacggcagcttgagatgctaagagagaaacaagcctcactttcaagacaggcaggatgatgaagcacattccgagccagcagacaggcaggattcaggttacggcatatctaagccttcctccagcagaatgtttctgccttaaaaagctctgacgaaaacagagcagaatgactaatgaagacagaaggctatgtaggaaacactactcacatgtggaagcctttcaaagtcagagcaattggcgctcgcatgtatgacacagtctctagagtcaagcctttgttttccttttaagctttctctaaacaaattgctcacttgcataggccccgtccctagcacaaacctggcaagctccccagtgacccatgacagaaaacccacttcagtgcaatgctggggttgtcccaaattactctctcaaagtcccctatgtagtaaggctttagtgttatctgtgaaataaatgaagctttaagactggagggagaatctgatcagctagaatttaacggctctagctctgctggcaaatggctgttcccacttggacaaatgaagtgctgtcacacaggaaaatgtgtgaggaatcgaagtctctcgactactacagaggagacaaaaagtaccttggtgctctctcgcatgccttcaaaaagctccatcttgaagaaggtgccgttaagggaaacagtggaagatggctctgagtcacggagttctgacaaggtcaaagcactgagctgttcttccagggaaaggacaagaccttcacccttcagttccattggatccagggcctgaacagacaaaaaaggacaggagcagctgggagtcaagggagcaaaccttgttacttgttgatgatgttttgattgtttaccactt

SEQ ID NO: 1879816 - DNA, 4001 bp, Homo sapiens; identical to SEQ ID NO: 1287

SEQ ID NO: 1879817 - DNA, 4001 bp, Homo sapiens
gcagcagctcatctccaccagataggcaggcaactgacagtgtgtgatatgttggcctgtgtctgcaactgtctgtgtgcaatgcatctatgcatctgtgtttgtatttctggatatgtccggtcactgcgtgtgtgtctgtgtgtgtgtgttcgtgcatgcacatgggctcagagaggaagatgatagatcccaggaatcagacacaggagctggaaagccatgccttcaggcttcatcctcaaaccttgtttccagcttggagactgtgtgtgtgtgtgtgtgtgtgtgtgtgtgtgtgtgtgtgtgtgtgtgtgcgcgcgcgcgcgcacgcgcacacgcacatggacacatgtgtgagtatgcatgtatatatgcctgtgtctatggtgaggacaggcccatggattggctagggtgagggtgatggtagctctttgggctctgggtatgcagaattcagttggcagaagctgagagctcccaaggtagtgaataagccccagccggcgatgagtaagagtgatgtgggaggttcctgaggatgcgggtgctgggaagagggctggcccagatttccagggactgagagggaacagaagggctaagactaaaaggaacagaggagttcatagtgagcggtaaagagctcagactgagcaagtgaggggctcagcctcccatggaggacagggggctggggcccctggctgatgtctggactgaagcccccacgcccagaggttcttgggcctttggaccaggaatctggagccaagaggcctggcagctacctctagtcaagcaactgctcttgtgcaacacaaacatcccagaaccatgggttgggggcagaggggggtgcaggctgacctgctgacctgaagggacttcagacagagactccctctccaggagctcttgccttcacctacttaggaccacccccttgagcccaaattttttaaataagcaaacatctctgtacctttcagtaaacagcaattctaatgagccaaaaacatgagcttttcaatctgacaaaactgggtttgaatcccagctttccctattgcagctgagtaaaccagagtaagtcccttcacctctttagcctcggtgtcctcactgtgaactgggggcaggactgcaacagctcacagggttgtagtgaaggttaaatgtgctaatgtagggaaagtgcctagcagagagttgctgctcaatatgagtgcccctccccctcaacaagaacccctgtgcagcagctgatttcccagggaaataacggaatcccagcctaaagcaaataatctggtacaatgagcaggtacagccatatacatttatatgtatacctatacataaatgtgccatatatacatatatgtatacatatatgtaaatgtgccattttatgagaccttttgatacactgacagtaatttctaaacaggtcctcatttccacctttacaaacctcaagtagttgagggtggggcagcagattgattgatgagggacctcagtttggggacaataacctcattatacccctcccttcacattcagacaacaaaggcccagagagggaccccagctctcccaggctgcccaaccagtgtctgctcctcccccaaactgcttgtggactggactccccatgcagagaccatgaggcctccctaaccagaggcagggcagcagggagggtgaattgcttggccagggtcatgggcagctgaatggcagtgttcagagccctggctggttgggaaagggcctggttctggtctggcttggccctagccctcctctactccaagcttcagtttcccacttctgaagatttagggattgaactagatgatctccatgggctcagcagcttggagtactcactaaagtgaaggtcttccagtcctcgcaactcaagagtcagagcaatgtccctccctcctgctcaggcactggggttgaaggctggacttggaatgaaatagaaggggcttagaggactggggagagcaatagcatcaactcagagtcctgcttccataatccaataggccagcctggaagtggcacgtgtcacaattccctggccagaacgtcacacagtgccacctaatcacaaattagccagaaagtacaatcttaacctgtgctcagtagagtggaaaaccagaaagatttagtgaacagtgccaaggacaccccacaacagagctagccagaacacccacaacaaaatagaaccaacactgcaacagcagccacaggaggccacagtccaccagatgaaatggtggtgcaaattgaattacaacagctgagcagcctcaacacctcacccctgcacactcccagatcccaattaaccagggcggagggcaacctcgggaataagcccaacacccacatgttcttagtcctttttgtgcccagggcagaggtccttttgtcttatagtcactctgcctcccaggagcagataagaatcaatcattcattagcaattagcacttagaagctcagcccctgggctggaattattttctgttgaacctagtttgctaaaccaaggaagaagcaaagtgatttttaccttccttgaaccagagaaaacctgtcttcctctgtggttgacgtttgagcagtgtaagttctaattacaggagcttatctacagggcctcagaagagcctgtgccctgtgcctcagtcattcaacaaacatttagcaaatctagcactgtgctaggttgagagctcaggctttggatcagtacaccagatttcaaatcctggcaccacactgcaattgagcggtttgggatgagtttacttaatctttttctgtctcagtttcctcatctgtaaaatggagatgtaaaagtaatacttaatcttatgttgtaaaaattaaattggatattattataagtgcttagcatagcataacttagttgtagatctaattgtgctaatttcagattatcatctagacttctgtttctggctaaagtagactagcttctatcagaccaatttacctgctgaggataactttaaaagctggattaagcatttaagaaatctgtttaaaggcatgggagagctacgaaggcactgaggacttgagggggccaagattgtggagagaagtaatactagattttgatttttccctaaaggcattttccagtttgtaggaggcagtggtcatgagactggggagtcaaatttgaatttggggactaaaaagggaacagtttttattgggaagaccaaagaaacactctaggaataatggctaaccagatatagactagactcaggaagactggaacaaagtttccaatcagtataatcctcgattgggttaaagtggcctgtcctcctttaagtgcctgtcagaagcaaaagtaaatcccctctggagaaagatggcatcattcagagcctcatgctagctctgtaagtttttatacacaatgttggacattcaataaaaaattatctggcatttcaggagataagaccaaatgaacaaaagcaataaaacagacaagagcaataaaacagacaatagaaacaagcccactggagatccagatgttggagttttcagatatggactctagaaggtttaatatgttcaagaaaattaacaacaagggaatctttcaatagaaaactggaatctatgaaaaagaatctagtggaaattccagaactgaaaagttataacaaatgaaatcaataactccgttgatggatttagcagcagaaaagacacatgtgaaaataggattagtaaactagatagtagaaaaatatttcagtagaaaaatatccagactgaaacagaaggaaggaaggaaaagcctagaaaatatagaataaagtgtaaaagagacatgtggggcaatagcaaatggctgaacatacaagcaatgaaggtcccagaaggagaggagaaagagaatggggaaaaga

SEQ ID NO: 1879818 - DNA, 4001 bp, Homo sapiens
tccgctgtgcggggaagcaggggtgcccagccccgaggacgcccagctctcggtggaccaggggctggggtgtccacctgcccagactggctgcccgctgccctcccaagaatgagcgaggagccatcagagagaaagtgctttatcagccgggctcagccccgcacacggactcgccaggagtaggtggtcagcacgcgctgctggcggcgcaccacgcaggtgtaggtgccctcattgacggcgttggcgatgatgctcaggtgcgcctcgcccagggccaggtagccggggtaggagaactccaggggctcctggtccttgtaccagctgcaggggggcggggcgtctcctgcaggcacagccccccccccggctgcctgccccgcacccctgccccaaggccgcccgcgggctgcccaccccgaggaccgcccggggcgctcactcactacactttccctttcttgtggaggatcttctggccgcagcggaaggtcacgttcctgccctcgggcaccagcctggttttggtcctggggggcggtggggtggtggccaccgtggggaaggggaattctgctccgggtgggggaaagagccccgtcagtgccccctcagccccgaccatggccaaggcccagctcccacgcagccctgtcccggccccgtgggcatcaccgtagcagaagtcgcagctgctggggcagagcctcttcatgagccgccggcgagcgtcgcagaagcccctccgcgcccaggacgcgcacacgaacagcctgtcgaggcatcctatcgggagcgtggggagcacggcctggctcaggaccgcccggtccccgccctcccgcccgacaaagggactcaccgtagagccggtgcagcccccacagctcgtcctgggacaacgccttccagccgcgcagcgtggcgttcaggtgcatgagcgcccggccgtgttgtgagtgcatcaggcccagcgcgtggccgatctcgtgggccgccacgtgcaccaggtccgtgagccacacgcctgcgggccccgggggtcagcgcctgggagccccgggcccagccccgccgcccgtgggccagctccccgaggcccggtgtatctgctggagcgcagccgcggagccgccctcggccgcagccacggaaagataagaatgttctgggcccaggcggtgagctcggcccccaggaatgcagctccagctcccgctccagaggcgcagggggatgggaaagggagttcagggctgccgggatgggggctcccacgggctcccctccttgcctgctagactccagtggcagccaccaccccggaaggtccctcctgccgtctgccccaaagcccgaccgcggcagcccactgtgctgcagaggagaggcctccaggaggccagcctggacggtcacctttcttccagctgtagcgcgtggggcccaggacccagtactcgctgtcgtcgaagtggatgccgccgtgcggggggaagaaggcgtgggccagctcccccgtggggccgtcgaagcagtggtgcagcgcggagaccaggcagtccgtgtggttgatcgggtagaagcctggggggagcacggggctgagaggccgggcgcgcagggccgggccggggcgggggcgggcgcccacctatccggaggtcgctgggctgctcgggggccacctcgcggaagctgaagggggacacgtcgctccacatgcggaaggcggcagctagggcccgccgcgtctcccgcgggctcagcaggttccgcgggaaggagaggatcctgcagggagagtgagctcagcgggcgccggccgcgccccctcccccggggcccagccagggcgcacctgtaggtgaggttgaagtggtcccagcgcagcctggctggagtcagcgtgtagcggcgtctgcggggggccagtgggcccgggacccgggtgggggggaccgccgagaggcccagcgcagcgacgtctcccttcagggaagaaagcgtgcgtgggaggcatcggtgacggtccccaggaccaaaaactgccgcggaaaatggactggaaggaaacgggggtgggggtgcccagggctgggagcgggcgtggcgggtcctgtctgcctgtggtttcgggtctcctaacctgagcgccctgttgcacgtccctgggaacgcggcccagtggaggggaaggggctgaacagcagggcgaggcctcccacccctcccaacaactggacacaggggcgtccaaccctccgacctcgggacgcacatccggaccctcaaacaccccgcacaccccgcacacgtcctgcgggccccccgatagaccagacccacagacgtgaggacccccccaacccggcacctggcctcccccccgccgctcacctgcgctgcgctccaggccggcaccgccggggcccccagccgggccagcagcaccagcgcggggaggaggcacagggcgaccagcgcggctccaagccagcggcgctcgacgcctgcccccggggcctccgaggggacacgggccccgcggcccatggcagacttgctgtggggctcagggctgcatggggcagcaaggcgcgggggcccgggccgcagagcctccggggaggatccggaggggaggcagtggctcggcggctcgggttacagcccggtgtggtgggggggagggagacggggcgggagagggggcaaggctgcccctgaagggaaccagctggcccgtccgttggccgagctgcctgctgtctccagccgggggcatggggacccgcgtcccgtgggccaggggcagaggcctgggcatggcctgctgggcggggtcctcggaggggggagcgaagagggccccaggcagcccgggaagggcagcgccagggctcccgcttaggaaagggtagcagtgggggtccccaagcccccactgctgggcagtgagtgatctggtggcttttttcccaaatggaatcctcaaaaaacccctgagccccacatgagcggagtctccatcctggcccaggcagctgagctgggccgcaggagacgcgtcgctcgcctgacagtgtccccgagagctgggaggggatggccggatggggacgtggcagtgagtatggggcggtggagggggaggcggggagggggtgcgtgggtaggcaagggccgcggagggtgccaggttgcggggcggagggagggaacttgccagggtctcccggggagccgggaaggggcgggccctggctgcgggaagccccgtggagggtagcgcgtgaggtggagggtgtgtggctcctaaatccccggctaggccccagcaaaggggagagggagacgggagggacgggaaacggagctaagcgccgggcctggaggtctggaccggtcctgattgggggcgggggcggggagctcggagacccaaaggttcgacggggcggccggcgtccaggcgcgagcggctctgggctgggaccgagaccgggcaccggcgtcccgcggggcgggggtgggggattgggcagaggagcaggagattccgagccagaccggcctgtgtctgtctcgtccctccccgttttccgcgccggcgtcgggcccagggtgacggcagcccggccaacggggtcagcgccaagcagctggcggcggccgcgggcggttcttggaaagcgcgagaggctgggcctggccgccgtatttgctccgacaccgccccccgcccccccagctcgtcaccccgcctgcgtgcgcccggcccccagaccctgcctgggacgccccccaactaactccctgctgggacgggaccccacagccctggggagtgtcgggccccttggatcagagcgcgagtccccgcggccgcccccaggacggaagagcgaggggggcccgggggcagacacaggagtccccgccccgtcggacccgggcctggggggcgggaggcggccgtgcccgcgcctgga

SEQ ID NO: 1879819 - DNA, 4001 bp, Homo sapiens
ggtccgctgtgcggggaagcaggggtgcccagccccgaggacgcccagctctcggtggaccaggggctggggtgtccacctgcccagactggctgcccgctgccctcccaagaatgagcgaggagccatcagagagaaagtgctttatcagccgggctcagccccgcacacggactcgccaggagtaggtggtcagcacgcgctgctggcggcgcaccacgcaggtgtaggtgccctcattgacggcgttggcgatgatgctcaggtgcgcctcgcccagggccaggtagccggggtaggagaactccaggggctcctggtccttgtaccagctgcaggggggcggggcgtctcctgcaggcacagcccccccccgctgcctgccccgcacccctgccccaaggccgcccgcgggctgcccaccccgaggaccgcccggggcgctcactcactacactttccctttcttgtggaggatcttctggccgcagcggaaggtcacgttcctgccctcgggcaccagcctggttttggtcctggggggcggtggggtggtggccaccgtggggaaggggaattctgctccgggtgggggaaagagccccgtcagtgccccctcagccccgaccatggccaaggcccagctcccacgcagccctgtcccggccccgtgggcatcaccgtagcagaagtcgcagctgctggggcagagcctcttcatgagccgccggcgagcgtcgcagaagcccctccgcgcccaggacgcgcacacgaacagcctgtcgaggcatcctgtcgggagcgtggggagcacggcctggctcaggaccgcccggtccccgccctcccgcccgacaaagggactcaccgtagagccggtgcagcccccacagctcgtcctgggacaacgccttccagccgcgcagcgtggcgttcaggtgcatgagcgcccggccgtgttgtgagtgcatcaggcccagcgcgtggccgatctcgtgggccgccacgtgcaccaggtccgtgagccacacgcctgcgggccccgggggtcagcgcctgggagccccgggcccagccccgccgcccgtgggccagctccccgaggcccggtgtatctgctggagcgcagccgcggagccgccctcggccgcagccacggaaagataagaatgttctgggcccaggcggtgagctcggcccccaggaatgcagctccagctcccgctccagaggcgcagggggatgggaaagggagttcagggctgccgggatgggggctcccacgggctcccctccttgcctgctagactccagtggcagccaccaccccggaaggtccctcctgccgtctgccccaaagcccgaccgcggcagcccactgtgctgcagaggagaggcctccaggaggccagcctggacggtcacctttcttccagctgtagcgcgtggggcccaggacccagtactcgctgtcgtcgaagtggatgccgccgtgcggggggaagaaggcgtgggccagctcccccgtggggccgtcgaagcagtggtgcagcgcggagaccaggcagtccgtgtggttgatcgggtagaagcctggggggagcacggggctgagaggccgggcgcgcagggccgggccggggcgggggcgggcgcccacctatccggaggtcgctgggctgctcgggggccacctcgcggaagctgaagggggacacgtcgctccacatgcggaaggcggcagctagggcccgccgcgtctcccgcgggctcagcaggttccgcgggaaggagaggatcctgcagggagagtgagctcagcgggcgccggccgcgccccctcccccggggcccagccagggcgcacctgtaggtgaggttgaagtggtcccagcgcagcctggctggagtcagcgtgtagcggcgtctgcggggggccagtgggcccgggacccgggtgggggggaccgccgagaggcccagcgcagcgacgtctcccttcagggaagaaagcgtgcgtgggaggcatcggtgacggtccccaggaccaaaaactgccgcggaaaatggactggaaggaaacgggggtgggggtgcccagggctgggagcgggcgtggcgggtcctgtctgcctgtggtttcgggtctcctaacctgagcgccctgttgcacgtccctgggaacgcggcccagtggaggggaaggggctgaacagcagggcgaggcctcccacccctcccaacaactggacacaggggcgtccaaccctccgacctcgggacgcacatccggaccctcaaacaccccgcacaccccgcacaccctgcacaccccgcacacgtcctgtgggccccttttctgaagtgctgatgtacatactttctcgtacacacttttgtgaagatttcaaggggaagggagtcgtctgccattcaatgtttacatttatgttctgcaagacgctgtcctcagggaccattaggggaccattctgttcagtgcgatcctgatggtccgggagatgagggtttccggggctagtgatcgtgatcccttttatttgcaactgtaatgagaatttttcacactaacacagcgagggactcaacacgctgattctcctcctgcctctcccgtgagtctccagcctgcccagcaccagcagctgtggagcacgtggatgctgcctaccccggcgcccgcgtcttccacgggcacaggtgtgtggaggccgtggtcggaccctggtgtcctggttactgctgcccgggtgtcttttttttgagtaactgctctctgagttttgcacacaaagttgccctcatctgctggagatcgataaggaaggcacaagacgttctcctctgcccgtgaggagcttcccgcagccgcctggcccagcctgggcacgttctccgaggcatgtgtctccctgctcaccctcgtctgggcacctcagcatctgtggacttgagcgtccaaaaaccctgagtgtgattctgggcagccggcctggcttgaagtccgccatgaccctgggcacaggggaagcccagccgtgggcttaggagagagggaccagcgcccagcgttagggctggaagacggcagtgttcagaattccagccgctcatctgaacacagaaggtgtgaactgacctctaaagcagcgtgagatgggaatgatctagaaaactttggatttttgaagtaaattttaatgtttcatattaatttcttgaaaatgtattaaatgtcattgaaagccttattacgcttttcagatcctttcaataaacaagacttgtagaaaataagctgggttaataacagctttcttctgacgccgtggaaccaacatagaggggtcgggcagggtcacccccattaaatcctagccccaaaatgcccatccaccgagtgtggggccggcagggcatcctccccaaggggctgggggtgccgctgcctcttccgggcaagggggcagtgccctggcgggggtaggggtagacagaagggactcaaacccgaggggtggtgtcgactcgggcaggctgtgttgctcccggaagagccactgagaccagggggagttgagtccctgcattcccggggccagcagggctggaagagcccctccatccgggctgcctaacaggggcagccacaagccaggtgaggacccgctggcccctgggcccagcctgggcaccgatatcggcctccctccctccactgacgtggtcctgcgccccgcaacccccccaccccgcaccgtccctgttgtcctaacaaggcccagatgaatgtggctcagggctttgccggcagccagtctgcactacacgcgtgcaagtccaggagagaccaaaacgaccaccctgtggacacctgcccctccagcaccctgccccgttttggggacgtgaaaccctgggctgtgggccccgccctaccgacctggagcgcctctgcctccccggcctggaagaggctg

SEQ ID NO: 1879820 - DNA, 4001 bp, Homo sapiens; identical to SEQ ID NO: 1295

SEQ ID NO: 1879821 - DNA, 4001 bp, Homo sapiens
taaaaactaaaggcttggaaaggatcaaggtaagactaccctccaattttgtattattttaagtagtttaaaattactcttactctgtcatgcccttatcctacagctaaaacacaaagcttatgaaggtcagggttgacttcacattcagttgactctgtaaagcccagattattacaaaaagcatagctcaaccctccttcccgaaaatctttgccacaaaacacagcataattccaaaaaaattgaatgttaaaagaactaaaaggcaaataaacaaaaactttttaaatcagtaacaaactgtccttaatgatcagttttataatgggttcaatgttgcagtaaataatattaagggttagagtataatccagatgttcaattcattccattatcaaactggaaatcagatttagtaaccagttcagactccagagagctggttcataatcagataatgggggaactagacaactttcctaatgataccaactacagaatacagattttaactatgtaggagaataaaagccacttttcgggtagcacttcagtctttcaatttacaacacattttctagtttgccaagtcttaggcttgaaacagacctcagaatatatctgatgttagcccctagcaaataagtattattacaactcactttatagaagaggtaacagaattctagatctttaataaagggattggaatctttcagtttcttacagttttttttttcaaccacaagaacacagttttccagtaggcaaagagagatgtaacgtttactgagcatttacaaagagtcaagcacatatgttatctgtcattctcatagaccgcgtattacacaaacagagatctaggcttttgctcaaggtcacaactataagtggtagaagagaatgatatccaggtctgtccacacaaaaagctctgggtagagcttgttcaacaatttcataaataaggatagacttaaaaaaacacactggacctatgggatgagaaatgacactgactcaagcctggatgaagtaaagcatgcagtttgggggagggctcagtctgcaggcctctgccagcagcagctgaagaaagtgacctttactccaaaccctacagtgcgacaaaccacccatccagctctgcctagagtgggttaatatgccacaattcgaaaagagaaagagaatgagtgtttcatggtggccccagacagtttggtggccgcagaagttgagaaggctcaaatctggagatcaggtttgggttggagtcgtgcgtaagggagcggatgtcacataggtggggaagggagctgacttgagatacgttggcttaggaagagatgttgcaggagagagggtgaaatgcacaggctaggagagtagacggcttcacttgaagggaagggattggggctgtggatgcctctagaggcagttgtcagagggcctctaaaaggtccattttagaggaagcgagaaggaaggtctcgataaggagccattcagggtccattacctgctggatggttgtacaacggcctcaatttctcgggcagcatcagctccactttatcgaggagccggtggtaggtggcccgcaggcctcgggcaccggcggccgacatcgccgccgagggatcgttggcagccgggtgggagcgtggctgtgttctcgtccctggctgacaacgaaggggagctagtcacttttcctgccacgacgactcgcgtccgcctctcgcctggagtacccttcccgcggctttccctgcccgctgtgaaccgaaaagctgcggcccgcgccccgcgaaggttgagggggcggaggctgccgactgccagcccccggtccgcctccggcccccggcaggagagagggaggagccatggcaacaggtgccaaaataatcacctcaccaagtctgcgctgcgccctgctggcagcgcgcttgcgcaggccgagctgcccgccatgattggcccgccccgaggcgcgggcggggtcgagcggaaacctcctccttctccccatgccctcgaggccatgttggagaagggaaagtgaagctgcgctggttctactgccctttcactttgattaagcaggcccgtagttaaaatgggtttttgggccttcagtgcctaaagatgatgccgcacaattctcttgcttcttttcactggagactcgtgagcgagagactacagaattgagtagcttctctctctactcgtcttttatccctagcgacttaaggatctggttagagtggcccgaatgcattcttccagggtgagggcagccgcagcacacaccagcctcagtccccagggtggtcgtcatctcgcgagaaagggttggcggggagggtatccaggacgaggagagggaggagtcgccatcgcctccgcctccgcctcctcctgttggaggggggctgagggaggagactgttgctgatctttggatgttctggttagtctaagaaggagagtatgaggcgagctccggcccgggtgcggccgggcttcaggggcccaggcgccgctgctgccaccgccatctaacgctgcgccctggaggcccggcgcgcggatggtgccggtgcggctcgggtgttgaaacgggtgtcccctccccctcctcccctcccccacgcggtggtctcccctcccacccggctcaggcagagccatgtctcggggtggctcctacccacacctgttgtgggacgtgaggaaaaggtccctcgggctggaggacccgtcccggctgcggagtcgctacctgggtgagcgggggccccggggcggaggcgctgaggtcgccgcctagagtgggggagggggcacgctgccgggtctgttggaggtgggacggcgtctcggtgggggcgcccggagactctggggtgttgggtggggccttggttgccgaattccgtgccggtgcctcccccagtcaagccccctgtgcatgctgccagccgccgcccttgctgggtttttctcggagggccgggccgtgggcagaaggtactggcttgtaaaggtgttggggtcgctgatgggttgggactcgggagacttgcggaacctccaggagctgccgcgtttagagcaaaagttagctcttttgctcttttccagcgcgctttccccgctcagccgaagaacctaagttgttgcccaccctctccttcaatctccagagggtttaggtgtcggctgcgacgcgttgaccaccctcagggacttcacgctccagacagaatccgtgtaaactgtttttgcggcgctgagccaaaacctaaaagtgatagctgagctctccccacccccgcgcgctctcccagttccactctgctcttcagttcgttttgaccgcttaaaggtggtgtagggtttcacgttcctcttcccacccctggaaaacacacttggcatttacagtttcgtagttaagctttctaaaaacaaccttcagtacttgggggaacagtattccacttttttcgttttgcataacattttttttttgaggattctaggtcacgcccgagtcaactaaaaagtttggtttcttaaaaatggacgtacttagtaaaggtcttttttgtttcttcctgtatactcttcattactctttctttctatttggagatacggcaaacaacatcataaaatttttttctttccagttttgccacttgctagttaaaaagtgtttgttgctctcatttgtttttgatttcaagtaaagagaagaaaatgaaatctcattacaaccaacagttctggtttgtaaattatttaagaaaagttagcatgcaattttttaattctttttagtgtctcaagtaaaatacgaatacattttgtttataaaaactcaataaaaatgaagcaaaaatccctttgatccctcccattcaatttcactccgccacccttagaaataatattttctgttttctgaatattct

SEQ ID NO: 1879822 - DNA, 4001 bp, Homo sapiens; identical to SEQ ID NO: 1303

SEQ ID NO: 1879823 - DNA, 4001 bp, Homo sapiens; identical to SEQ ID NO: 1303

SEQ ID NO: 1879824 - DNA, 4001 bp, Homo sapiens; identical to SEQ ID NO: 1310

SEQ ID NO: 1879825 - DNA, 4001 bp, Homo sapiens; identical to SEQ ID NO: 1311

SEQ ID NO: 1879826 - DNA, 4001 bp, Homo sapiens
ggggaggtcacagaattctcgctcgatctgcggatccgtagtgtagcaccatggccgctcggagccgtcaggattccggcaatagttgtcgtccagaccttggtcgaggaacctgggggcggtaatggggcgtgaagaagaccctgggactctggcttatctggccccgcccagttgccctacacggagccctgcccctggagtcctggaccttccctagcccggcccccagggcgccgataccgcctacgcgtacttgcccggctcgaaggggtgctggtgcgggtgctgaagatcccagcgctggcactcgcgccctgactcggtgcggtctaccgcgccgcggtattcctcgccattgcaccagacacacgcggctggagacaaagagccagtgggttcgtggatgggcgtgggcttgtccctccactctcccagcttgacccggcgccgcttacccacccggcaggatttgatgccgcagctctggaagcgcacggcagggtctgttgtgtggcaccaaggacctccggggtcgccatcagggttacggcagaagttctcttccaggccattccggagcgtgggcatgtacctgagggcccagagcatcactatagtgtgtgctgggggaaggtcccaggccgggacggagggaaggtgtttgtcccactggtgatcgttcgggaacttgtggctccaagcctggcaggacaggccacccacggtcgtggccatggtgccccggtacccaaccccattgttcatgatgcaggtccgtatgtagtctgggagcaagagacagaagatcaacttgggctgaggtcccctgtctcccaccctgcccctctccacccccactcgcctttctcctggaagaggtcacagcgcccagaatgccgcagcctcgtgtggggtgagtgttgagtccatggcagcagttggcaaccatggctgctcacattgtagtggaacgccctggagagaagaaggcacaaggtaacgccacggcccaggctcccctgcccccagtcttatctatgcccagtggccactcaccggcagtccattaagggcccacagcgaccagcacactcttcagcatctgccacatcctcctgccaaggcccgggcaccaccgcttgtagcggcgctgtagctctgtgccccggagcacctagaagtcattcaatggcgagcgctgccctgcagagtgggtgcaggtcaggtgggcatacatgtcagtaatgtgtattggcatgtccacagtttgttcattcaggggatcaaagctacaaggcttctgggatggaccctgtatgcactttcaagggccagtctagcccccctgcacagatacttgtcaaaaaatttcccctgggaagcaggcccagacttggtagttatcaccggtgcctctgtgtagtggcccaggcaccgggctcagatctaacacacacgctctgtgagagcagtgggtgatggagcttgccccatctcatctctcaaatgagaatgctaaggctcagagccatcacattacccagccaggggccctggctaggcattcagactccaaagctgggctctcacctgcacaaaggcatacgctaggttagaggggtagatcaggctcaggaggggtcactgcctgctgtgtgcgtgcatctgtgtggtcctaacactgcttcagtgctagagcagacgtgctaatagaggcctaagtgggccatgtctatgtgttcctagggcttcccagctgtgctcaagaggccaaggtcactgccccatgcccactgagcctctggctccctgacttttttctcatcccagaataggagaatggggccaagcccctcctgaaggcagatggggatcaaggttgggggcactcaccagggacccctaagcattgagtcagaagcagcaggagtgggagccaccccatccttctggctggaggctgcactgtgacccaccacagccccatccgggaagttgtgaaacctgtccctacgggattgggtggctctggctccgcacgtcagctcagggcctgctggaccctgacctgagacctggtgacaggagccatgaggggccaggcctcaggtcccacaggtcagttgcaagggcctagcacagctagccccctgagaggcctccctacttagtggtcaggtgttaggaaggtttggtggggccacttgaggtgccctggggttggggtgaaacccctctgcagcctagtcagcccaagggcattgtgaaagtgacagctgccagaggtctgggttccagcccctggctgacattaaacttttctgaatttcggtttttccctgtaaattggggaaaattacttgccccagcttcaacactgcctcccctccacccttttgctgctgccttatcaggccccagctgtaggcaggtcagcccacgcccggcggcagagcccagagaggctcgctcatctcagccgccagaagtgtcatcccagggaaggtgagcgaagctgtccactaggactaaataggggtggaggtaacaggtagcagggactctggcaggaaccgcctttcagacgttttcaggaccgtctgagcggggcctccaagtatgggtaggagacaggcggcctagggattccggttagcacgtcgcgttctgccgcagcagggctgggagcatccccggggcaggcggaggtcggaggtggtgaggcctttcggcgaagctgaggcctggaacaacccggtgggaagccacggagggggtcccctagcggaggctgggcgcgggccggtgcgcgtgcgcggctggaggctcagcgcgcgagcgtgcgcgtgatttggccctgaacggacgccgtagccgagaggttgggcggatgttgtgaaccgggtcgcggcggccgaggctcggggtgagtgaggggcggcagggctctgagcctggcgggttccggctattcccttcgcggtccagtttagtccactgcgagggcacctgcagcgccgggatctgagtgcgaaactccgagcggaagctggtctggcaggtcctctggagcttggggccaggcgggggcgacttgggggagccatccttgggctcccagacggagtaggttcagttctgagcccggataccccggcgaggttggacgggatagccgtgacagggagtccccgggcggggacaaggtccgcctctcacctgggtcctcagcaactgacacccggagtgggtgtctggaaggtctgctcatcaaatgaatgactgcatttaatcagatcttcaactactgtggtagtgaaggggcaccgatcatggaggcccaccgagggcccgaggtcgggaaaatcaccttcccgaggagcaggcgtggtgcagacccacaggggtttgtggcgggagtagagggtctgtttggggcgagataagagactgaacggcagagtagggagtgctggctaaggcagtgctgcagagcgaaactctagacctgcgctgtctaatagaactttatatgatggtgggaatgttctacctttgtgctgtccaatagagtaaccgttagccacatgtggtcattgaactcttgaaatgtggctgaggcaactgagaaatcgaattgttaatttttaaaactttaaatttaagtaacctcacgtggatgacggctgctgtgttggacagcacagctacacatcagtgaggccagcaccagggactcagtgcaggttttggagcagctgcagcagcaacatgatgtgagggatagatgcactaggaggaccaatggagtttgccatgagggctgggcaagggtggtgcttggatgaggtgggaggccacatgtgtgagtgggaacagtgaaactatcaggaccatggataaaagaagggaggaacccagggctgaggaaagaggctccagccttgtggggagtaagtgggacttatggctagagatgaccagaccagtggtggtct

SEQ ID NO: 1879827 - DNA, 4001 bp, Homo sapiens; identical to SEQ ID NO: 1317

SEQ ID NO: 1879828 - DNA, 4001 bp, Homo sapiens
ggaagccctggacgggggtgagtgacaaaagatagttagcaggatgagaagagcttccaccctggagtgcacattgccacgccactacctgcaagtagtcacattcctccacgtagaaatgcagcctgtcctccagctcttcctggtacttgggttcctttaggacactttccccttggccaaaagcctccagccgacctgcttccctgccacaagtaaacatgatccaagacttacatctcttccctcaactcctcagcctcttgtcctggggaagggcagggaagatggcctcaagagcctcatcctgcattggtggggacccatgtttcttgcctcaaagcctctggggtccccatacccatcgtggttgtacttctgaatcatacagatgctccggggatggagatggactctgaggaagtctgaccagaccctgatgctggcctctgtagggataagtggttttggagttgtagcggtggggagtggtgaggaacctgaagacaagcagaggaaatgtacctttctccatgtttctgctctacccaagcccccatccatcagtatctggagaagtctcacctttgccattgggaatggatttgaccctccagacaccatcactactcagcactccctgggaggggtcagaaaaatcgacatttagttccaggcagtttagaggcaaaggttgcttcgtcctccttgagttggctggccacaccgcatagcctcctttctgttcaccgagtcgcagtccttaggaaaaggagtgctttttcccaaaatatcattctaagacacttaaaatgattaaaatccccgtttacctgcccctatggagaccctcgggttgtggcaccgggttaaaaagttcaggacagaggccctcacctctgcactcagaaagtcttggagataagggttcttgggatagagttcctctttgtgtgtggtgagcttcccctgcctgaaagagtttggagattgatcaaagaaactgcactctgatcagagttatccagcgttctgcgtacatacacgatccccacccttatccatacatcagttacacaccatgctattgcagcatccaactgtttgtccctgtagagtccaccttcctcttttagggagctcaaactacctgtacagaaataacagagacaatgttaggtcaaagcctgggcacccttcccctctagctaaccttcctctgatcacctgacaacctgctgtcaccatctctccagcacttggctcttccaagctttctgggatatacactagttgggggaaaaaccttggcttaggagaatctagattccatctttcggttcccagcttagtcattagctgtgggacgcggggggaaccacatccaggggtctgacaggagtgctgcagttcaagtcctcactgtctccagggcctagcagcctattcccgaaatggctcttgagcaactgtcgtgggcccctcgagtgttggcatgttgtgctcagctcctcatctccggtcctggagctcggtaaggtgggagggtcttgaagataacggcagcgcaaggactaggcacgcggaagggaaataaggggcatcggctaactctgccaccacctcacccttcagatccatgaggatgagtcgcggcgtgtaggtctcctggccgtgcagcgtccggcccgtacgatacaggacgtcggggcacagctctcccgggggctccttggaatcggtcgctcggcccagcgcagcatcctggggaagcagagaggacgaggcaggccggctgaacgtcgggactgtagatcccgaagggctcctcgggggcagctgccggctgacctcacctgctggttccaccagtgcgcgcccacgaaaccggcaaaatgtcccaactgcagtgtgagcacctcccgggccccgcccgccatactgcgctgctccacggggccgccgcgcctcagccgcgccgctcgctgctcctagccgattggcttggcaggcgcgtgggcgggtgttattctcggctacttattggcccgcaaacacatcctttcccattggagaaacgatgcgccgatcccttcctacctcttcctagacgtggcccagtccggcttctctgtggttgcctgtgaggggcggggctccacgggccacgccgttgctcctgctccacgttggagcggggtgggcgccgtctccgccgctgacttggggccgccagggcgcgggccgtggaaggctctgcttcctacttgtcttgaggtcttatcccttctcacagatctctccgctggctgatagctccccgggcaaaaagaaaaccttgccagaaaagcggaagctcccctaaagcctcccatgccccttcatctcttcagaagtcacgtggaccacgactaataacctgtggactggcttagctatcatatctctatcatttacacgtatttatctatctctgtgtatctaacaccttatgtaaagagagtatgtatctgttggcgtcttttgctcaatatggtttatgtaattcatatttttgcaaatatctataattcattttcatcactgcggaatagtccattgtatgaatacgccaccactgatctattctaaagaaagaataggctgggcgcggtggttcacgcctgtaatcccagcactttgggaggctgaggcgggcagatcacgaggtcaagagatcgagaccatcctggctaacacggtgaaaccccatctctactaaaaatacaaaaaaaaattagctgggcgtggtggcgggcgcctgtagtcccagctactcgggaggctgaggcaggcgaatggcgtgaacccgggaggcggagcttgcagtgagccgagatcacgccaatgcactccatcctgggcgacagagcgagactctgtctcaaaaaaaaaaaaaaaaaaaatatatatatatatatatatatatatactgctgataatagcttttgggattgtttccaatttttgggctattaggtgctatgattaacattcttgtgtgtatttagaaacaaggcaagggccgggtgcggtagtttacgcctgtaatcccaacactttgggaggccgaggcaggaggatcaactgaggtcaggaggttgagaccagcctggctaacatgatgaaaccccggtctctactaaaaatacaaaacatgtagccgggcgtggtggcgggcccttgtactcccagctgctcaggaggctgagtcagggaatcatttgaacctgggaggtggaagttgcagtgagccgatatcacgccactgcactccagcctgggaaacaagagcaaaactcctctctaaaaaataaaaaataaaaaaataaaaataaaaataaaaaaggccgggcgccgcggttcaagcctgtaatcccagcactttgggaggccgaggcgggtggatcacgaggtcaggagatcgagaccatcctggctaacacggtgaaaccccgtctctactaaaaatactaacaattagccgggcgtggtgacgggcgcgacctgtagtcccagctacttgggaggcggaggcaggacaatggcgtgaacccgggaggcggagcttgcggtgagccgagatcgcgccactgcactccaccttgggcaacagagccagactccatctcaaaaaaaaaaaaaaaaaaaaagagataaggcaaatattggttgggcgcagaggctcacgcctgtattcccacgttttggtgaggctgaggcaggaagatcgcttgagtccagaaattcgagaatgtgagggtagactggacaatgtagtgagactccccctccccctatcctctctataaaagaatttttcaaaaaattagctaggcagcccacatctgtagtcctaaccagaggctagggtgagaggatcgcttcagcgcaggaattagaggctgcggtgaaccatgattggagcactgcactgcagccagagacagagggagaccctg

SEQ ID NO: 1879829 - DNA, 4001 bp, Homo sapiens
ggaagccctgggcgggggtgagtgacgaaagatagttagcaggatgagaagagcttccaccctggagtgcacattgccacgccactacctgcaagtagtcacattcctccacgtagaaatgcagcctgtcctccagctcttcctggtacttgggttcctttaggacactttccccttggccaaaagcctccagccgacctgcttccctgccacaagtaaacacgatccaagacttacatctcttccctcaactcctcagcctcttgtcctggggaagggcagggaagatggcctcaagagcctcatcctgcattggtggggacccatgtttcttgcctcaaagcctctggggtccccatacccatcgtggttgtacttctgaatcatacagatgctccggggatggagatggactctgaggaagtctgaccagaccctgatgctggcctctgtagggataagtggttttggagttgtagcggtggggagtggtgaggaacctgaagacaagcagaggaaatgtacctttctccatgtttctgctctacccaagcccccatccatcagtatctggagaagtctcacctttgccattgggaatggatttgaccctccagacaccatcactactcagcactccctgggaggggtcagaaaaatcgacatttagttccaggcagtttagaggcaaaggttgcttcatcctccttgagttggctggccacaccgcatagcctcctttctgttcaccgagtcgcagtccttaggaaaaggagtgctttttcccaaaatatcattctaagacatttaaaatgattaaaatccccgtttacctgcccctatggagaccctcaggttgtggcaccgggttaaaaagttcaggacagaggccctcacctctgcactcagaaagtcttggagataagggttcttgggatagagttcctctttgtgtgtggtgagcttcccctgcctgaaagagtttggagattgatcaaagaaactgcactctgatcagagttatccagcgttctgcgtacatacacgatccccacccttatccatacatcagttacacaccatgctattgcagcatccaactgtttgtccctgtagagtccaccttcctcttttagggagctcaaactacctgtacagaaataacagagacaatgttaggtcaaagcctgggcacccttcccctctagctaaccttcctctgatcacctgacaacctgctgtcaccatctctccagcacttggctcttccaagctttctgggatatacactagttgggggaaaaaccttggcttaggagaatctagattccatctttcggttcccagcttagtcattagctgtgggacgcggggggaaccacatccaggggtctgacaggagtgctgcagttcaagtcctcactgtctccagggcctagcagcctattcccgaaatggctcttgagcaactgtcgtgggcccctcgagtgttggcatgttgtgctcagctcctcatctccggtcctggagctcggtaaagtgggagggtcttgaagataacggcagcgcaaggactaggcacgcggaagggaaataaggggcatcggctaactctgccaccacctcacccttcagatccatgaggatgagtcgcggcgtgtaggtctcctggccgtgcagcgtccggcccgtacgatacaggacgtcggggcacagctctcccgggggctccttggaatcggtcgctcggcccagcgcagcatcctggggaagcagagaggacgaggcaggccggctgaacgtcgggactgtagatcccgaagggctcctcgggggcagctgccggctgacctcacctgctggttccaccagtgcgcgcccacgaaaccggcaaaatgtcccaactgcagtgtgagcacctcccgggccccgcccgccatactgcgctgctccacggggccgccgcgcctcagccgcgccgctcgctgctcctagccgattggcttggcaggcgcgtgggcgggtgttatactggcgacttattggtccgcaaacacatcctttcccattggagaaatgatgcgccgatcctttcctacctcttcctagacgtggcccagtccggcttctctgtggttgccgcgagaggcggggctccacgggccacgccgttgctcctgctccacgctggagcggggtgggcgctgtctccgccgctgacttggggccgccagggcgcgggccgcggaaggctctgcctcgtacttcccttgaggtcttatctcttcttacagatctctccgctggctgatagctccccgggcaaaaatgaaaccttgccagaatagcggaagctccgctaaagcctcccatgccccctcatctcttcagaagtcacacggatcacgactcttcagaagtccacagatccccgtggactgacctagctatcatatctgtatcatttacatgtattaatctatctctgtgtatgtaacactttatgtaaatagagtattggcgtctgtcttttgctcaatatggtttatgcaatttatgtttttgcatatatatttttcatctctgtggaatagtccattgtatgaatacaccaccactgatctattctaaagaatgaatatattctgctgataatagcttttgggattgtttccattgtttccaattttggcctattaggtgctatgattaacatccttgtgtatatttagaaagataaagcaaatattggccgggcgctaagcctcatgcctgcattcccaggttttgggaggctgaggcaggaggatcgcttgaatccagaaattccaaactgggcaacctagtgagacaccagcccccaactccctataaaataatatttcaaaaagttagccaggcgactcacatctgtcgtcccaactggaggctgagatgggaggattgcttgggcccaagaattcgaggctacagtgacccatgatcgcaccactgcactcctgtctgggcgacagagtgagaccctgtctcaaaaaaatacagataaaacaaaaaataaaaaaaaaaaagtggccaggcgcggtggctcaagcctgtaatcccagcagtctgggagaccgaggtcggcggaccactgaggtcaagagttgtagaccaacttggccaacatagtgaaacccgtctctactaaaaatacaaaaattagctgggcatggtgttgggcgcttgtaatcccagctactccggaggctgaggtaggagaatcacttgaaccccggaggtggagattgcagtgagctgagatagcaccactgcactccaaactgggcgacagatcaagactccgtctgaaaataaaaaataaaatcttagcctctcttgtctattctgagctccttgtaattccatatttatttagtcttatttatttattttgagacagggtctcactctcttgcccaggctggtgtgcagtggtgcaatctcggctgaccgcagcctcaacctcttgggctgaagcgatcctcccacctcagcctcctgcatagctgcaattacaggcatggaccaccaccacctggctaattttttttattttttgtacatatggggtttcaccgtcttgcccaggctggtctcaaactcctgagctcctgagctcaagtgatctgcccacctcggcctccaaaagtgttgggattacaggtgtgaggcactgtgcgcagctaccatttcacttctaagtatgatgtgggctgaaaagtttctgtaggtactctgacagcttaaggaaattctgtattcctgttttgctaagaattttggtcatgaatagatttgaatgttttttacagctttctccgcactaagataattacattattttatcattcctttgttgcactaatgaatacatctgattttcatgtaatactatcttgcattcctaaaattatcccaaactcatttatgttgattatccttttaaaatactggatctg

SEQ ID NO: 1879830 - DNA, 4001 bp, Homo sapiens
caagtggggttgctcatgtggagggatgacaccaggaaaggcttgagtcttcaaggttcctggaggaccccccgcctcccgccaacacatactcacacacatgtacattcacagagccctgcaggagagggcctgggagagggtgggaggccccttacctctccagggaccagtgcaaccagccaggttaagcggccttggtctctgtgcctccgccagtcacgcgggcttgtttcgcggcctgggccgagagcgtgtccatgatgaagccccgcgcccaaggacgagcccccgccagcgcagttcgcagcagctcctggtccctgtagcagcgccgcttctggggaccagttaggggctggctggagcgtagcagaacctgcggaccggactcagttctggaagtgacccctcagccttaggggtcctctaagccaggtctgcacagcgacaggctggagtgcaacgaccagggcgaactcacgaggcttcggaccagtctgggggtgttgtggccaaagtggtttgggaccctatgaatagaccgtgggcgggtcctggcttgacaaagaagggactaagcttcgcggggcccggaaccgtcaggggcggggccagagaaaggtgatacccttcccagcgaaaaggcgggagaggggcgggaccagaatggggcaggagttggggcagcggctacgccgcgaattgaccgggccaaaaagaaaaggcccagaaaggacgcagccacccaggggcggagcgtggggagggcgcgctccctctgccgctgggagccgggtggtagctgagcaccgggaagcgacctccctgacggaagcgggcgctgcgcgccagggcatcatcgtccaccaagtatggcacgatcaccgcacgggggtatctggggcacaagctgaagtcctcgttcacctcgctcagccgccacgcgttggtctgcagcgcagggaggagagaggccaggtctagggcacccagggagtgccctgtccccgcgcctcttccaggcccggcgcttccaccttcccgggcccctacgaccgcgcccacttcgcgagctactctcttgcagtagagttcgggcgggaggaagtgccaggagtcgcccaatctcaggcccttgggacggtagaataaagggaaggaggtgatgactgattccagggaggacagcgtccggagaaggaagtcaggggctctggggagggtcggaattgtctcgcccgcgccctttccagcccctcagtcctgtagcttcagcttcggcctctccaagtaccccggaccaccctgcatccccctgccatttagctgcggctgcggagcctctttgaacagaagcacctttttattcccctctacgcgagacagggagagcttaaagggctcgggagctccctcggcacacctcgatggagcgggcgatgcccagcgtcgcttccgcgccctctatttccagctgcagcactcgcaggtctttacagcacagggtgatggtgcccgagtcactcgcaaccctggggagggacgttcctttcccaggagaggggcaacgagtttcccggattgggcttacgcaggagggcgccagctctgactgcgctggccgtgccccctactccgccaagccgcgcgctccccaaccccggggaccctcccccaccccgccacgtctcactgcttctcgaaggagtcgacgctacgcaacagcagcagccacaggtccggagaggacgcgggccctggcgacaggagcaggtggtggacggtgactcacaccgtgccgcgaagcgggggcgcctccgggccccgtagaaactctgcttgggctcagcccgtatggatcagctccgagaactccattctgccagtgagagacccggggcccagcagaaggccagactctgagagcgtcaggaggggcaggctggagctccgaaagggataggaactgcctgggcagctggcgacgccgtctggacagctgttaaggaggcccctcagaggaaaggatcacagtttcacaggaatttcccctcatattgccaatatttcttagcgaggtccctggccagagactgttataagcaaatctccatgtcatcgtctgtgaaatggggagaataatcttgcctaaagtccttaaccctgtgcctgggttgcaggagacactcaatatttttgtatttttgttttttcaagccctgaggtgctagcactactgctaactttaaaaagaaagaaagactgggcgcagtggctcaggcctgtaatcccaacactttgggagaccgaggcggggcggatcacctgaggtcaggagttcgagaccaccctggctaacatggtgaaaccctgtttctactaaaaatacaaaaaattggccaggcgtggtggctcacacctgtaatcccagcactttgggaggccgaggcgggccgatcacgaggtcaggagatcgagaccatcgtggccaacataatgaaaccccgtctccactaaaaatacaaaactaactaggcatggtggcgtgcacctgtaatcccagctactcgggaggctgaggcaggagaatcgcttgaacccaggagaccaaggttgcagtgagatgagatagcgccattgcactccagcctgggcaacaagagcaaactccgtcaaaaaagagaaaagaaagaagaaaggaaggaaggagggagggagggaaggaaggaaggaaggaaagaaagaaggaaggaaggaaggaaggaaaggaagaaagataactatctcttccaccataccctggtggaagggctggaaagtgggtgtgaaactgggaactgcctacttcctcccatacataagaaacttgggttggggaaatcctttggtccaccttaaatgctgcagctgtgtagctggcgtccctcctcgacctcgcagctggaagtccctgcctgagggcgccctctgtgcagcccacttctggctgagtccagacctcaagaaccccatcagctatccaccatcgtttcagcaagtgtgtattacctgtacagtgagttagctgggccctgtgtttggtgctggggcccagggatgactggggaagattctgttcacagggttttcagtctggcaagagacacaattaagctggtaaaattgcaggacgagagctgagctgatttaccacaggacccatctattcatccatccgtcttctttttcttttgtaaatatttttgtggagatgggggtctccctgttttgcccaggctggtcttcaactccaagcctcaagcaatgctcctgctgcatggcctcccaaagtgctgggattacaggcatgagccaccatgcccagcttattttatttatttatttatttatttattttctttctttctttttaattgagaataaaggaatagggctgggtgcggtggcttacccctgtaatcccaaccctttgggaggctgaggtgggtggataccttgaggccagaagttcaagaacagcctggccaacatggctaaatctggtctctactaaaaatacaaaaattagccaggcatggtggtatgtgcttgtagtcccagctactcgggaagctgaggcaggagagtcccttgaacccgagaaacggaggctgcagtgagctgagatcgcaccactgcactctagcctgggcaacagagcaagactctgcctcaaaaaaaaaaaaaaaaaaaaaagccaagcgagttggctcactcctgtaatcccagcactttgggagtccaaggcaggcggatcacttgaggtcaggagttcaagaccagcgtggccaatatggtgaaaccctgtctctactaaaaatagaaaaatttgtcaggcatggtggctcgcacctgtagtcctagctacttgggaggctgaggcaggagaattgcttgaacccaggaggtggatgttgcagtgagctgagatcacgccactgcactctagcttgggcaat

SEQ ID NO: 1879831 - DNA, 4001 bp, Homo sapiens
agccagagctaccacctggagccattgaagtgtgtgcagaatctattttcataaacatgcccagcaagaaaaagttaaaagagggtagatccccaggctgggcacagtggctcacacctgtaatcgcagcactttgggaggccgaggcagacggatcacttgagaccaggagttcaagaccagcctgcccaacatggtgaaaccctatctctactaaaaatacaaaaattagctgggcgtggtggcgggcgcctgtaaccccagcatcccagctacttgggaggctgaggcaagagaatcgcttgaaccaacatggagaaaccctatctctactaaaaatacaaaaattagctgggcgtggtggcgggcgcctgtaaccccagcatcccagctacttgggaggctgaggcaagagaatcacttgaacccgggaggtggagactgcagtgagccaagatcacaccactgcactccagcctgggtgacagagtgagactgtgtctcagaagaaaaaaaaaaggtagatccccagttatgtcctcttgagatgcaagaacccatgattcggttttacagcccacattcccatgcccttgccacctaagattttgtgtgttaccttagatagatgttaaagttttggatgccatacatttctgtcttcgatgagaaattggataatacctcctctcaagccattcagttctgggaaaatgcccttcttcagcgaatttctcttttcatccctggaatttaagtgagacagataacttctgtagctagttggggtgccctaaaataaccctaagctcccaagtccagagctcagtcccaagggttgtttctcttctagtgcattgacaaggccagggacctgctggatgctgaattaactgcgatggcaggagagagttacagtcgggcatatggggtaagtgtcaactattctgcacattgtcatttttgaggcttatttccatacttttttcagaatgggctattgagaacttacaggctgctggaaacatgcctgttttctctgatcggcagataccctgacaccagaaggaatgatttaaattaatcctgtcttttggattgttcgtgcagtaattagtttggaatgcgatttgcttccatcaggccatggtttcttgccacatgctgtccgagctggaggaggttatccagtacaaacttgtccccgagcgacgagagatcatccgccagatctggtgggagagactgcaggtgagcttggtagaaagccccagttcacccacctacccctaccccttccaggacctgggtgagtgcccccctccaccctggctcttactcaacttgcttttcctgcctcctccaccagtgtattgcttggcttgcatacaaagcagaatactcaaaggctcctcacctaaacttaagctgtgagagaatgaccaattttccagtctcttcttattctcttctctaggaattaaaaaaaatgttttttagtaagtgacacctgtgaccagtcagttaggaatcataacctcaaaatcagtggttctcaaccttagcagcacagtagaatcacctgcagagctttttaaaatcctgatgcccaggctattccccaggccaattaaatttctggggagagactcaggatcagtatcttttcaggttcccccagatgattccaccagccaaagctaagaaccactgctctaactacacttggaggccacctgcaccagcttttcagatggggttgccttaggttctcattggccaactcctgctatttatagctacttaggtcagagtcatcctgtcgcctctattgagactttttttccactgcagtttccgcttgtagagaagaagctttcccaagtcctccatcagtgttttcattctcacattctgatcattttaacatgagaaactgtcactccaggtctgggagtcaggagtctaaatgttctgggaaggatggccagttatcccattccttgagtgggtaggataggaagttcatcagcaaaagaaaaaagagagaaagcctttaccactccagaaaccatttgtctccctacctatcataatccatccccgcaattataaaccatttcctctcaactagatccccacctaattgctaattccaaattctcgcttcagaccaatcgaagtttgtgcttccaggcgtctcagtaggctgcgacaaaaccttttgactccaaacacattcctgcctaggaagctcagggcacattcccctggacaggaaagagcaatgggcaaaggaacatctatgaatacagtcatttatggctctgaaatgagcacatacagttcttttacatgttttattagtaattatgaaatgcccagtgaatgttttgatggaaaattgtctcctgggcaccagaaagaattccacaaataagcatttcccacttgatttgtacacaccccaattctttgaaatgcctataataaagagtttctacagcagagatctgatgaaccttctgacagtctgacaagtgggacttgatccaaatgtagacttagaggagaggggaggcatggaatgagtcctgggaagagagatgcctgtctgactttactgggtccaggacactgccaccaccttaagccttcgtgactttcctatcttgaggcagcaagatgctttttggcttacaggaggccaaattatttcagcatctgggagaacctaactattggtgagaagtcacaaaaaacaatcactcagtgtacttttttctgttattttaactttcgaaatcattgttgtcacacttcatgggatggaaaaatgtggtccaaggcctgaaagtaaagcattacatttatagtggaaatttggctcttgtggatggcttgctgtcaaatgaactgctggggctagaaaactgccattttgtggtcaaatcatttaaattaaaatccccaaccagtattatagtagtggaaaaatacatgtttgttacttttctttggagttgcaccaatgcttttggttcctaagaccctcccatagggcagttagagaggtcagccttactggcgctgggtctcttctagccttgggttctccagtcaggctcagactgcatcttatcatagctaaaagcctgagatcattgtcgctagacttttaagtttatctccatggaggacagctccatgggttcatggaatttaccatgaagcagtagatctcaggaactccccttctgagtctgacttcttatcaacaaggatgaaaaaggagttcacttggccaggcatggtggctcacacctgtaatcccagcactttgggaggctgaggcaggtggattgcttgaggtcaggagtttgagacttagcctggccaacatagagaaaccccctctctgctaaaagaaaaaaatacaaaaattagccaggcgtggtggcgcacacctgtaatcccagctccttgggaggctgaggcaggagaatcgcttggacctgggaggcagaggttgcagtgagccaagattgcgccactgcactccagcctgagggacagaatgatactccatctccaaaaaaaaaggagttctgcctgcttctgctcccaaagttctgggattacaggcatgagccaccatgcctggccttctgatacattttaacttccctgcaagccacagccaaatccactgtgaaacacaacggagatttgctgatagaatctcaggttaagggtactgtgagtgaaatacccttaggcagccgtccccaacctgactctctatagttgttagatgtaaaattagcttaagcccctttgataattaattcacttttttattattttattttatttatttatttatttatttatttttgagacggagtctcgctgagtcccccagtctggagtgcagtggcacgatctcggcttactgcaagctccgcctcccaagttcacgccattcttctgcctcagcc

SEQ ID NO: 1879832 - DNA, 4001 bp, Homo sapiens; identical to SEQ ID NO: 1342

SEQ ID NO: 1879833 - DNA, 4001 bp, Homo sapiens; identical to SEQ ID NO: 1364

SEQ ID NO: 1879834 - DNA, 4001 bp, Homo sapiens
tccgagttagtgccctcaggacacacagtgtacagtgatcatgaaaagaatgggctcaataattttccataaaatgtgcttaagtttccatgcagttgccatgagaatacagcttttgaagtatggtccacctacggtaggttagtaaatgataaggggaggaagaaatggaaacctaaatatctattgcaatgaaaaccaacagcaatgttagtaggaataattcaggcttcgttgaaaagatgtaatcgatattgtcagcctgctctgttttctctgaaccaggagtctcaaagtgtcaacagagaagtagctgttcacaattgctcaaagttacccggggcctggtgggccttggtcttcttcctcttcttggtcctttttaattcctgcaatacattcagacagggacagacaaaataagccaattcacctacacccataacagcccactgtctaatccccacacagggatctcaggctcctcagcatgagaacaggacaatgtgagagatatacttcaggaggcctgaaagctggtcatgatattctttgatttgcatctcagaaccaagggtgaaatatccccattctggtagatcgttatcccaaaatcatttatcccaagttgtggaaacagttatgccttattgttcccatcgattcaaagaaaatgtcccagatgatttctaggaggaaaactgcagtattcagccctgtatcatcaaatacccagctcattcatgaatgcaagaattttagacactgaaattagaatgaaggaggaaacctacaaacccttgagtccaaatcatagttctgtgaattttttacatctgcctgggtccaatgtgttgagagtgggctcaggttgccacaggcatggctggagactaggaatagaaccatgttcactggcccatcctatgtctgggcttccaagtgtagctagagtttcattacaacctacatgcacctataggtcctccctgtggcaatgacatctcgggtcagtaagggccacttggagcaggaatatgacccctatccagaagaccaggtggagccctatcaccttcatagtaaggtactcactgtccccatcaagagccaagccaacatgctgttcctccaatgagtaaaagtacttctgtagggctggcatgagtcaggcagttcaagataactggtaggagtcgaataatatctatccagtgagtcctgcaagacttcaggctcttccacttccaacagctccctgctgagcttgaagaagtaggaaaaactaagggtaagtgagggaaaatgagaaaccacagagccccagctagatttcatggggcataaagaagtggttaaaaaagaaaagggatagatccattaatgaggtaacaaattattgcctttatattggaataggccatggctgggtagtaaatgatgaaagagaaatacagacagaaagaaagagagacagacaaagagaacttagtgaattgtccaggtgacacactgatgagggagttaaaggacactctgagttggtgccctgaggacacacagcaaacagtgagcatgaatagagtgggctcaataattttccataaaatgtgctcaagtttctgtgcagtcgccatgagaatacagcttttgaggtatggccaaccttcactaggttagaaaatgataagggtaggaagaaatggaaacctaaacatttactgcaatgaaaagcaacagcaatattagtaggagtaattcaggcttggctgacaagaatgaaatcattattttcagcatgttctgttttccctggacttggcatctccaggtgtcaacaccaaattaactgcccacaatttctcagactcacctgggacatgttgcctctcgatcgtcctttttcacttgatcacactgaggtcctgcaaataaattcagatggggcctcttacattaagcagttcttccttgcacacagaaacattcctctgtccaatcctaacacagggacttcagtcttctcagtgtgagaacaggagactttgagagaaatattccagtaggcctgaggtcaagtcttgagaaaactggcttgggttctttcatgagccttgggcaaaattcccctgttttggaatgttatcttccctatgtgctctgtcctaggtctgtgtacacaaatgagcaatattttccccaataaattgtaggcaaatagttctaacacctcgtaggagagatacttcaatattaagctttctctcatcaaatacccagaatttgatagtttatgagattgtggacactgagatttgttggatgggtgcaatgtaccagctcttgagtcagaatgagtcttggtgctacacagaagcatcagctattatggcttttgtgagtgaaaagtcaactgtttatctagaaaacataccagcaagatgatggacagatgagctaaaacaagccaacttagaagacacagaaaatggagataaattcagtgaaacctgggtcacatcttccactgagaggtagacaagggtgacactggccttgggcaggtaaagaaccacacagacatgctttgggaacaaaactcataaggaattttgtagctggcaagagacatttaattcagatgagctgatctgacagacaactcctgggcatgtgctgcacagtttggtgtgagtttgccacacctgccttgagttcaatgtcgtgacagtcagtccaggttggcatgggcatggcctgagactaggaagagagcaaagctcactgacccaccccatgcctgtgcttcagactcgactccagagtgattgaaatctacattgatatataggttcagcccgcagtgatggcaactctcagtccaaccaggggcacaaggcccaaagattacggggtctacctgggatgctaactggagctttatcaccttcacaatggagtactcactacctatgtcaagagccaagccaacttgctgttcctctaatgagtgaaaggtgctcctgtaagactggtacaaggcagatatgtcaggaggaattaatagagtcgaataaccttcatcctaggactcctgaggggcttcctcctcttcagtctcctgcagattcctgatgagccaggcaggacagggatgacagaagatttaaccaacagagattagacaacaaggcctttcagctgatccaatgggaaacagaatcgagtggtcacaaaaagcaaaggcatttttccttcaagagaaaaaaagctatccttctaaatgcagggtagagggtgactgctctggggacagagcaaaaatgtgcaggtcatgctcagtgcatttgccacagatgagccactgcagggcacccagactctccgtgtaaactaccatcatgacttgcaacacagagaactaacacagggcttcaaccactttgcataaattgggttgaattttacatgcagcattcaagtgaacagagctcttgaggcagtgcagacacacagatcttgtgtattaagggcccccttttcccaatattttgatatatatgtttatttttgaatttcttttcttgtgcaaatactagcaaagatactaacaacaaatgggcagaaagcatatatacatctctccctggatttaaacacatgggagagaacaggcaataccaagaaatccctgtttggttagttcacctggctcatctgattgcaggttcctatcttgagaggactacaaaattaaaaccaacacaagtgccatgaataacccacaacagtgttaataaggacaatttgtggtggggttaatggaagaaattgttctattcatcatttcctcattttccctggatctgcagtctccaagcatcactattgaactaatagctcacaattacacagcgttacctgggagacgctggccctttttcttcctcttcctcgtgattactttgattttctgtaaataaattcagagaagcaggtca

SEQ ID NO: 1879835 - DNA, 4001 bp, Homo sapiens
ccctcagcatagattttatgaggtctttgaattcttcatactctgagaaaagacagacgcgcctgcctcagtggaaggctagacatgctgctgtggtcattgcctacagggcaggagacaggtccatcccaaggacaaaactgtccccagtaccaggctctaggcagggatttccatatttttactctttggtctcccaactttctggcatctaatcctccaaaatttagagatgaagaaagagaaactcaagggcacaccaactaagttgacaagatgattcaatcacaacgaagtggagtccgaattcacaacccctgaggtctgactctgaatcctgggccattttcccaaggcttgcagcctctcctgtaaacactgcactgggccatgaagtgattttccgtagagttggtaaggcccctaggacaatgagactgacagtttcccttttactgagaatttcaagcacaactatgtcaaagattttaaaaatactatctggataaactgcataaaatatgaggcataagaccataaggccatgaaggaaatatgccgaaatactaatcaagtttctgttaagttagaaacagtagaatgaagaactaatagtgtttactctgtgccaacaactgttccaggaggtttacaagaaataggtcatgtaattcattgcagcaatttgcagaggtaggtattattatagtaccctatggacagatgaagaagcagaggaacagagaagacaagcaacttgggtggagcccaggacactggcccagggtccctgctctacacatgctacctccacaaagtcttgggtgccgtctttcttcctttttaggaacaagagccagtgccctaggaagcaggacttccctctcaccagggtactccctgctcttgatgctgtcactcatagataccacaggttctattaggagcagagttctctttaagctcctcagtgcgggtactgtgtactaacaccatgtttcctccagggtctccagaacagagctttgcctattgggcctcaacagagacttgaactgaatggaagttcatgagtcccacatatttagaccaacagactagatgctacttgtctgcagaatcttttatggtacagagaggattctagtaacatgatttagcctcttgctgagaaaacaggtggtgctgtgcctgtgtcagaaatcaagaactgggatttttaactctaatcccaccgccacctgactgcaaacatggaaaagttgctaaatactttctgcctctgtcttccatttctaacaaaatgttaaaatacccatttctattttcctagaagcacgggaaagatgaaattatttttgatggagagagcatttagtttctcagagagaagacaggacatcattcctcacttttgtgatggtgagcctatcgaacttacggtatttcttctgctggttggccaggaattaggccacttgagttacaagaaatttctctttatgtttctgaactgctgtttgttctctgccggctgggggcgcaatttcttgttgatttctccagtgttcatctctgtcttctcacactggatgaagggctggcagacaccaccatgctgatgtttgtggcagaagaggtggagccagggactggggagaagaaacccaaacacatgatgggttaaaaactggtgaaatcaaataggtttaatcaggactgagggatgtcagtaaaattcttagcttactgttgagaaaaacgtgatcactccccacagcacttgagagtccttaatcgcaaaaacaaggtttgagacgcctgagctcagagctgaaggcactgcctgtagctcagactctgacaagagtgagggaggtggcagccagcatgccaggtaacggtctgcagttgcaataacagaattagaaggtgggggtgtcatggaatcttaggagccctgcgttccaattgcccaggctttgctgaaacacaggcgccctggtcacacgagaggtcaccaccgatgggggccttcccttcagcattcactctcagtatatgtgtacccttgtacccttgtgacaatgccacagacccatctctttcccaatacatctaagcatcttcctcattgttcatttcttgtgtgtacaaaatcatcaaggcagaaatagtttcccaacaggttatattttctaaatggtagtcatgaagtcagtcactccaccttctctcacgttaaaatagaatttaaggcttttccacggtgtaagatatcaaacttttagactgccatgatatcctgtgggtcttctgcagttttttctgtatccaccagaaagtgaatgaataattaattttttaaaaatgttttctttcctgtctcagtattcttcttggggcatcccattgttatgttgatttcttttttcttactggggcaccatcttggcttttcattacatttaagaccagtttgacattcctacatccaaagctcttcctctatgtgggatgatttgttttttaatgtgactgaacactacatttcatacttgtcacttatggatgtcattctgggcccataagagctcttttcaaggtatcaagtgatcaaaatcatttacatagggagctcctgaaaacacgtgtgaccatcgatcttgggaagtcttgcaaacctgatactattttgttgttttcctttagttttcccatatattgaaaagaacagggccatgagcagttcttatggaatattgcttgataagtatttttctgagttggactaacacaactgatgtgtggttgctttccactaacagaacatggcaacatcaaggtcatggtcttggtgttagtagttggtatttggtgatcctcagtgttgctgtgcagtagaaggtgagtttgacgtgagaggaatgagtaggggagagagatcccctgaaccacctcctcactttctcggcattcattcccacctaggttttgtgagcctggaacttgagagactgttctgtagcccaggtctcctcagtttggctgttggacttgcccgagttgagggtgcagtgggtgtgaccctgggctgcccagcattcatgtggaagtgaaggaaggaggactggatcaatcccatttgaaagcatccctctctacagcgcccaccatcttccaactatactgcgtagggatactgctttgagatgtatcaaaggctttttaagtcaatgtattttctggtgtctgggagacctgacattctgtggcagaatgaaaatctgtcaagttttttcctgttaaatatgatgaaactgcaggatcacaaagttatgtggcttacttgaggtcacacagggatgaattttgagcactgccaataaaagcaatcacaacaattattcagtaattattcataggatccatattcagtaaatattcatataattattcagtaattattcattgaccaattcataccaggcattttgctcaaaactgtccacatatttggacatcatatcttcatcataatccttaaggtaatgctattatccataagaatcagctaagaaacctgaacaagagggatagctaatcatgtatttggccatatttctactttttggtttttgtgatgctggaagaatgaccagaatgagtcacgggaagagtattccttcctgtattattttccaggacagaggtgtgcccttccagagtactgggaccaaaattcagaagtgtctgcaaccttgctttaacagtatgggaaataacctctatcacctggaatttccctggaactttggaatatgcaagagaagtatgagacctgggtcttccctttgctgtgtttaattcactcttctatggaataccaatgattctcactaagacttttgcctctttataatcacaatttatgtttcatgaagaagattttactgttagctctatttagaaagaataaatataagctatggtttaggttt

SEQ ID NO: 1879836 - DNA, 4001 bp, Homo sapiens
gatgagtggcaaacaatggctactagttatgaacatgacatattttgaaaagctcccttggaaaaagcacaaactggggactcagagcccagatggtgtgactgtccatggaggcagaaccaaaagatcccactattctaagaggatggcagcagctagagtggatcgggagaatattaccagcagtagagatgggaggacaagccattttagtgtcagagtccaccaccagcagtacagacttgctttgaaaggagagtcaattggatactaaatgcagtgcgaaggtttctaaagacattcctcaatcaaaatcaggggataaagcagtcgcttgaatcacctaggcctgtcctttacctggacacaagtggtacagtagggagcattctgaatagtgtcacccaaagctttgcataggccttaggccagcaggtattgcacacctttctctgctattcctcgttactgatattctgatccccactgtgcaccccagtaagccaccaaggtaaactgcttgccttgatagtctctttcagcactctgcactctacacactcttgaatgtcagttaggtgctgttatgtgggaatctacctgcttacctaatagatatagcctggacacaaagttctctggtttatgacactcccattgtacagctgcctccatagctccttgaaattctggatcagggattggacatctgacaggtagttttgactgcttggtatcacagagttcaatccaacaaaaggaagacatgttcccttgtgtataatgaatctgcagatcacttattcaaactatagtagtctgaactcagatgctggatgtcaggtcccctcaggattgtcttcctgcgtcttgactgcagccactcctacacagggtgatttcctgggctggagccagtttgcaggactatgagactatatagactacaaagcctagctaggccccaggtcggcggcagagtaagccccacagcaatgcgttaagccttcatgaaatgagtgttgaatgaatgaggtagtgattcagtgtatatttgatccactgcaataggtgggaagggggcagaggcagctacttcctaaaataacccttcttcagactcttaaagaactgatccttgttttgaattaaaatctatcttcatttaacttccagtcctttgccctacagataattcgtagcgccacatcagttctacccattctttcacatgaagacagatgtcatgttctgagtcatctttcttcgcctccttccagcagcccttatctggtggctcacatttgagcgagctccaatatgtctctgtagaatctctctcttcttttttcttttctttttttttttttttgagatggagtttcgctcttgttgcccaggctggagtgcaatggcgcgatctcggctcaccgcaacctcccctcccgggttcaagcgattctcctgcctcagcctccctagtagttgggattacaggcatgcaccaccacgcccggctaattttgtatttttagtagagacagggtttctccatgcttgtcaggctggttttgaacttgcgacctcaggtgatccgcccgccttggtctccccaggtgctgggattacaggcgtgagccggcccggcctgtaaaatctcttcaaagtgtggtacatggagtgcagtactccacctgtggcctgactgatatgcagtacaatattatcactaaattgctacagacagtgtgcttttcattgttgtcacagaaatgtatttggttagttatatttgttcatatctcatctgactttccagtcttccctcactttgtacagtcatatttgccgagtcaagtaaaagttataacatttaggacacaatgcccgacttactataattaccattattatcttaggatcattacaaaacagaattaccacttagctctcaggccctacctccttcagcctcagaaacgttaacgctaccttgcattgctgcttttagcaccgcccctaataagccccgcccctggggcctccgcggcgggagcctagcgtccgccccacccaccccgagcccgaggcggggctgtggatgtagacgctgattggctgactggggcgcagcttgatggcgtcgggctggagagccgcagtcccggctgcagcacctgggagaaggcagaccgtgtgagggggcctgtggccccagcgtgctgtggcctcggggagtgggaagtggaggcaggagccttccttacacttcgccatgagtttcctcatcgactccagcatcatgattacctcccaggtgagtcaccgcctcccgccccgacacccgtccgcctccctttaccgaatcgccctctccggtcctccgcggtgcgggctggtccggggtctcgctcctctcttacgcgtcctgcgctagtcactctggcacccagagagggtgtgcgatttgctgcggccggttccctcagccccggctgtcaggagactggcctgcggccgtccgcgtccccacccggcatccatccccggaatttcggtccacttttggaagcggtccgccgacctccaggctaagagccggcgccgccagctaaggcggcggttctaggagctcctcgaagcttccgggctgcgccaactgatcctggactggggaagcctgtgtggttctgggcgcgcggtgtgcgacgcgccaatactggatactgaggacacgtcagtgcaggctttgctgttagatgtcaaatcctgaatccgggtgtggagaaatttgctgcttcaaagtatcagtataaggtaatacctgtgcttgaaagtataaggtttcgtttttgcactgacacctcgtcctttatcctctgcttagttacccaccttttccggatgtttttctgaccctcatttcttctccattggccaccttcatttgtttgtacagtcaacaaacatttatcgaccattatataaagctctgagcgtaaaaacatgtaagacactgtctctgctcaatagaagtttcgtctagttagcctcttgcttttaccatgtaatctattgttaattattgtttcttcctagcattcatcatagcactggcatcatttatgtctgtgtttctgattttgttttttgagatcctgccttgttcatagctgtatccccacttccaagtgcaggcattcaataaataattgttggccaatatttgtgaagctcagactgcctgttgaccttcttccccccatctttccaataaagattttgtgtgtgtgtggttgtttttacttgttctttctctcaaacggcaaataacagaagcagttacctttgggggcttaaagtgaactaaatttgtgttctttgattccgtttttgtattgcttcatcctaatactcgtctccgtagagcggagcattgtccttttctcttcaaaaacttgtttacaatatttaagaaaataagaaagaaggaaaagccatccataatcctaccactctaatgcaatagttttttcatttttaaaatttaccaccttttctatagttttcataagtattgtttttattggctgcataatattcaaatgtattaatgtaaaaaaacctagacatgtaactcttctgcttaaaacctttctaagactacccagtgcccttggtgacaactcagggttatttttagccttagtaccaatttaagaaaaataacaatatttaattagcttttcttttcatttagaataaagataagaatgtcagtagaaaattggctttgcattgcagcctctacgatttttagcatggatataattgatacgttgaaccgaggaagtggctttctaattttgtatgccttataatcatagactttcacttcacacatgcatccacatgcagtaattaattgttaaacctggtttttacaaatgtggaagaaagacccaaagattcctttgcatggaatgttctctgttcagata

SEQ ID NO: 1879837 - DNA, 4001 bp, Homo sapiens; identical to SEQ ID NO: 1371

SEQ ID NO: 1879838 - DNA, 4001 bp, Homo sapiens; identical to SEQ ID NO: 1375

SEQ ID NO: 1879839 - DNA, 4001 bp, Homo sapiens; identical to SEQ ID NO: 1382

SEQ ID NO: 1879840 - DNA, 4001 bp, Homo sapiens
aggctggactgattacagctaggcttttttccatggtctttgcctggttgttggctcactcacatgactgacagttggctggctgccagctacaatgatggggttaatagggttatgtgtttctatctgtttttctacttatctcatagtatggcagatttcaagacagagaaaaataaatgtccccagttctcttcaaaacaaaactctgaactggcatcatgttttttctgccacgttctattggtgaaagcaagtcacaagggcagccaagatttgcagaatgggcaaacagactctatctcttatctggaagaactacaaagtcacattgcaaagttttgaggacaaagggagcattagaaaaattgtactcatttttgcaatctaccataatataaaaaattgttaggatatgcataagggcaataaatcagattttttgttattactgtcctgcaacctctctacttccttattatactttttctttcactctcaccttcattttttgtttgcaatttcatggttctaacaaaagaggatgcttagtattgattaacaaaatgactctagttatttcctgtcagtcccccaacctatgtatatcaagaagtaatcacaagggattgcttttgcaaatttcttgaatcttgcagtttctgaatctttcagttccctattgcaaccaaggaaggtatagtagcatcatggttaaagaaacagtctctagactattttgtttttgaattatgactctatcaatttggaactatgtgactttgtgctaggaggtttatcactttggtacctcagttttcttgtctgtgaaatggagttagtgagatactaaaaagattaaatgagattgtacactatatatatgtatatatgcctagtctatagtatgtgtgtgtgtgcacatatgtgtcttttatatttaagtaattaatttgtttcagtgagacataaaatcataggaattctggcctccctggtgattagcagataacaaggcaaagctattgcagggtggctgatcaggctccctcattatctcatactgcctctaccccctaatctctgactatgtactgcatgttattgactttggagttaaacccaaatagacaaaatccaggcatgttaaatctacactttattttaaagaaaatgttaggcacatgagaggcatttgggaggctgaggagggtggatcacctgaggtcaggaatttaagaccagcctggccaatatggtgaaatctggtctctactgaaaatacaaaaattagctgggagtggtcccgggtgcctgtagacagaattgctgcttgaacctgtgaagcagaggttgaagtaagccgagatcgcatcattgcactccagcctgggcgagagagcaaggctctggctcaaaaaaaaaacaaaaaaacaaaaaaaacaaaaaacaacaaaatatatatgtgtatatatatatatatatatgaagtcggtactcttactcttagcacaggtacagcttggggaaacaatgaaacctgctggaacattatttcttcctgtgtatatcaagacaacctaagaaagaattgggactccggcgatttcagttttaaaacagaaagaaaagataattcctataaaaaaaactcactctaaacaaaattacacttatatttttgccagcattttatgtatgcagtactccttgctattgttaaataaagaacaataaacaaaacctaaccatgattccttaactgccatatatttttacccgctactacacttctgagaaaaagcatatggcgaagtcagacctcatgactaaatacccttcagaggcacataactacatttaaagacatttctaagaaaggaaggaaggaagagaaggaggaagcaagagaggaaggacaggagggagggaggaagaaaacaaaaaatcaggaacagaagttgtacctcaatgtattcagcaaaatttgaattctgccagactcttccttgtattattagtatgtgaaacaactaactgatctaatgctgtttaccgtcaagtcacctcttcctctcactttgcatctctgacaaatactagcctattcacaagtaactccatgattagcaattccaagacagccctgtgaccctgttttcagattgcttttgaagagtagctgataaaaatagtagaaattatgactatcatttccaaaaggacttctctatatgcctgacactattctaggcatgttacttatatcatcctcgttcctaacaactctctgacaaagtagatattattcctactttgcatataggagaggttcaagttggcagctgttaagaggaggatctaggattcaaatatagatccctctcattccagaccttgtgcttttagtgtgaaaataacttgaacactgacatggtatttctctttagactttttttgttgccgttaaaatacattttgttgatgttaaatacattcattttttgtcttatccagagcattcagtcacgtttgttgccctcttgttaactctctccacattctctgcatcactcttttaataactggaccctgattgaacatagcactctatctaccctataataagtaaagagtagataatcttatgttttcaacatgaaatgttcttttaatattcctccatttacaatagcaatcccacctcccaaaccgccattagcacaaccttaattaacatctatttaaagcagtaaagcaaggtccatgaaatagatattgagctattgttaatcactcacaattgggtactcacctaattagaacaaatactaaaatatataatctagttcccttatttctttcctggaaaaatcaatgaaaagtacattttaaaagtaagataaatttgtattcttcctgatgttctaactatattaatgccagatctaagactattaattaagactgacaaaatgtatttttctaaaagttttataatccctgataacatcccatttgttcacattgtttgaggtacattgaaaaaaataagatcttattatcccagtttctagggtctattgttttattttcatgcaaacatagtacataattaaataatgtattttgcctaaaagttatttagaaaatcgttagtatacgcttttgagaaaaatttcacttttcaagaaaataaaattggataatacaaataacccagaggttagacgccaaaggcaaactggcactgctctgccacatggctcaaatgcagcataaaatatgttttaaatataaccatgtaagaaagcacatccttatataatttgggagctatatatactcttttgggaattaattatcaaattataaatgatctctttctacagaaagatgcatttaaacatctattttaaaaatgattagggaaaatcactactcgtgccaagcaaagaactcctagctttgactaaggtaaaagtcattgatacattaaggtgttgataatgccattagaaagttcttaggttttaataggttgcatttagtttactgatcagctaagtaggaaatataaaggcatattgcaagtctttggcagtgagtgtgaagtgctttgtttcattcagagtagtcttgaactctactctgttaaacatcttcataaatgatatgcagttggttgttaataacattatttaaattctcagatgagagagtatatcaagcaataagacatcacataatagtacaaaaagcctagaataaatggcctgaaattaatcaaatgagatttaatctggaactgcaaaggccagtatttgattaaaaaacagatccaataaaagttgaagtaaaattaaaaatcagtttcaataaagagatattttgaatagttaatataaagttgatttgatattctgtaatggagtttgagaaaatgtaagctgtttttaaaacaggaatgaacttgaagttcttatagtaatcatcaccta

SEQ ID NO: 1879841 - DNA, 4001 bp, Homo sapiens; identical to SEQ ID NO: 1390

SEQ ID NO: 1879842 - DNA, 4001 bp, Homo sapiens
tccctgaaatataacctgagcaccgctgtctgcttagggcctgaaggtggaagtggttacctttattctttatctggatgtcatttcgatttttttttcaagtgcagtgaagaattaaagatctcgtccaccaaaaatactccgagtgtgcatttcgggttttaatatggtattgtctgatgggtttgacaggctggcggtccaagttgaaaaaggtctgtgggtgtctaatagtcaaagatgcctttatgaagctttagaaagaccagatatggtttgccttcaattaagaaaaaggtggaatataaagatatttgtacttatataaatatattccttcttttcttctcctcctcctcctctgccttcaactttcttcttcttcttcttcttcttcttcttcttcttcttcttcttcttcttcttcttcttcttcttcttcttcttcttcttcttcttcttcttcttcttttttaactctccttttagagttaaagactggagctaagaacaggggagcaatagacagatgaagtgttcccggattgctgccccacgctctttgtaataaaggaaaacttggccaaaggtcaatgcttagggtagtagaagatatgtagtggcttggcttcttgactggaaactaggacgggtagagtagctgagagaagtgggccccagagcaaactggttgcgggtagggggagccagcttcagcccggtaatgaagcccatttcagcctcattcctttcccatggcggaggcagccttccttccccaggcctggctggaggtggaggcaggcccaaagttagggggtcagctcgcgcacctagggccgggagacagacaaattctggcggaaagttggcagccacggtccccctcccctgcttttctcctcaactctccacccccactccgggtgataacggcggaggtggggggttgggggaactggccttgtgttttggaacagctgcagccggcgctgggcccgcctggaatgcgggaacaggctgcacaccaggacttttatggaaacttgctgctggagacggcggcggcggcggcggcagcggcagccagaggactcccagcggctggagcagaagtgttagcggccagagctcccagacccctacccacagccaggcgggacgcgcacagtccctccacgcggaaagaagtaccttcgccggtcaccggctcctgcagggtgagaagagttgggggaacgtgggctggggggagtggagacggaggtgtcgggtcccctggtgggggcgggggcgggaacggcggctgcagagaggcgctcggggtctgcggcttctggccgtgctccgctgcagctccggagggcgccgggcgccatacagctgtggtccgcgctggccccggcccgggcgaaccctgccttggagccgcatcctgcgggctcggcggggtgcctaccaggggctgccccagggtctgaaagtgtcggccggccttgggcttctggttgcaatgtctttgccctgctcccctgcgccttgtcggctgagtttcgggtgcgttccctactgtagggagggagccctctgtgagcggagtgggtgccgatccctcggctgaacccttggggtccttagggaagttcagtgccgtcccccaccacttgccccagccgcggtctccgtctctgccagcagtgccagttaagaaatcctttctgatcggtctctgtggaagatggggagaaatatgatttaacagcctattactccccccccacacccccgcatatccccccactcctgtctccaacccttttttttttttttttcgtgattctgcccgaggtgggatgctgggggttgagcaactagggctggaagtttacgaagtttacgtagtttaagtgagtgaagaatgtagtcacctcttgagaactccctttgcctatatgcttttgaaaacgccaaaccattccagctgtttgtaaattgtgaaacgttctacaaatgcattagcattggcatttataaagaaaatgacgaagttgagaggttatagttggttactgcagtgacttagagatgctcattttatagttattaaagcacaacgtgaaccaagttggcagagagataacaaggtaaaaatagcataaggatatgtcctaacaaaatgtccttggtgaagacacaggtagagaaaagaagccataataaagaaattagttccctgaccaaaacaacgggaatatcattcatcgttaaattttgttaatgaattcatgtagcagcggcccattggccttcgagtcacaacataactatgtcttaggtaatgtgattaaataaacttaagtatttatacttaagttcatatcttagtcacacgttatttatatcttagtcacacgttattgagtggaccacataatttcccccgctaaacattatcctttacaggttaaactgctgcagttagaaaactttgtctcaaattcttttgagtttggggtattgttaagaaaaaatgcataattaatcaaatgagagaaaggttttttggggggaggtataatttgtataagtaaactttgattaaccaatgtagctgtttaagtttcttcttccttacaattaacaccgtatttttgcagatattttatattttgactaatgcttctgaggaacaatttaaagaaaaatgcatgcaattatgtagtttatctgcaattcccttaaagaattctaagctaaaaccacaacaaaattattttaaatccagttttcctcatcatagttacaatgtaatccagttttaataaaagattcatattttaaaatccattttcaattgaaatgtaatgaatagcaattgttcctgctcaccttaaaatggaatttgtgctatttttgaaaatttgacatgtaaggctgatcattgtcaaaatgtatgtcatcttgagatgactatatttagcatcaacaaaggaatgcattatctaggtttttgaacagtctttttcccctgaaatttcacttgaagtatttaggttagggtttcatttttgagcagaataaaaactaaatatgcatatttggaagacattaattggggattcagattgcttagaatctgagcggcctataatgacatacttcatttattaaaaaaaatacctgttatctttgaaataccctaaaagacaaaaaaaagggggattatttaaatatgagagttgtgcacacctaaaagaaagaaaataatgcagtgaatgtggaaaagtatgtaacagacaggtaaaagtctaaacgtttttatagaagagaggactgttattttatagttatgtaggccacacacacacagaacatcttggtagtttataatttggagagaaaatgatttataacattcttaacaatttcacatatttctgttcttatttaatcaatctgcggtccatatcacctgtgtagtttctttcatgttctctttctgggtttataattgcatagttacatattatatacatttgaaatggctacattttcctttattatttaaatattcagtgtatagtttggcttaatttatagtagtttactttctatactccagggtgggtggatttgtacccagaaatccaccttaaattttagtttaatttgtattataatgttaatacaccatgttatatttatggttaaaaattatggagaatggaaaaaggggctcttgtaatctgacactcttactgttaggattttgatgtatttcctttaagtctttttcccatgcatagaactctttctttttgcattgacatatctcaataaaacaacatgtgaaagcatcccatgcagtgtctgccatccagtaagtgctcaacaggtgattctttttcttcctcctttatttccttcttgacatctcttcctttttactcttagattagaagacaagcagattggggctccctatatgaggtttcaaggtt

SEQ ID NO: 1879843 - DNA, 4001 bp, Homo sapiens
atacatttattttgaagctgataataagtaaactgataaaaagcagaaggttgagattaaggcttcttattgctaaaagattgatcttaagtacaatcacgtgaaaactgatagttacataacctgaaaaatcataaaatactgaaaaattatgactgttatgtgattgttttcagttgtcagactacgtgatgttaaaatggcagttgattttttgtattaacacagtgcctctaattttaaaaactgcttcagcaatcatgtatttaatgaaaacagaagtaacgatacaaaataacaaaaatataaatagagttcagaatttgaaaatactgtattaggaggtaagctgactatttttcgtgttctttaaatatatttagatcaacttgaatattaagcctcctacagcaggtagatagaggtatcaattcagttaccatttaaaatacagtaactccaatgaggagtttcttataattatttctaattactttttgatattagaaattagagctataccagaatgctgggaaagatgtctttttcaacattgtatcacagcatcaagcattatgcatcaaacatcaattcctactcacaatatccattcaatgtatatttggattatattttctttggatagaccctcatagtagaaactctgtattaaccagcttgcaagatgaaccaagactttttgttttctttgtaatatactgattcctttggcatgttgaattttcatggccaacagttacctactaccacatcctagcactattgtttttaccagttgtgtgcttaccacgtcagttgtgttattccggacctgtttatactagtcttatttgtatcaccattgtgtaatttaattaaatttatgtgaaccaatggcatgcaagttcaaaatggaaaagttttatttctatgaaactaacccagtgccttggaaagaatcagtaaaggcaagctacaaaaatttctgtcagattacatgtcagtgagataactacagaagatgagagaaggttgtaaaaataagagttttgttagattattttagaaatatctttaaattctcccactacttaaagtaaatggaactggaaatcttttatgatgcattatagatacgcattatataagaaagatgctgtggagctccaattattaacagacattattaaatttaaatttttgcctctgcataaaaagattggccaaagaatgtacatacacatgctcaaagttaaaatgtttaaggtgcatatgtctcattaatgagtatcttcttcatccattttttcaaattaaccaatcaacaactggccctaacagtactggataaggtaacttctattctattttgtattcctactctttacagagttttagagatgttttgtttcctacctaccaagggaaaaaaagggaattggcagatagagtttatatcttgggatgagatgtgtaaagggccaggacctgaaattacgtgaaggttgatattctgggattggtagttttgaagttccataaagaagttcagtccagccatgttccaaatgctctgagtataggcactggctggtaagcttagtggagtgttatacaacatggaagtctaactggcagttcaatgtcccaaaagttggacagaaccaagaaatagagaacataagcagatgacagtaatccaggcagaaggttagtgtcagagaagtctgtcagtgggtcatagggctccacgtgctagcctgggtttccgtgccagaattttgttcttgggaggcaggtagggaaaagcaagtcaacatctccagttccagatgagctagggcacttgaccaaatacaggtacagaagttagtccttgaggtagagcttacctgttggagaacatggcagaaatcattgtaccaaaattggagcacaggtcagaggctaaagcatggcttactgctgtggctcatggtgaacttgagcttctcatggcccctcctatctcctgaggatggctgagctcacagatggggactgttatgtaatcagaggtcaagtggtttagctggggtggcagagagccaggtgaagactgaaagtgttcaaataaggaagagaacagaattgctttatgtctgccttcatgaagacaaaccctaatagccaaaggactgaaagtttgcccaaagagacctcaatttttgaaaggaaaatgcatcttctccttatgttagaatgaccacgtctaaataaaataaactcttttgccttttgttgttacttgtcttggtatctaccattgtttgacactaaaaaaaaataaagcagtgactaattattggctaatttaatctgtcatgatggcatttgtaattcaggtacatccttcattaaagcaagtataggcattattatttttaaaactttttttttctatttggatttcttctattttgtttgattatttattttgttgttactggtggtggtggtgttttacagtgagacatactggttagctcagctaaggtgtttgagtaagacttcataaacataaagtactttgtgtgggtttgttttgtgtgttccatcttacgtcatttgtggcactgaaaatgagattgcaattcccagagtactgggatagttcattcagaggttagcccacctaagtttatagcagttgtctgtaatagaattgtaactaatttccactgttgtttttggagaaaactgtagactataattatgtgttagcactttttaaacagctccctgcattgtcatatcattttaaatgggctctgttttaaaatgacctttcatgttttgattgcaaaaatatagcttacacaggtctgtagttagcaaaatacaaggatccagtaaatgatagagcattgacacaactctagaagcatgtgttaaacatcactggcactgccctaggtttaaaggggaagaaatagggaagtagaaattcactgttcttcaacactccttctgttggataggcaagattagtacatagaacagttatggagccatgtgaaaaaaaatagtagttatacaaatgtaaaatgctacacatgaagtatattgcattacctttttgtggcctatggaaagaagtctcagagcacagtaagattcaagtaccatctcccagaattggggtcagcaacaccattttatattttggcaaatgctacccactgtctcccaaacggcagatatctgcatatagttagtcatgtggacacacccttcctctgctacattgcattgccatattagtagtagaattttagtgttgatttaaaagacagtctgccttaaagcagattgcatagtttgcacactgtgaattgtaattaaagtgtaaggggggcttattatgtcaacaactggcatgagaacccccgagcagcaggtgaccctgaccatgtgacgtttgtgacagctaggatccccttttcactggcttagcgatctgaaagtccaaattgaaagaagcccagaggctgtatatttcattagatcccaggggaagtacaggatacagcttccttctgttttcctgggaggtcgccagaaagtttgtagagctctgtttctgtcagagactcaaaagagaaaagaaaaagcacacacaaaacaaaacaaaacaccatacacaccacaaaaccatccaccaatcacccccaggaccataaatttgacatttcccacagtctgagaccacagtgttgctgtgtcagcaatacgctccttgtttgaattgtctgaaaggaaggctcagtgttctagcttttaaaaaatgtgtaatcttcaatatgcagtgattctcttggtgtaaaaccatgagaaattatcaagtacagatatcatatgatttgcttgaaatacttttgcattatgcgttactttctcctgaccttctaaaatggggcataagtccgaatttagaaagaggaaaccacatgtgtaataag

SEQ ID NO: 1879844 - DNA, 4001 bp, Homo sapiens
aagagaagtagcaggacagggggctgtggccagagtgagatgttggaaggtgaggtttcgtgaagacatcaaggcctagaacatggctagggaaaagtttggctgactgaagaacaaggcacaatctagtgttcaaataccttcatgctgctgctcttgcctcactgaagaggtaaagtgtcttcagaagacatgtgacataagggaatggtggatggttgaagaaacacttggctgttctaatgtaaacagaagaaggagtgggaagctctcatttctccatcattatcaggctctgttctcaggaagccagagaaacctatggcatgctgcctatgcaggcctcctccagacccatggctcagacagacccgcctgaactccagcagagaaacaagcccctgaccattcccttcatcagggcaggcaggatgcaagccaacagcttctcctccagtgagccaatcccattacttttttcctttttaactttgtaagaacacgtaacatgagggccaccttcttagcaaaattttaagcacacaatacagtattattgaccataggtaaagcgttgtacagcagatctctagaactcactcatcttgcttaactaaaactgtatgtccattgattaacaactgttcatttctcactccacctagctcctggcaaccaccattgcactctttgattctacgaatttggcaattttagataccccacataagtggaatcatgcagtttcgtctttctctgagtggtttatttcatttagtataatgtcctcaagattcatccatgttgtcacatattttagagtttcttttttaaggctaagtaatattctgggatgtgtgtgtatgtgtgtgtgtgttccacattttctttatccattgatctgttgttggatatttagttcatttctacatcttggctattgtgtatagtgctgcaatgaacatgggagtactaatatctcttcaagatcctcatttcaattcttttggataaataccctgtgggactgctggatcatatggtaattctatttttaattttttgaggaacctccatactgttttccatagcagctgcaccatttggcattcccaccaacagcatgcagggttccaactttcccacatccttgcctgaatctctttttggattccggagtgacagtgtctcaggatcttggcggggaaggaccatcacctcctcataatccgtgccactctggagggctgagcacacagttctccttgtttccctgtttgccagcttgccttgtggataaatgcagagaaggattcaggattggagggaagggtgaattcacggccctacagagcatgtctaaaagcatttgtcaaaaaaagagttaatgactgcttctctgcgggaagccctaaagaaatgagtgtcctgaagtgtagaacattcgcttttacggtaggtggtgttattgttacatgttcatacagacagtgctaattaacaatcctaaaggccacatcattaaattatttctccgctaaaaaccctatgatgtttaatgcgtcccagcaattcaattatatctaaaacactggcctgaacggcaggcactattctgtggctgacaaagtgcaagttgctcttaagaacaggtgaagcttaacaaggaaagaacaacatctgacaaactacctccctgctcttctccctaacatacaccctaagaataaaaacaacagtgatattccaagaaaattaacgtgggtcttacctttgctaggctggcgatgaaatataggctttaccaaattttctgtgaagaatctgacaagattttcttaaaagatttcacccaaaataatcaaatcagtgccctcagatctatttaaggtccatcgggtttcactgttttttctctggatcctaccacccatcctttgtcatttctaaccactgcaaattgcattttgggtttgaacttggggtgacttcatggctttggtctgggtttttcctggatgtgtatcacagtcagcagagagcactttgaagagcacacaaagcctctttgtctcccactcagtgaaatatctcaagtacagagcacagtgaaaaagggcttctttccagcttaaacacacacacacacacacacacacacacacacacacacacacacacacaaaagaagctcttgcccttccctgccgcccccagctgctgtggtgagacagtctctgcacaggcacagggcccagtgcaactggccaagtggcctcagtcctctggacaaggcttggcaggcagcaccatgacagaacctcctgcttggaaggtgttggtgccgagactgcatctgggagcagcacatatgtgattccactagtttttacacaaagaggcagactatgccagtggccagctggccagctgggcactcatctgcaaccttagaagcaggagtcagggagcaacccactgatcctcttgtcatggtcttcccaagtgcccagtttccacataaaccatttcctcatcactctcctccctaacactatcccaacagtaccctcaaggaggccccactcagctctatgaggacagggggctatgtatctccttagctccataccaccaagcacactgccttacatggaacacactctcagtaaaggtttcttggatggaaagatgaatgaacagatagacagatggatgatgggtgggtggataagtgtgtgcatggatgggtgtgtgcagggatgggtgggtggatggatgggtgggtggatagaagaatcttataaaccattgttcggatcctggctcaaacattttctttttgtgagatcttgggaaaattaccaaaactaagatactacaaaactaagccttttggttttttatctgtacaaagaatgatagcagttacggtggagattgagaaaattcagtaagcacctgatagtaggtgctctgtacacattcatggtttttacccaggaactgtttatagattatcaagtcccttgcttctgtaggaggtctttcctatcactgtcgaattcattgctcacttgcatctctcccaaagggatggcagaggaaaggtagtaaagggtgcttagagtggagtgaggactacaagagggagcaccagtattgactggggatgcagggtttctaatttttctagcccagaaaaattcagacaggcatggtttggaggagacctgggttccagtcaaggccctgtccccaactagctggataaacatggcatgatcacctctcccttgtggtcctagatttcttctatgagataaactcatatgattgcatgaatgctgaagtctcttcaactcccaactctgtgattctatccttcgagatccacttaacatcttcttacctcctcattgaagcctgtcctgaccattcctgctgacaataaattctccctcttctcagaatctgtgactcttgtctgcgctatgtgtctggaaattagttcacttcatagccttgcaatgatgatgatagcaaactctcaaatcatactaactggaggaccagagattattcttagctacacacatacgcacacacacttgaacatatgcatgcacatacacacacatacacacataatcattacattctcataatacctctctatgaagtgagcaatctcaaaatctcattttacagatgaaaaactgacacataaacacacacaaaaaacttacccaagaccaaacagctttaagcactgggccaagtatttgaacccaagcaggcatgacctgctgttaccaggctgtcataggtctccttgttattcagcatctcactcctctccccagtagcttccctaagcataggggcagtggggtgctgtggctaagtcaaaggactccctgtctagaccacctgtatgtgaaccccaaatctattttactgctttgtacctctattttcccatgcataaaacaagagta

SEQ ID NO: 1879845 - DNA, 4001 bp, Homo sapiens
tttccattagctacatctgtctctacaatctcaacatactattctcttgaatctgtttttaattttatgccatttctcatgtctgaaaatgtcattataagtaactttttttttttctgagacagggcctcgcactgtcgcccatgctagagtgcagcgagacactcgtagctcttaccagtaacttctttataacacttttgcaatttacgaagcactctcacattatttcattcactctccccaacattaccaaaagttaggaattagatctttttacagatgaaggaattgagactccctgaagtcaagtgtcttatagttaggttttgttcattcattcatcaaatagagtgcctgatgtgagatttattgaaactggatttgaaaacaattttcctgaattcaagtcgagggtttactccactattctcaattactttatcaccagggttataaacccaaaggaagtgagtaacaacagtgtgattttattgaggacccatgcaacactagtctcagaaaggctccagtgtcatttgtaaaattcaaggttaccatcagcagaggcagtcattcctctctgcgcttgttacctaatgcactaactctcactgtaggtaattccattcaagacacatttgatgactatacctacaggttttgaagttattcggatggggttttgacacttactagctgtggggacttagatcaagttacttaacctttttgagcttcagttttatcatttgtaaaatggatacaatcctgatgcctttggaccaagtggtcacggaaatgaaagagataagtatgaaaaaatccatgctcatagtagctgtggtttccaactgcgtgataaaactttaaaatctgcattcaaataagaacaactatgtcgacgtaaggttacaagctaactattcttggtaagtactgttctttattctagaggacatcactttacagtttggtgctaaatgctcttttatgaatttaaggtgccagtagctgtctacttgaacggcatgcttaatctggaacgccatgtcgaccttcatcccccagttctttctccccaaattaaaaacacaaatacacacacacgcccctacttagttcctaaaactcaagggcacgcgcacacacctacttatttcctaaaattcaagctcgcaccaaggagatccacaaggataggcagggtggtggaggtcactgggcagcgcctccggatcccccgaaagggggcggggtcaaaactcagatctcgagctcccgaaagggggcggggttaaaactctcagatctcattccgcctccctctgtcgtcgccccttcccaattctcgcgagacctcaaggagcacagcttctgcgcaccgcacgatactgggagtccaggcgccaagggagggggaagggaaaaggggaaacggtgcaaacggcgtggccgccatcttgcttgtgcccccgcttcgcgcgcgctccgttctccgtgacgcacacttccccctcccctccgccgcgcctgggcctctgcattgcccgactccgtaggagcgcgggggcggctcctgctcttcctggactcctgagcagaggtgtgtgagtgtgcgggagtttctgtgcgagggtgatagggaagcggcggcggggggaggggcagcgcttcccgccttcgccagagacctcacttcctcgcgcggccgctgctgtagctcggtccgtcctgcccgccgccatgttgtgctcttgcctggcccgctgctgtcgccgccgccgcgctcgtggggtccgtgtgcctcgtcggcccggcccgcgggctttctcccattggcggaaggcgacggcgggggggctcgctcgtgattggtcggtggcggggaggccgcggacctggcaccttattggacgcgccagctccggtctagggggtgatgaaggaatctgaggctgcggggatgcgcgcgtcttgggctagggcggctggggcaatgaccccctgcggcgcaggcgtggggttgcggcgagagggcgagcctagaggctttaagggggaagagagggtgatggcctggcaggtactttgggggtagcttaggccatggcctgggaatgggggacactcactttcagaggtgcttttcctggtacatgcatggcccaagattggggtgtgcaggccctcagggttccaggcttggaaacaccgaaacccaagtgacaggctgagagtcttcgagatccagggttgctaatgtgacccagtttggaagtggccctgaagtccacggtgtgagtgtatggtgtaggaagaaaggcatcagggctaggggcatagctgaacggtagaatcggatcagggattttgctggagagtgcaagcattcaaacactgaggttttggtggagccctggagtccagagtcaacggacctgggatgtgatgtgaggagcaagtaaaccgagagaggaatgctattgagaagtgtgctctgtccgagcctaggaagcacagcattaagtagtatcagatttaaagtgacaaaatctgatataggaagcattttaggggacattttcggacttgggaagtgtattaatagaacagttatacattattgagtctcaggaccatacaagtagttttgagatgttgtatatgaaatttgctgctctaggaaggatacaggtcatggctgagtttccaaagccacattagcaaatattaggtagttggtagttatttgttgagtaaatattgttaggttcccctttaagggaaagggagctagccagaaattttcggtcttggtttatttccttgtatatgtgcctaaaaagtatacccattcccatgtgtactttgaattttttgtttgttttttcaaataagcagctccaaaccaaaaaaaagcccatgcatagcttcttaaggaacaggacttgtcaacactttctggttcatattcaaaaagtttttattccaatccagagtcgttccagtcaacttgttgggaatatgttcttttccactgaatctgaatcgtagttacttgtattgctttacatttgctcgtcccagtgtgtgagggccatggaaacacatttatgttaaacatctgtgttttcctaatttgtttttccttgtttttgttaggtagtcctttttagctttagatggtactcttctgttttcataccaatttcaagaaactcctagggttttcaaatttagttttatgtgaatgcaactacattttctggagaagggaattgataagtagcagaggaagagaattgctattttggggcatattttaactccaataggtaggcattatcgtccccatattgcagatgaggaaactgaggatcagagagtttaagtagcttgtctggtgtcactcagtaagtggttgagctagaattcaaaccctggttgcctgatgccaaagcctgtaattttatctgctacatcagctatcaacataaacctgactaatgaaacttccagataattttgtatttccaagtggatcatctactttgatttctgggtgtttagagtgtataaaatggaagactataattcttaagaatttcttgtgctgcttaaggattcagaccacagaattgtaaccatagagaatatgggttcttcagctaggtattcaaatcatatcccttggcttctattgtgaaagggaagatttaccaagtaaattgctgcattttttcctgaatccaggtagataatggggaaaaatatgtacagaaacttgaagaatctgcattccttaaaaccaagcttcagaatattgcagatagtctttctgtatgtggaggtaatttatgccaaatggcgaggaactaccaagtgcctagtgtaaagagctcactggagaggtttttcaagcatcaccagttccttagggtgtccccaaataccaggacctattcaaaggcctagtgctttcttcagactgtgggata

SEQ ID NO: 1879846 - DNA, 4001 bp, Homo sapiens; identical to SEQ ID NO: 1412

SEQ ID NO: 1879847 - DNA, 4001 bp, Homo sapiens; identical to SEQ ID NO: 1423

SEQ ID NO: 1879848 - DNA, 4001 bp, Homo sapiens
gtctatctctgggctaaactgatgggaacaaaatatctggtgacttaaacacaacaggatgtgcacgagggatgaattccaataacattcaccggggcagcctcagggcaggcggctgctgatccagccctcgagaggccggggtcctcctgcagggcgttagctctgccagctccaggaaggggcggggagaggggacaaagtgtctgtgacaggtgatcacaccattctcctgacttggacaattggcttccttcttaataaaaggaagaaataacgtgatcaagctctgaacactgccataaaacacagcagcagctggccaaatagtaacatttaaataagaattgcctttttggtccttgtgatgtcctgcgctatttcctgggagtattatccccatttcataagtcaggtgcattctgggaagcagaaacatttagaagtcaaagcaattttggtcagggagataagaaaatggggaaaatggaggggccacaatcagctagaaaagaccttgaagcagccccatctctggagtggaattattccctagagtgtgctgagcgcaagatctggaccagcagagccaggactgatgctcaccccagggtgaaaggcagacttggccaaggaggtcgcccagggctgggcctgagagctgtgctgccagggccaggtgccgaggcccgtgggcaacctccacggttttaaaaaaaactaaacgtaaatgaaggccatcttgagccaaagcacgtctgccccagggatgcctgctgggactaataccatgtagaaggtgggggaagataagcatgaatgcccaatgcccagatgctcactttgggtgcctagtcagagggggcgggccagcctggagaagaatgacgtcactgaacgacagggtgcgcttcccatgcttcatgtgaaaccttcaggcacgtgctggcaggaagcatcttccccacgcaccctccctgcggcacaggaggccctcctgaagggcctctgtatgtaagcttgggacagctagtgcaggggagagagaggtgtttgtgaagggcagacaccctcttcctcaaataggccatctgctttatcatagcacatacctttcagtggtcactggctcagaagtgcttcctttctactttggaaaaaaaatggtagcattccccagagttgagtgaagctgctttatccaggagtgccctgctttcagctaactttggtgggtgatgccaagatcctctgagctctgcctgcttcatcaggaagacggagatcaaaacttaaggaaatgaaaaaggatctgggtagaaacgtgttactgggagactgggaataatctgcagatggagagaaagctgcaatgttaagaattagggtagacgtaaatctgatcctattatcagattgaccatccaggggttattagtgtgattttaatcctttatgtttctggtgggcggtggttctaaggagagtcaaaccacagggcaagaccagagcctctgctcacacccaggagcagagtgtttcccttaaaaccaactagcgaggataccgtgttaagagtcccaaataagggaaggactctctgaaatattgagaattttctcagtgcccaattcctaaacctagtcatgaactgtatgttgtcactggcatctccccagcttttgccttggccaagtccctctcacacatttaaggcaacagccgggttctctaggaaagtagcaaagatggccaggaacactgctcggagtgcagcccggggcccgcctgattctacctctgcttctggctctggtggagccaggggtgggcctgtgccaacactggagggtgggaacacagggagcaggaagtgggaagatccttgctggggaagtcagaaaagtccaagctctgatggttcaaaaccacccccaggacctctgaccagcaaggtgtccgatgactcccggctttctgagtgagtgggtgactgggaatcttccatgccccggaacagccccagccagctgtgcccgccggagtgagcatgatttgcctccccaggcagcaccaggagagggtgggctgggctgtcagatggtctggtagtgctgcctcagccgggcctgcagaaattcataggtgaggttgtgccgtgtgatgatccccacgatctagggcaaagagaaggcctgagtcaccttcagggtaaaacccgctggcgagaacaggagtgacaggagccggccctgttagtttgtcacagaatgtggaggcctggatagtgcacagccagacacagcttgattgggataaacagctaacgagggctcacacactggaggccaaggggacaaggttagctccaaaaagggcttgggccagctggcatctgaactaaaatgtccttccacagggcacatgctcagcgctcagctcccatcatgaccagcctgcttcacagatgtgcaagcggtggggcccttgaagtctcctgagattatgacccctgccatgcctcatactcaccaccttgcaaagtgacctatgggagtcatttgttacaggtcgttacagtggttcccacgtgtcactgttgttgggaactccaaagccacgtcataaactatgttaggactctgtcagtgtagttggcaattacatttcaagggacataagttaacctactgcaacaaaacctgtgtaagtacgcactatgcatgccagggttgtgccgcatagaagaaaagactgaggccgggtgcagtggctgacgcatgtaatcccagcactttgggaggccgaggcaggtgaatcacttgagttcaggagttcaagaccagcctgggcaacatggcgaaaccgtgtctctaccataaatacaaaaactagctgggcatagtggcgcatgcctgtggtcccagctactcaggaggctgaggtgggaggactgcttgagcctggaaggtcgaggctgcagtgagccgagatcttgccactgcactccagcctgggtgacagagtgagaccctgtctcaaaacaacaacaacagcaacaacaacaaaagactgagagggtggccttgaaaagttaccagggctaccgcgacagggtagggacgagggtttggtttttgcttgttttttgctcatatgtgtttttgtattttcctacaatgaaatcatatttgtgtaataagaaaatatttgtgtaataagaaaataatgaagttctaaaaagaagaaaaaaggaaagtctgcagcaataattactaggtgttttatatctttgtaaaactcaaagtattttgcttgaaattctctcatctaatgcgcaaatccctacgcaggtggagaaccaaggaacaccagtggtacggagtgaagagcaacatttcaggaggaagacacagcctggtagaggcgcggctctggctggaaaggacggccagtgggacgctggtgccatctgctggcaggcaggggaaagggtcccgagtgcacggaagccgagcagggttcaaagctagtgttgggccacactctcccctcctggtgggatgcctacgtttctggtgagaagcctgggtgcacaaacagcacctggctaggggatcctctctcaaaggtgggggcagggccggggcctcgctcacctctcccacagcgttcaccacgggcaggtggcgcaggcccatcgttctgaacaggttgaagacttgggagacgtgggtgttgggcgagacggtgaaaggcgaagggttcatgtatggggtgacatcctgcaaagagaccacgtgtcactgactgcctgagacgccaacggcatgaagaggcagctccgcatgggacaggccggggcagcccttctcaccacgatcatgcgcgggttgagcagcgtcaggtccaggtcgtggatgtcggggtaccgcgggtagtcctcggccatctcggcataggagaggcgcggctggctggcgctctgcaattccaaccca

SEQ ID NO: 1879849 - DNA, 4001 bp, Homo sapiens; identical to SEQ ID NO: 1437

SEQ ID NO: 1879850 - DNA, 4001 bp, Homo sapiens
taaaagacttaattcttagttcaggtatgttccagtgcctcgaaagttagttatgtgacaaatagtacctgttgacaacctagaaaagatgagacattctaaggtgccctaacaatcttcagtctctaacagctgaacaggaaggccatttcactcaactgtgatgcgatcatcactgactggcatttagaattagatttcaagactccactcctgtgggggccactaaataactgaatacattttaagagcaatctacactgagggaaataacggttctaaggtattctgcatagaaagagtatcgataatgggaactggcaactgagcatgctaaatcaaattccatgaatacagttttcataagatgtctttactacatgcattttgctaatatttccctaaaatattcaccaactctacagagttatactttgtgttaaggtactattgagttataagggaaatagccatatcaggtagctagtgacataataccagttgtgaaaattcagacaaaatgagtcgacaaatccccaaaaatggcaaattaagccctgtgacaaaataagttattggatcatacagaaatagcccaaatctggaaattttgaattaaaattgtaatcctgtaaaacaagttttggggtgaatggatttctttaaaaccaataatatttttaattcccaccacagatggatttgctgaatatgctaatgctgtgaatgagaaaacaattttggggtaggtatacccacaagtaatctgatgacaaaataaaccacagactgatgtcaaatggacaaaaaactgaaaatatgctgtgagaaatagacaaccaaaataatatagggggttgtggggtgtggcacagttaaggcatctaaacaaaaattccacatggctttggcttattaaaatattttacactatttttttaaaaaaagatttgaaagcatctgaaaaacatgcaaattgtttgaaaaccttgcatggcaaattcagacagtttgcaagcgtcaatcagatgtttgacgaggaaacgaaagaagcctctccccatgagactgcacatggtgggagaggcctacccagttctctctatcttacactagatggcaacccagaggtctgtgcagcggttacaaacaaggcattattatccggaagggaagggactgtagaatttccattggctggggaacaacccagctttagcttttccagatactctgcatgtacaggtttatgacactggagaactttgatagcatcttctactttgaaccactctctcttccttccaatattaacagaatcttcccaatcttctaatatttcagtgactgttagaacataaacatatgttctgtgctttcggtcttggttctgctcaaatatgcccagaagtctgcctagttttcctttgactccagcctcctcataaacttccctcacggcagcaccgccaggttcctcctcgggttccattcctcctcctgggacaatccactggtctgggtaccggctgctactcaccagcagcacctcgtcctcctgctcgctccggaagcacaggcacgccgcccgcttcttgaagccctcgcggtcgtaggtccgcgtctggttgggcttgaacttcatcatagaggcgggctcctgctgctgctgctgctgctccggccgccgccgtgggggcccggccgccgccaccccgccggggagtgggggcgagggcgagtcgggcgcaggagcgcccgggagcgctagtcggtgcgggaggtgcggcgaggccggtcagtcccggggccggcggccgctccgacgcgggcgggacgggacgctagcgcgggtcactggaaccagggtgccgagatgaaagctccgcctctgcccagttgtccgccgctctccatggagcccgactcccgctcgcctccgctccctccagccgtagccgccaggggaagggcggctagaggcgcgcgccacgcggagacagttgcgaagacccgctcccactgagcagcagcaccacggcgactgtattttagcttctacatttaggcctatgattcactttgagttaattattgtgtacaatcttaggggtccaaattaattcttttgcgtgtggatatccagttgcccagcaccacttgttgaaaagaccatttttttttccccattgaattgtcttggctctttcgttgaaaatcaattgattgtaactgttagggtttatttgtgattctcaattctgttccattgatctgtatgtttatccttctgtcagtaacacactgtctttgttactgtagttttgttgtaagttttgaaattgggaagtgtgaatccaccaactttgttcttcattgttttggcttttatgagtcccatgcatttccatatacattttaagagcagcagaaattgacaagttgattctaaaattcattaaaaaccctcacttctaagaaacaattaaaatattttctttccaacttaggatgaaattggataaggaggactgagcaggtacatttttgagttgtggtgatgggggatgggtcatttgaaagggggaccaacctgatggaggaggggaataaaggagccacaaagtttggtaaacttcccaccctggtgagaggaatgtttgttcagaggaggcagtttgttctaacaccagggaatattatgaaagataattgaaattgtaaagtccattgatatctccccagaagacaaaaaggtctctaagtaagcagtattgttagcttgttgattcttacagaagaagattttcatccaactaagggaagcagctgggactttctcagggctgtaagacagaaaaaaaatgaagaaatccttctgtatcttttcttacctctccctgtggccagccctaacttttgtccatttttgttacccttcccttttataagctccccaaaaagagagagaggagaaagagaaaaagaagaaaaccacagtgggagagagggttagagatcctggggatgggggaggaatcctggagcatttcaaattaaagatccctaaggtactatgggtggaacctactaagtaatatgacaacttgtagcaagagtcataaggatgatcacatcttcaactcagtgatccaattcctgggaatttatgtaaggaaataagacaggcaaaaagtgtgagtgggaatgttaatgaaaatattacctataatagtgcaaacaggaacaacctaaatcaccaaaatagaagcatgttttatgacatcatggcatgtaaagatggcagattataatactagcttcactgtcaaaatatactctgaattgtatcacttttcactgcattctgtatcactctggatcaagtcactattattcctcatctgaattattgcaatggcctcccaactggcatttctgctttcacccttgttccccacccccggtctactctcaacacagcacccttagcagtcctttaaaaacttaaatgtaaaattcatatggaatcataaaagggcctaaatagccaaagcaatcctaagcaaaaagaacaaatctggaggcatcacattacccaacttcaaattatactacaaggttatagtaatcgaaacagcatggtactgatataaaagtagatgcatagaccagtggaacagactagagaacctggaagtaaagccagatacttagaaccaactgatcttcaacaaagcatacaaaaacataaattgggaaaaggacaccctatttagtaaatggttctgtgaaaactggagagccactggatagaagaatgaaactggatccatctctctcaccacatacaaaaatcaccctaagatggaataaagacttaaatataagacctgaaaccataacaattctagaagaaaacataggaaaaattcttctggactttggcctaggcacaaaattatgactaagaccccaaaagcaaatgcaacaaaaattta

SEQ ID NO: 1879851 - DNA, 4001 bp, Homo sapiens; identical to SEQ ID NO: 1879850

SEQ ID NO: 1879852 - DNA, 4001 bp, Homo sapiens
agttagttatgtgacaaatagtacctgttgacaacctagaaaagatgagacattctaaggtgccctaacaatcttcagtctctaacagctgaacaggaaggccatttcactcaactgtgatgcgatcatcactgactggcatttagaattagatttcaagactccactcctgtgggggccactaaataactgaatacattttaagagcaatctacactgagggaaataacggttctaaggtattctgcatagaaagagtatcgataatgggaactggcaactgagcatgctaaatcaaattccatgaatacagttttcataagatgtctttactacatgcattttgctaatatttccctaaaatattcaccaactctacagagttatactttgtgttaaggtactattgagttataagggaaatagccatatcaggtagctagtgacataataccagttgtgaaaattcagacaaaatgagtcgacaaatccccaaaaatggcaaattaagccctgtgacaaaataagttattggatcatacagaaatagcccaaatctggaaattttgaattaaaattgtaatcctgtaaaacaagttttggggtgaatggatttctttaaaaccaataatatttttaattcccaccacagatggatttgctgaatatgctaatgctgtgaatgagaaaacaattttggggtaggtatacccacaagtaatctgatgacaaaataaaccacagactgatgtcaaatggacaaaaaactgaaaatatgctgtgagaaatagacaaccaaaataatatagggggttgtggggtgtggcacagttaaggcatctaaacaaaaattccacatggctttggcttattaaaatattttacactatttttttaaaaaaagatttgaaagcatctgaaaaacatgcaaattgtttgaaaaccttgcatggcaaattcagacagtttgcaagcgtcaatcagatgtttgacgaggaaacgaaagaagcctctccccatgagactgcacatggtgggagaggcctacccagttctctctatcttacactagatggcaacccagaggtctgtgcagcggttacaaacaaggcattattatccggaagggaagggactgtagaatttccattggctggggaacaacccagctttagcttttccagatactctgcatgtacaggtttatgacactggagaactttgatagcatcttctactttgaaccactctctcttccttccaatattaacagaatcttcccaatcttctaatatttcagtgactgttagaacataaacatatgttctgtgctttcggtcttggttctgctcaaatatgcccagaagtctgcctagttttcctttgactccagcctcctcataaacttccctcacggcagcaccgccaggttcctcctcgggttccattcctcctcctgggacaatccactggtctgggtaccggctgctactcaccagcagcacctcgtcctcctgctcgctccggaagcacaggcacgccgcccgcttcttgaagccctcgcggtcgtaggtccgcgtctggttgggcttgaacttcatcatagaggcgggctcctgctgctgctgctgctgctccggccgccgccgtgggggcccggccgccgccaccccgccggggagtgggggcgagggcgagtcgggcgcaggagcgcccgggagcgctagtcggtgcgggaggtgcggcgaggccggtcagtcccggggccggcggccgctccgacgcgggcgggacgggacgctagcgcgggtcactggaaccagggtgccgagatgaaagctccgcctctgcccagttgtccgccgctctccatggagcccgactcccgctcgcctccgctccctccagccgtagccgccaggggaagggcggctagaggcgcgcgccacgcggagacagttgcgaagacccgctcccactgagcagcagcaccacggcgactgtattttagcttctacatttaggcctatgattcactttgagttaattattgtgtacaatcttaggggtccaaattaattcttttgcgtgtggatatccagttgcccagcaccacttgttgaaaagaccatttttttttccccattgaattgtcttggctctttcgttgaaaatcaattgattgtaactgttagggtttatttgtgattctcaattctgttccattgatctgtatgtttatccttctgtcagtaacacactgtctttgttactgtagttttgttgtaagttttgaaattgggaagtgtgaatccaccaactttgttcttcattgttttggcttttatgagtcccatgcatttccatatacattttaagagcagcagaaattgacaagttgattctaaaattcattaaaaaccctcacttctaagaaacaattaaaatattttctttccaacttaggatgaaattggataaggaggactgagcaggtacatttttgagttgtggtgatgggggatgggtcatttgaaagggggaccaacctgatggaggaggggaataaaggagccacaaagtttggtaaacttcccaccctggtgagaggaatgtttgttcagaggaggcagtttgttctaacaccagggaatattatgaaagataattgaaattgtaaagtccattgatatctccccagaagacaaaaaggtctctaagtaagcagtattgttagcttgttgattcttacagaagaagattttcatccaactaagggaagcagctgggactttctcagggctgtaagacagaaaaaaaatgaagaaatccttctgtatcttttcttacctctccctgtggccagccctaacttttgtccatttttgttacccttcccttttataagctccccaaaaagagagagaggagaaagagaaaaagaagaaaaccacagtgggagagagggttagagatcctggggatgggggaggaatcctggagcatttcaaattaaagatccctaaggtactatgggtggaacctactaagtaatatgacaacttgtagcaagagtcataaggatgatcacatcttcaactcagtgatccaattcctgggaatttatgtaaggaaataagacaggcaaaaagtgtgagtgggaatgttaatgaaaatattacctataatagtgcaaacaggaacaacctaaatcaccaaaatagaagcatgttttatgacatcatggcatgtaaagatggcagattataatactagcttcactgtcaaaatatactctgaattgtatcacttttcactgcattctgtatcactctggatcaagtcactattattcctcatctgaattattgcaatggcctcccaactggcatttctgctttcacccttgttccccacccccggtctactctcaacacagcacccttagcagtcctttaaaaacttaaatgtaaaattcatatggaatcataaaagggcctaaatagccaaagcaatcctaagcaaaaagaacaaatctggaggcatcacattacccaacttcaaattatactacaaggttatagtaatcgaaacagcatggtactgatataaaagtagatgcatagaccagtggaacagactagagaacctggaagtaaagccagatacttagaaccaactgatcttcaacaaagcatacaaaaacataaattgggaaaaggacaccctatttagtaaatggttctgtgaaaactggagagccactggatagaagaatgaaactggatccatctctctcaccacatacaaaaatcaccctaagatggaataaagacttaaatataagacctgaaaccataacaattctagaagaaaacataggaaaaattcttctggactttggcctaggcacaaaattatgactaagaccccaaaagcaaatgcaacaaaaatttaaacaaataaacggaacctgattaaactaaaaggcttttgtgcgg

SEQ ID NO: 1879853 - DNA, 4001 bp, Homo sapiens; identical to SEQ ID NO: 1879852

SEQ ID NO: 1879854 - DNA, 4001 bp, Homo sapiens; identical to SEQ ID NO: 1459

SEQ ID NO: 1879855 - DNA, 4001 bp, Homo sapiens; identical to SEQ ID NO: 1460

SEQ ID NO: 1879856 - DNA, 4001 bp, Homo sapiens
atatactgtattcttacagtagagtaagctagaaaaagaaaatcttatgaagaaaatcatcagaaagagaaaacatatttactacttatttagtgaatgtggtttgtcatgaagatcttcatctatgttgcctttacattgagtaggctgagtagtaggaagaggaggagaggttggtcttgctgtctcaggagaggcagaggcagaaaaaaaaccacatgtaagtggacctgtacagttcagatctatgttgttcaaggaccaacttcctatcagtcactcaccactgctgtcacttggataattcggggcttttctcatttgctcattctaccttccttcttgcctcctctcctcagagattaaagagtttctcaggaatgggctcttctggaaagcaatggcctttcactcagagaaaggacctaagcggataacttttatgaaaataacgttgatccttttgggcacatgcctaagcatgtataaaaatagtggagcagaggagctgatcccaagtcatgctaaatagacccgttgatttatgacaagagtaagtagaaataaaattgtgcagaagagaatgtcttgcacgagaataccagtggctactcacgagggaaacattgagtgtgttgtgatgtgactgcaaatgttttaaataacctacttgacacccaactgagtctaagtcaactacagtctaagaggttctacagaaggtagctgtatagaacctcttatagggaaactcttgtctatctaaagccaagtagactgctccccagacataattatttatcctgaggtaaacttttaatagatcactactttaggaaaaaaatgaatatacgatctatcttttgataaaaagaaacaaatacaaaaccaaaataggtgtcttagaatatgcaattgaaatgccagactaaattaaaatacaaatcttttagattaatttccgtttgacatactgggcatgtaataatattttccttaaccgccgtacactgctgagttgatatgaacctagcgctttgactctaaggcagaacgtatgtctatattttcactgaaaagattttctgaatcactcgtgtcagggcccccatcacctccttgtttctcaggctgtagatgatggggttgagcattggagtgaggatggtgtagaagacagccagaaccttgtcctctgtcggagatcgcagggatcttgggcgtagataggtataagcaaagggtgcatagtagaaagtcactacagtgaggtgggtgctgcaggtcgaataggccttcttcctcccttctgcagagtgcatgtggtagacagcaaggagaatccggccataggaacatgcaatacaaatgaagggaaacacaagaaaaatggtggtgctcaaaaacaccgtgcactcatagacccaggtatccgtgcaggctagggtcaacatagctggaacatcacagaaaaaatgattgatggctctggacttgcaatatgggatacggagtgcatataccgtgtgagcacaagagttgatggagcctatcatccaagatcctgttatcatcagtgcacacactctttttctcatacggatgggatagtggagaggaaagcaaatagccacataacgatcataggccattgatgtcaggagcagcgcttctgcacctgctaaagtcaggaagaagaaactctgaatcccacacccagtgaaggagatagacttgtttccatacagaaaaatcataaaccatcttaggaacaatggtggaaatataatttaggtcaatgagggagagctgactaagtaggaaatacatgggtgtgtggagatggatgtccaagaagatgagaagaatcatggataggtttccaattagagccattaggaaaacgaaattaatgagaatgaagatgaaatggccaatttttggtggtggcgacaatcccaacaagatgaaagcagttgatgtttgattgtaattttccatggagcattcatatgatccttcctgaagggagacacaagggtaagtgaagtacagtagttcccccttatctgcaggggatgcatttcaagcccgccagtgaatgcctgaaattggggtttacactgaaccctatatacactatttttgtatcaataaatatatattataaagtttaatttataaattaggcaaggaagagattaacaaaaataactaaaaagaaaaccaaacaattataattatatactgtaataaaagttgtgtgaatgcagtttttttctttctctcaaaatatcttattgaacggtgtttatttttcttctgatgataaaatgcttcaggggaagataaaatgtctacgtgatgagataaagtgaggggaacaatgtaggcacggtaatgcaacattgggctatgactgaaaacaaatttaaaatttatgaagtgctcatttgtggaattttccatgcaatctcagatgacagttgatttcaggagaaaccacaaaaagcaaagcagtggataagggggactagttataaaacagtaagccaatagtttttaaaaagtccttagtttagttagactatgaattatttatacaattttacaactcttaaatgatgaagtaatctttcctatttagaaaaatatcttattttgtcacccagaaattatattttgtgagagaaatatttataaccacaatttttaataagaaatatatacatttataggaaaaaacatttctcttaaaacttcagtaggatacaaatgtttgctgcccaacacaaactcagatgtcatcaagatcatttgttattcttaaaacatatgcatgcaacagtaaattttatgcatatgttatggatccatattatgaacaatttagcactactttttcaggatgatttttttctacatttattctttaaaactgcagcagcctatggctcatttggagtaacttatatttccttcttgaattgtctttgcctaataattccaagtcaaactttcattagttaaacatcattatttggttcttctatttagaaatgtagaatacatccttatttcaagtacctttttcatgaaatgtaattcatacagttcatttttaatgtctaccaccatccattctcttttgccttctcatccaatttcagaattcttaagttagtgcagacccccatctgaatatctatatgccaagttcattttaccttccatgtctctgttcacgctctccccaatagaatgtgtattctgtatctttgctcccctaatgcttagattacatagactttgtggatccttcaagtcttatgaaaggatcataagaatatttatcaattatttaggaggatccataaagtataatgtaatctaagcattagggaagcaaaaacaataaattactttatgatccttcaaaagaaggggtttggagaaatgaacattcacttaaatggaaaaaaggaagcagcaacttgacagtttcctgggtataggtggttcgagcattcttctccagatagaagacatcagtggacgactttgcactgaatgcctaaaaggactgaagtctttaggcttaaatattattttagagccaaaggtcagcagacctttgaggaagtgtaacaatgtgaaagagtaagatccacacagtgtgcaaacacacatctatacacacacacaaagatgtacactcacttaaacatcaatacacatgtatatataccctgattaaaatgatcagaaacctgcaaaaagaatgattttttaaaaataagaattcctatctttaggaaggaaaatatgtatgatatgttatgaaatccacaaaataaatatcattatctatgtaaaaggatgtgacaggtaacgataaatgactcttggaaattaaaaatacaataattgataaaatttaaatgaaaatttcaaaagacaaattgggaaaattctatcagaaggaaaaaagaaaacaacct

SEQ ID NO: 1879857 - DNA, 4001 bp, Homo sapiens
ggataaaaaataagactaaattaaactaaaaaacttctgcacagcaaaagaaataatcaacagagttaagagacaaaccagagaatgggagaaaaatcttcacagtctatgcatctgacaatcgaataatatccagaatctaaaaagaactcaaacaaatcagcaagaagaaaataaacaatcccatcaaactgggattgggctaagggacttgaatagacaattctcaacaggatatacaaatggccaataagcatatgaaaaaatgctgaacatcactaattatcagagaaatgcaaatcaaaaccacagtgcaatacaacttcactcttgcaagaatggccataatcagaaaatcaaacaataatagatgttggcatggatgtggagaaaaggaaacccttttacacagttgatgggaatgtgaactgttacaagactaggcaaaacagtgtgaagattccttaaacaactaaaagtagattcaccatttgatccagcaataccactacaaggttagtactcagaagaaaagaagtcattatatgaaaaagatacttacatgttgcatgtttatagcaacacaatttgcaattgcagcaatgtggaagcagcctaaatgcccatcactcaatgagtggataaataaaagttggtatatatatatatatatatatatatacacacaccatggaatactactcagccataaaaaggaatgaattaatagcatttgcagcaacctggttggaattggagactatcatacaaagtgaagtcactcaggaatggaaaaccaaacatcatacgttctcactcacatgtgccagctaagttatgagacatccaggcataagaatgatacactggactttggggacttggagtaaatattggggactggagagggaaaaagactatatattgggtacagtgaacactacttggttgatggctgcaccgacatctcagaaatcaccactaaagaacttattaatgtaatcaaacactacttgtttcccaaaaagataatttaaaaattaaaaaaatatttaatgtctttatttacaatgccttatattgtagtcacaactgaattgaatataaacatatctaaaatagtttatctgaaataaattatatacctgcccataaatatgttgaacaatgcacacaatcaatgatatttttaggactttatagaaaaagaaggatattagaaagaataatttagcagacatcaaaacataaagtttatgaggtaactctctctccagacttgccctttcctgagatcttcatgaatgctctggtcacttccttgttgcggaggctgtagatgaggggattcagcatgggagtgaggatggtgtagaatacagacaccagcttgtcctgcgttggggagcgatcagatgtgggctgtatgtacatgaacaaacctgctccatagaacattcccaccaccatgaggtgagaggaacaggtcgtgaaagctttgcgacgaccctctccagatcccatgtgaatgacagccagaataactccagcataggaagcaatgatgattgcaacagggaaaacaagcattactatagagcaaatgaaaataaccttttcaaatattgatgtgtcattgcatgagaggattagtagggaaggtaactcacagaagaagtgggctatttcccgagacccacagtaggagaaggaaaatgtggctacagcataaatgattccatctgtagagcccaggatccaggagaaggcagtcataagtctacaaattttgggtctcatgagattggtgtatcttagagggtggcaaatggcaatgtagcagtcataagacataacagccaacagaaagcattcagagccaagcagtgatacacagaagaaaatttgtgtggcacagccagccatagaaatggacttgctgccagacaagtagttgaaggccatcttgggtacggtggtgcagatgagcctgacgtccatgggggacagttgactgaggaggaagtacatgggggtatggagctgggtatccaggtagattaggagaaccatgagggagtttcccatgaaggccacctaaaagatgcacaggaccagaaagaagaggaaggtgcgggtggggctgtgattgaagattcccaggaggatgaagccggagttgaaggtctgattctcccatgccatgatgaatatgttttttccctagcaccacaaaaccagttcattaatttggcaaaactttacttggtaccttataaagcatgtgattgtggtaaattctgtagttgagtgatcaatacagcatgactagaagtaggaaactcaaaggttaagaattatagaatcataaagaaatatgttatttcagcactgtctcacttataaaattatggagctaagtttttcttctgagcatcctttttatccattaaaaattagggcaatcgattgggtggcagccaagatggccgaataggaacagctccggtctacagctcccagcacgagcgacgcagaagacgggtgatttctgcatttccctctgaggtaccaggttcatctcactagggagtgcaggacagtaggtgcagcgcaccatgcacgagcacccaatacaggaccacccagattcataaagcaagtcctgagtgacctacaaagagacttagactcccacacaataataatgggagactttaacaccccactgtcaacattagacagatcaacgagacagaaaatcaacaaggatacccagcaattgaactcagctctgcaccaagcggacctaatagacatctacagaactctccaccccaaatcaacagaatatacactttttcagcaccacaacacacctattccaaaattgaccacatagttggaagtaaagctctcctcagcaaatgtaaaagaacagaaattataacaaactgtctctcagaccacagtgcaatcaaactagaacttggggttaagaaactcactcaaaactgctcaactacatggaaactgaacaacctgctcctgaatgactactgggtacataatgaaatgaaggcagaaataaagatgttctttgaaaccaacgagaacaaagacacaacataccagaatctctgggacacattcaaagcagtgtgtagagggaaatttatagcactaaatgcccacaagagaaagcaggaaagatccaaaattgacaccctaacatcacaattaaaagaactagaaaagcaagagcaaacacattcaaaagctagcagaaggcaagaaataactaaaaccagagcacaactgaaggaaatagagacacaaaaaacccttcaaaaaattaacgaatccaggagctggttttttgaaaggatcaacaaaattgatagactgctagcatgactaataaaaaaaaagagagaagaatcaaatagatgcaataaaaaaatgacaaaggggacatcaccaccgatcccacagaaatacaaactaccatcagagagtactacaaacacctctacgcaaataaactagaaaatctagaagaaatggataaattcctcgacacatacaccctcccaagactaaaccaggaagaagttgaatctctgaatagaccaataacaggctctgaaattgtggcaataatcaatagcttaccaaccaaaaagagtccaggaccagattgattcacagccgaattctaccagaggtacaaggaggaactggtaccattccttctgaaactattccaatcaatagaaaaggagggaatcctccctaactcattttatgaggccagcatcatcctgataccaaagccaggcagagacacaaccaaaaaagagaattttagaccaatatccttgatgaacattgatgcaaaaatcctcaataaaatactggcaaactgaatccagcagcacatcaaaaagcttatccaccatgatcgagtgggcttcatccctgggatgcaaggctgcttc

SEQ ID NO: 1879858 - DNA, 4001 bp, Homo sapiens; identical to SEQ ID NO: 1528

SEQ ID NO: 1879859 - DNA, 4001 bp, Homo sapiens
ctaagatgacttaccatataaaacctttaaaaaatgtaagcgtggcgttctttggtattcctagaacaagttgaattcagcagatatttaaacataatttaatttgccaaaaactatacacttctaaaaggagtttgattactatgtaagttactaactatagaagtattattttataagctgttaggttagtactaacataatttgttggagggcaaagttgcaacagcttgtaaactaagtaaatactgctgaacatttagtgggctgaatgttctctctgctaacttagccagtaaaggtgtaggttatacaaagtcatttctaatgtatgtgaactatgtagatctataaaataaaaccatttcagtaattgctgggccagagaagagacatatctttatttctttggaactctgaggtacagctaaaaatccaaatgccaggtatctctaaatataacttctagtgtatctgctctttttgagacaccctaggaggaacagctaaacagtagggtaatgccctgtgcactctagactttgtatgatcctggttctatgacctcgcattcctgtagattctaactacctcctggctggcacagtgcctcccaggaactgcccttgctctgaagagatacacagttcttatatcgagtgcttgtgggcttcattttctgaactcctcgatatcacctactttatctctgtgcctcaccctcattctcttgatccctttcacctccaccctggatgcccttacattcttattttgttttgctccctcagctcatatcttggggagacaaaatagcattttgattccatttctgccacttactaattcttgtcaacttaccctctctaagcctcacttttttcctctgtaataatactaatgtatcttctcatatggttattatgaaggttaaaggagacaaagcatggaagatgcttagcaaactgcctggcacatagtaaccactaaatcaatgttagctattattactattattttgctttcctgaggtggctatagtttcagtcattctttttttttttttttttaaatggagtctggctctgtcacccaggctggagtgcagtgtcgtgatcttggctcactgcaacctccgcctcccagtttcaagtgattctcctgcctcagcctcctgagtagctgggattacaggcacacaccaccacgcccagctaatttttgtatttttagtagagacggggtttcaccatgttggtcaggctggtctcgagctcctgacctcgtgatccacccacctcggcctcccaaagtgctgggattacaggcatgaaccaccgtgcccggccgggtttttcttttccactgcattgtcaggctgcaaattttctgaacttttatgctctgtttcccttttaaaatggaatgcttttaacagcacccaagtcacctcttgaatgctttgctgcttagaaatttcttccaccagatacctgaaattgtctctcttaagttcaaagttccacaaatctctagggcaggggcaaaaatgctgccagtctatttgctaaaacataacaagtgctttgctccagttcccaataagttcctcatctccatctgagaccacctcagcctggaccttattgtccatatcactatcagcatttttatcagtcattcaccaagtctctaggaggttccaaactttcccacattttcccgtctttttctgagccctccaaactgttccaacctttgcctgttgcccagttccaaagttgctttcactttttggggtatcttttcagcaacgccccactctactggtaccaatttactgtattagtccgttttcatactgctgataaagacatacctgagactgggaagaaaaaggtttatttgattggacttacagttccacgtggctggggaggcctcagagtcatggcagggtgtgggggtggtgaaaggcacttcttacatggcagtggcaagagaaaacgaggaagaagcaaaagcagaaactcttgataaacccatcagatctcgtgggacttattcattatcacgagaatagcacaggaaagaccagcctccatgattcaattacctccccctgggtccctcccacaacgcatgggaattctgggagatacgattcaagttgagatttaggtggggacacagtcaaaccacatcaacatggaaggaagcagtagagataagtcttacatgatcacttcatgatcacaaatgccaaattttattaaatcaagaagcacaggctaggcacagtagctaacacctgtaatcccaaattttgggaggccaaggcgggcggattgcttgagctcaggagttcaagaccagcccgaacaatatgacaaaacccaatctctacaaaaaaaaatataaaaaattaattgggtgtggtggcacacacctgtagtcccagctaccctggaagctgaggtagatcacctgagcccaggagttcaagctgcagtgagctgtgattgcaccactgcactccagcctgggcgacatagtgaaaccctgtctcaaaaacaaaaacaaaaaagtacattttgagggtttttatcataaatgtcaaactcaggatgatctaatgttgatcttatcaagaatagcagctatgaaattctccaaatgggtacactgaaatacttatttatttatttatttttgagatggagtctcattctgtcacccaggctggagtgcagtggcgcgatctcggctgactgcaacctccgcctcctgggttcaagcgattcacctgtctcaccttcctgagtagctgggattacagctgcctatcaacatgtcggctacttttttgtatttttagtagaggcagggttttaccatgttggccaggctggtctcgaactcctgacctcaagtgatctgcccacctcagcctctcaaagtgctgggattacaggtgtgaaccaccgtacctgacctgaaatacttttatagtcagtaatgctttcagctgattgttgactccatttatgaaatttaaatctaaatagtaacccatgaaactgcagagaattatgctttctataatcctacaaattcatctaatattagtctaagttaaagtggtagttgggggagactttactatgacttgggtttgagccgccacaaatttttctgtttggagaatagcatgctttcattcatggcccatttgttcactttgagatagaatggaagcctctttgtatgtcatttccagaaaatattgacattggccaccaagcgtctatgttaagcatggtgcttatgtgatcattttaaactctttgatattctacctgttgagaggttggatctatgtccctttacttgaatctgggcaagtatagacaatagagtttggtgaaaattcttttgcaagattaggaatagggtgaatcaggggaggtgcctagggtgcaaaattgataggcactcactattagggccatgaaagtgcaggtattaatgtgtgatacaaaaatccttatgcatgtgcccatgtctacatccagccacatgccctcaccccagacctcctggtcttcagtcattttgtcttttttcttcttctaagcccctgatcagatccactctctgggaacctgtatgtattcttacctggaatgccttcttccacatacactggatgccaggtatactgctctctggaccacccattaggaagattttcccttttcaactgtctttcaaggccaccccttaaaacacccacaaataaaactcaccagtttataagctaaacttaggcaggtctttcagctggtccagtgggatctatatgatcacaactacaactcagtgcaactatggtgggtgacatggggctctaggctacctggtcatgcagctgtctcataccctcaggtcctgcctgggctcaatcctgattgtaccactgttaacttatgctgctttgc

SEQ ID NO: 1879860 - DNA, 4001 bp, Homo sapiens
cccatgaccagcatcccaaatgtacctatccgttttattttattgtctcagaattgtcagttatttaataaattatgtaacttttttccttatgctcagatttgcacttctttctaaaactctgcccatccttaaagtcccagattctccttgaacttttttttttgactttccaagtacatggaactcttcactctatcctgctatataagtgacagaatttccactatgggatagatggagttcaattcctttgagtttaaaataatctaaatataattattccttatgccctgtttttccctcacttttgtatccaaatctcttttcagacaacagaacaattaatgtctgataaggaagacaatgatgatgatcacttcaaaatgaattcaggattgtaatgtaaaattttagtactctctcacagtatggattctaacatggcttctaacccaaactaacattagtagctctaactataaacttcaaatttcagtagatgcaacctactcctttaaaatgaaacagaagattgaaattattaaattatcaaaaagaaaatgatccacgctcttagttgaaatttcatgtaagattccatgcaataaataggagtgccataaatggaatgatgaaatatgactagaggaggagaaaggcttcctagatgagatggaattttagtcatccgtgtctcatgaagaatcagatgtgtacactaagcaaaacagttaaaaaaaaaacctccaagtgagtctcttatttatttttttcttataagacttctacaaattgaggtacctggtgtagttttatttcaggttttatgctgtcattttcctgtaatgctaaggacttaggacataactgaattttctattttccacttcttttctggtgtgtgtgtatatatatatgtatatatacacacacacatatacatatatatattttttagtatctcaccctcacatgctcctccctgagcactacccatgatagatgttaaacaaaagcaaagatgaaattccaactgtcaaaatctcccttccatctaattaattcctcatccaactatgttccaaaacgagaatagaaaattagccccaataagcccaggcaactgaaaagtaaatgctatgttgtactttgatccatggtcacaactcataatcttggaaaagtggacagaaaagacaaaagagtgaactttaaaactcgaatttattttaccagtatctcctatgaagggctagtaaccaaaataatccacgcatcagggagagaaatgccttaaggcatacgttttggacatttagcgtccctgcaaattctggccatcgccgcttcctttgtccatcagaaggcaggaaactttatattggtgacccgtggagctcacattaactatttacagggtaactgcttaggaccagtattatgaggagaatttacctttcccgcctctctttccaagaaacaaggagggggtgaaggtacggagaacagtatttcttctgttgaaagcaacttagctacaaagataaattacagctatgtacactgaaggtagctatttcattccacaaaataagagttttttaaaaagctatgtatgtatgtgctgcatatagagcagatatacagcctattaagcgtcgtcactaaaacataaaacatgtcagcctttcttaaccttactcgccccagtctgtcccgacgtgacttcctcgaccctctaaagacgtacagaccagacacggcggcggcggcgggagaggggattccctgcgcccccggacctcagggccgctcagattcctggagaggaagccaagtgtccttctgccctcccccggtatcccatccaaggcgatcagtccagaactggctctcggaagcgctcgggcaaagactgcgaagaagaaaagacatctggcggaaacctgtgcgcctggggcggtggaactcggggaggagagggagggatcagacaggagagtggggactaccccctctgctcccaaattggggcagcttcctgggtttccgattttctcatttccgtgggtaaaaaaccctgcccccaccgggcttacgcaatttttttaaggggagaggagggaaaaatttgtggggggtacgaaaaggcggaaagaaacagtcatttcgtcacatgggcttggttttcagtcttataaaaaggaaggttctctcggttagcgaccaattgtcatacgacttgcagtgagcgtcaggagcacgtccaggaactcctcagcagcgcctccttcagctccacagccagacgccctcagacagcaaagcctacccccgcgccgcgccctgcccgccgctgcgatgctcgcccgcgccctgctgctgtgcgcggtcctggcgctcagccatacaggtgagtacctggcgccgcgcaccggggactccggttccacgcacccgggcagagtttccgctctgacctcctgggtctatcccagtactccgacttctctccgaatagagaagctacgtgacttgggaaagagcttggaccgctagagttcgaaagaactccgtggatattccagctttcccacaagcactgatcattatgagccagttacttaaccgatctgagacactctcacctcctaaatagggatagatgatactaatttgcaggttgtcattatgataagacaggatctgatcaatatatgtgaattgtttatatttggaacctttttattgagtggaagaagttgttttaaatattctagtcagttctttcctgctcccaggaaagcccggattatgttttaagataagcaaaatgtcttaaaagtaagctgttttactttgaatttttccctaaatgttgattagtgtactagatccattttaatttggaaagtgaagtgctacttatttgaacttcttaaaaatgctaattttaacatctaaagagttaactaagaaaagcttagtaacatgatgtaccaagttgaatatgctgttatccttatttagaatagaaaattggtatttctacgttttatccattctaaggcaggttaaaaaattgtatttccatgactacctatatatttcttgaatttattattgtaaagttgattcatagtcaaacaattaaatgtttaaattaagattaagacactagagaatgatttatttgctgtcctttaattgcagcaaatccttgctgttcccacccatgtcaaaaccgaggtgtatgtatgagtgtgggatttgaccagtataagtgcgattgtacccggacaggattctatggagaaaactgctcaacacgtaagtttgtcctttggttgcctcattaggagtggggctggatacagttatcattgtatagatttgtgtcttataatgagtcccattaatttctccctccctttcttcgtcttcttgcagcggaatttttgacaagaataaaattatttctgaaacccactccaaacacagtgcactacatacttacccacttcaagggattttggaacgttgtgaataacattcccttccttcgaaatgcaattatgagttatgtgttgacatgtaagtacaagtgtctttctaaggtttttagccttctcaaagaaaaatatgctttataatactgtaagcctaatctaaaaacatatttccaagcttatcaaaaagactttaagatagcttttaagtttgccttccatcttaatcgccaaaaatattgacatttagtcccatccagtttatacagtctgctcacaactctgtatacctcttctaacctttactgtttggtcagtttgtggaggtagcatggtccagctgtttattgaatgcccatgggccacagaattgttctgaacatgtagcacccattaaaataaatttggatttggatcagcaagaaaataactttccatgattctaaagtgggtgccatactcagccattcctttcataggcctcttgga

SEQ ID NO: 1879861 - DNA, 4001 bp, Homo sapiens; identical to SEQ ID NO: 1544

SEQ ID NO: 1879862 - DNA, 4001 bp, Homo sapiens
gttaagactttcatccaagatgcaggcaattccaaacattccagctatccaaggccattgagcatgctgccaggggcccctcagcccagagacccaaattaggggtgctggtggtgccactgcgggatgaacagggaacatgagtttccctctaatcctcacagcttctctaagcagctcacaggattgctccttgggagtccagggcttctcaagttgcccaactggaatgggaagaaacacgccctgaagccctggtgtggctaactttgcccctcccaatccccgtgggcagggctggcagcaccgtgggaatgttccacttgtcagcgcctgacccccacaagggtctagccctttgagccccacacccaggtaaaccaaagcccaggactgagggtgcagttaccctggatctcagttgggctgagtcatcagagagggattccaggacaggagaggaagagcagatgggaggaggaagaggtatttattagttaccaggtggctcccaggacccagacccagcttcccaagaacagaaacccagaaatgagcgcctggtcaaggtgtaagctgttccccaagggcagccccgacagctggggctaaagcagaacagtgagcacagaagtccaccataagggaccagctcagcagtagacgatagcataggaggggttgctggttcccgggaattaagcagggcagggaatgggggaggatgggtttatctcacctgtggtgcccacccattgtggaggctccctcaacaccgttctgagcctccttcctgcttcatgtggtcaaccagattcttctttgtccagcccaaagctccatcctcagccaatggtagccacagaaactcaaggccatttaccctccctttcaacaaatatttgtggagcgtgtgccacgtgcctggtgccaaggagagagacattacttcttccctctagaggcttacaatctggcaggagaggaatatgtatggggagagtgcagggacaccgcggaaaaaagacaaatactgagttataagtgttgtaatagggggtagtaacaagacgttgtaggactacacaaaataaaacaaggaggccaaatcgcaagcgtttgtgggtttcacaggggacatctgacagcaaacattccagggcaccgagagatggtgaggagagatgatggcattgaattggagagatgagctgagatggactgcgcagaggacgagggaaagccggtgcactggagactgggggagacgagaggatccaccgggttgggaggggaagggtggtggtagaagcacgagcaaggcagagaccggaggccagggcggaagggaggctcacggacacctggagccctgaaaagttgtcagaggcggcgagggggtggggagcggaccctacacgtgcgctacgtgctgcgccggccgctggggagcccggtctgcccccctcatcccagaacccggtcccagggcagttgcacggcgcccagggggaggggagggaggaagtccccccaagtttgcaacccggcagcgtggtcttcgcaacgcggttaccggaaggaacgcgaggagcgcctcatcaccaggcgggtgtatctaggggcgaaggctgcagatctggggcgcaggctggaaagtggggtgcagccggttgacgtgaggtctgggagttggatggaccgaatgaggatggagacacctagggatgtgtccgaaggatctggcgctgcacaaatgagggcggtttgggggacggaggcccgggcgggggcggagtgttgtccaagagtaaggagggggttcctggagacgtggcactcggagcggggctgggttccgctccggccgcctgggctgcagctccgctatggcctaggaacccgaacctgaccccgcctaggcctcgcacccagccctctgggagctccggccccggcacctccaggctggggttgcccaggtccggcctctggggcgtccagccggccctagacgagacaatgcggcccgggccccgcccccggaggatgacgcgcccggctgccggccagtcagcgcccgtggctaggctctttaaaaaaagaagggccggcgcggtgtggctgtcagctgggagggatccctccgcccatgtaaacatcataaagggcaaggggagcgtctgttgtgggcgggggagcggctgccttcccggagagtcctctcggtccctaggttcccctcaagacgccggcaaccgccccgtcccttaacgtcacaccgggtctgctgggagccaaacagctgcggcctgatctgggagcgatagaatctcatcacttagggtcactaccggaaatggaggaagccggactgggagaccttgagagttgggagcgagagggaatcgtaggacgcagctgagaattgggaaagattttcttaggcttgttcttcctgtccatctcagttaaataataatcataactcatgtaagtctagaatttgtctcaaagttatgcctacctggctcgtaggatgccaacgttaggagtgaaaatagtcaacgctctcccgagagagcacatgacactacatgagcttcatcaagaccctcggaggcccagaatgcgcaccaaagagccatcgacgataattcttctacccaacttttatttagtattattaaatattcagtaaagttaaaagaaatttgcatcaaattcctctatacccactacctagattctattataacttgccacatcgcatatctatcttgcactgataattcttttaatagtgtattagctgtcccctgggcttgactctccattgcagtagggagcaggaaaagactccaggtcccaaagccctggagagctaagaaaaggaatacgttctcccaggaccactgtgaactctttcctgggcccggtacctctgggaaaaatttgttgaagggaaggcggttttcttctccccccacgcccatccccccttttaattgaagacttcttaagcataagagatttccttccactaggtgaatctgaaagcgaactaagatcttgacaaacattccttgcatacgtttggcagctttctggatgaaagaggtcatttcaatgttgacgttctactttttgagcttcctccttttttctgaggctgctggacactacccccccacccccgtcccccgtctcccgccaaaagaaaaaaggcgcctcaaaagtgttcgtatctcttaaagttcgttaacctctttgcctccgttgcctgctctgcaaaatgaggataatatcgtacctactcaatatggtggttgtgaagactcagtgagctaatacatgcagagcgtttagagcagtgctttacacacagtagcattaaatagcggctatcacccataagcacataactcccagatttatatctccaattctgatctcgccccttcagatttatacccttcagtctgttgaaggataccccgttgtgtatttctacctgtatgtaccagagacacctcaaattcaaaatgtccagaaatgaacacagtatcttcttcccttgagtaactcgccttctgtatataattggggtgaatgttccagcaatgccaacgggctagcatctactcaggcaggtacgccagacatctgaatcttaatacctcgtcgtcccccctcaatctgtcactatgtcctaattttatttcctacctttgcatcccttcctcataattatcagcaccactgccttaatttagatcctatcattccttgtctggattatttcaagtctttcgcccctctcaagtctgacctcgtcatagactgtttgtggatgattattttccctgcaacatctccacctcccaatagtctccatcacttattagccatgtgaattatggcaaattgcttaacctacctatgcctcactttccttattgtaaagtggaaataagagtacctatctcatagggttgtgt

SEQ ID NO: 1879863 - DNA, 4001 bp, Homo sapiens
gggaggctgaggcgggaggatcacctcctcggatccactgaggaggtcaggagtttgcgactagcctggccaacgtggtgaaaccccttctctactaaaaatacaaaaattagccgggcgtggtggcaggtacctgtaatcccagcttcttgggaggctgaggcaggagaaccacttgaacccgggagacagatgttgcagtgagctgagactgcaccattgcactccagcctgggcaacaagagcgaaactccatctcaaaaaaaaaagaaaaagaactgtggacatgtgctccttatcttccacctctggttttcccagctctgtatctttgttcatggtacctcctaatcctagaataaaattctcatgacaccatcatcgctgaactcctactaatgcttcaaagacccatctgaaaatgccttccgctaaataaaaattgaatgaattgggagagtactctgtgcagtggagtgtcagttctggaaacccagttctaatgcacctggggtgacctcctctctctgggcctcagtttctcatgactaaaagaaaaggattggtctaaaaattattttctgcttgccaaaaaatattttcattctaaattcgattcccacaaaataaccattgaatgaatgaataaatgaacttgaggaggctcctgttccaaacttccaccagagaagaaacatcctcaagggcttggttcaggtggtcatacagcctctgcttactcacctctcaggatggggtactcactatttccagaacagttgttttggagcagtggtaacttgaaatgccctttcttatcctggccacaaccccacaacatccctcgagaaagtcaaaggctcagggaacaaggaagagggctatactgagctgagtaaggacttgccatcctgccacccagcacactcagacagaagcgtgggcaggcagctgtgagtggcagaattttcccctctgccccaggagctgtggtttggagcaaagacaatgtcaccaacaggtcacactgcagacagggacaaaactgcaagtgatccccccggggcttgcattgtaagttcactcatggtcaacagaactttcccttcatctccccatctgctgccactgagccgtagggacgattgtcacctcccttttaaagattaggcaatggaggctcaaggataagtgacttgtcaagcaccacagctagtgagaggaagccaagattcaaccccacatctgactccaagctgggggacacagaacctcagccaagtcctgggctggtaatacttagaaaaagctagtggtctcgccccgggaagaagcttcccacagcctgagggccagaagctggcagagttgttgagcaaactcgccccgcacacggtcggcagacagccaggtgggctgaggcgccgggctcagctccggggtcccagtaccaggcgcaccacctccggctccagagcaccaagggcccttccctgcctgagtcctaaaggacgccaatgggcctcgagaatacctccgccccttctcccctgccccttcagctggttcttttcttcggctgaaacagatggaatactagagcatgagttctgtgtcataaagaaattgcctcgtgctcccagcatctgccgtccttcccaccccgcccctgtctcgggtagggccttctctccaggccctccaccctccgctgcccatgttttccaaaccaaatcggaacccactataatggcaagcccgctttctctgtgcctggtgcagttcccagtacgttccaggcattcactccttcacccacctgtgccgcggcgaggcagaaactgggaaatctgggcaggatatcctggcagtgctctgctcgcccttcctcggcctccgggtctcccaaccccgcgaaccttcccactgaatagcgcagccgcacgccccagcaagtccccaaagagccggccgtccccgctctccaccgtgctccccactacccgtcctcccccgccgccttgcctgcagtccccaagatcgtgccaagcgaagagccctcggcgacctgcactccacttcctctcttacatggggggaaactgaggcccgagaggaaacagcaccgcaccgtcccggctgcgggttcgccccggcctcccatccctacacccgcaccttggcgcagcggtggaaggtggctgtggttccgtgctcgggtgcttcggccaggccgtcctcctcggaacgcaaggctagcaccagctcctcgtagtcgccgtcctcgtcctcctgcgcacgggcgcccgcgggacccaggagcagcagcagcagcagcagcagtggcagcggccaccaggaccgcctggagctgacggtgcccatgagggccaggggagaggttgctgtcctggcgaggagacctagaggccgtgcgcggtccacgccggcggcgccttgagccttgcggtggggaggactgtgcaggagctgaagttcaggagcagggcgcgtgaaggggcgcgcggaatcctggctgggagctgggagccgctgctgcaacgacgcgtcccggcccgcccgagccagtctcactgcctggctcactcctccaggctcagaccctgaactgaacggcggcgcccgcctgcaaccatgagcgcctcgacgtcgctgcggaaaccttctagggtgtgggtgcttgacgcctggggcgcgcagatcacgccaccagagccccatcggacgatcctatctgattaaacattaacggaacccccggactggaggatcaggtttcggcctcgccctccccaaacagcgtcagattacgcgcagagggaagaaaaaactcccaaatcctaactgggctggaaggcaggccggcgccctaggggctcctcctctcccgcctctcaccctgcgtgggatgccagactccaagttctgccgggcccaccttttcagtgtttcctgggtccaccttgtctcctgctgaccagtgagacttctgaatcaatcctactgtggactcctcgctgcccaccgaattctttccactggccttaacctggcagccttctaaacttagcctggaccccctccggcctctgccctttatgcaccctgcacactgaccttaccaactagctgctccttgaagagattgcttgcttttgatgtccagcctacatgcatttcaagggatttatactacaaagattcaggttttaagtttgcaaagacgtcatataggtacattcagaattctatggtaggcacaagctcagctttccagaagattcaatttgcaaagattccttttacacaccatgttcaagaaatcaactggacaagcatccagtaaacacctattgtgtaccaggcaggaggatgaaaaggggaaagagagctcctggcctcagattgtacatgtggcatgacatgaggcttgctctttctggaagggctgtcgatactgggaagaaacaaaggcgaatttatgatcctcccttgcagatgcacagcagattccgagtgaaatggcctgctctgaatctaggtgctggagtccaaagttgatgctctttccactttgtttgcaaagacctcactccagagagccagtgcacaaagacagtgcaaccagtgggttgacagtgactccatgaggtaaggtcagagttatccccatcgagcccgccatcgcagcacagagtaggagctcatggtttgctgacagaggtggcagaggtggttctccttcctgttgcctgtaattggaattgtatttgcaatgtgcttttggcagcttcctcatcaaaggcctcccctggagcaagaatagatgggagctaactttccctgctgctcccctttgggaccttggcctctcacctaccggggtcgttaccgtgcacccagagaatgatgaagcctgtgcacagagggacatggatgtccccaggcccaggaagggggctgctgtccagcatgcagtg

SEQ ID NO: 1879864 - DNA, 4001 bp, Homo sapiens
accaataatttttcccaaaaccacaaacataaactggtcctggtatttccataacagtgcagctaagaaatggcttagagaaaatttaacaggattcagattatatccattctgtcctctcggccctgagacgtaataattcccatatgggtcctagtcctccccagtggttttcccatctctggtggaagagtccttttacaaagtggtgtttgcctactgctttagagatcctcctgtgccttcttcttcttgggtttttcttcttgaattacaggggggtttgtagcttctcgttgtagatagctaataaaatcacttaattcatggccaccttcatatttctttggatttagcttcttgttggctggagagaagtatatggtaggaaaactctgacttcatatggagaaggcacatcattggctgtggcatccatcttggctatgacgatattcaggtctttgctgagcttctcgccaagttctttatacttgggctccaggttcttacagtgaccacaccaaggggcataaaattcaatcagcacatctttattttcattattcactatttcatcaaaattctctgctaccactaccttcacaggcccatcattgctctctgggataggttcagacttcaggtatctcttcagattgccatcaaagtaatcctgcaggaacctctccagagcattcccatcacgcgagaaatcctcctgcatgacaaacttctctcctttagcagttctgatagcaacaacaggaatctctccagcagtgctctccaagccaaaatcagaaagttcatggctaaaggttttgcggctagctacagcaaagttgagtttgtgcccagcatccaggaatttctttgccaccatcattaccctgtttctccagtagttggaacctttagcattcttttcatagtccacatcatagtaagcaataagtaagtccttgccctgtatcaaatctttattgtcttctgtcatgtgagggcagataccaaaaatgttttcctggataaactttttaattttgccactggtcattttttgcactgtatatgccacagtcttgtcctccaacttgttagtgagatgtgaaggacgaaataagatgataccatctccgttatcatcatactcgttcaccagagactcaacattcgtatgtgcaaatcggtagttatccctcaagttgctggctgcttttaggaactcggagtgagcttcactgaatgaatcatcgaaaaaacctactatagaggcatctttatcactaatgaatttcttaaattcttcctcagtcctgagaggcactgaagctgggcctgcctgcttcttcaggtggctgacaattccatcagcagtcctaggtccatcataagcacctgcttcttcaccatctctaaacatattcagggttggatatccactgactccatatttattacaggtgttagtgttggcagtgcaatcagcctttgctaatgggactattccttttaatctggtagctgcagcttcatactcaggagcaagtctcttgcagtgtccacaccagggggcgaagaactcgacgagcatgaggcccgcagagcccgtgtcggagatgcgactctccaagttgtcgtccctgagtcctagcacgtcggaggcagccgcgaggcgggccgcggcgagaagcagcgccacgcccgggaacagcgctgggcggcggaggcacatggcggcgaggtggggtgggggcagccggaagggtcgcggctcgactgggactgcggcggtcgggcgcgcgaccacctattttaccacttttctactaatttagtttttgtgttccaggatcagattcagggtcccattttgcatttagttgttaagtctccttagtgtcctctaatcgttgtcagttcttcagtcttttgttgtcattcaggacttaggcacttaaaaaaaaagaagtttcatactcaagtttgatttagtttaacctaatgttctttttctgtcctgggatcccatccaggatatcacattacatttagtcatcaccaggctcttctagactgtgacagtttcttatactttccttgtttttggtggccttgatagttctgaagagtactggttattttgtacttaatttgagattgtctgatatttcttcatgattaggctggggcaatgagtttcggggaggaaacagatcaaagatcaaatgctattctcatcatatcatatcaaggttacatgccactaatgacatactagagatgttagccttgatcagctggttgaggtagtgttcttcctcctttccatactgcgctctttgaaaaacatttactaggcttgactcatgcttatggggtggagaattatgttccatcttctcgagggtagagtacataaattttttggaatttttcaatatgagaattatctcccaattatttgtttcttcaatcatttacttgtatcagtatgaactcatggatcttattttataatttgggttaaatccaatgctgaattacttattttttgaattattctagctttagctattgggagctcttttagttggctcctatgtcactttgatataccatcagttttttgtgtctttttaaagcacttgtttattttctggcactataagatgtttcagactcatcttgtatatcccctgccccagtcctagaattaggcatttttctcaagggctctggttccctttgttggagaacagtattagaaacaaaaaactggatgctgggtgtgctccttgcttctgcttgtcattgcttctaggccttcggaggacagaacttggaaatatatgtgtgtatactaatgtattaaacatgaatccacatgcatttttaagtatttctatatttacccatctgtatctatattaagctaaacatttcatattgatgcctcctaccgtaacccaggatttaatgatcacatgcctactcctctcattttacagatgagaaaatttatggctaaaaagataaaagtacttgccctacatcaaataattttagagttggcagcctatttgtaccaaattaatactcacatggtgatgatatatacatagtagattcatagttaatgaagatgttgagatactaattattccagtaatgtatatctataattttagaggaaatttgcagtgaatatttagtcacagtatcactatacaccatatctatttagagttgtagtagtttccttagagatttccagagcatgtgctcctctagagcaggggtggctcagcaaaagctcaacaagtattggggccctcaatcaaggtttgttgaaataaatggactatacttatcaagaaatactggctaaatatttaacctgcacctcatttataaaatggaatatcatggatcatctgttctgcttaccctcatagggtggttctgaggatcacatgatagaatttacatgcaaatcctttggaatctgaaaggaaaaattatgatactatttggggaaaattctgtacctttgaattgggtctatcttcctttaggtgagcagaatcactattatttctctgcctgtataaaaactataaaaagattaaaatcaatggtatttgtttaaaaataattagtttacccaatggttgagtagtctcttgtgtataaactcatatattttgctaatgctgattttattaatagtttttaatttaggcataattttcatacaataaaaatttactttttattgtacagtttggtaagtatcaataactccactgcagtcaagatacagacctgttccatacctccccttcaaaatttcttcatgcccttttgtagtcaatcactccccaccccccacccccaagtcctggcaaacactgatctgttttctgaccgtatagtcttcctttttccagaatgtcacataagtggagcctggcttcttttacttcccataatgc

SEQ ID NO: 1879865 - DNA, 4001 bp, Homo sapiens
ataaaatgttcaaatgtatgtgactatattcggacaatgaaaaatgcagctgttaaaaatagacaatactgatgattcagatgatgttactgatgaaaataataacagatgacaattattgagcatttatgcaatcttacatgcattaccttatttaaagttcagaacaactaaggaaatgagtaacttggggcgggcgtgagaggtttggaggcacaaaaggaagataggcattcaagggacaccaggatagaagagccacagtagaagagagaggaagaggagtccgccaggtgggatgctgcaagccgctggatagcacggcggagatagggcgttcctgccccgcaagcctccctgcgaccgcaggcctccggccgccttcttccaggaagacgcgccctgctttcttctgatgttggtagagacgctgcaaagcgcatcgtcctcgagcatttcttctctccccaagaccctccgaaggagcatttcttctctccccaagaccctccgaaggaaggatgggcggacagactaagtggtcaaacgcgcagagctccagcttccgcaggagcatttcccgagtgtctttcatgggtaagagtgggccctgcaggataatgcctcccgttccctgaggagcagtgcgggagatgcccatgtggccagctcctgggccacgcgacccaggccctccaggaggagcgaggagtcctgggccctgagccagccccctggaccggctgtgccaagagaagcagcaagggaaggggtcccctcctgcctcagggtctctgtcctcctggggttaagagacgtgcatccaactccctctccaagtgctggagaggaggctaggtctttcccacgggctgggggccttgctgtcccaaggacggctggggaggaggaggaggccggttgagatatgtgaagcagctctggctacagcgggtagggagagggcgcgcgggacccaggagcctccgtgcggagccaggcctcaggagcagccgccttgttcctggaaggggtgcctccctccatcttgtctccaaagactgtagggagaccttctcgcccggtaggaaagcgacgtctcccatgctttcccaccacgcaggccttgtggcctttctcctgctagtgtctgccctccaacctgcgggggctgcggctgccacggttccacgctgggtggacgctgcctgcccgggatccaagagccgccgttgcaggcgggagttggggagtcgtgtgcaggtccgaaggagacccaagctcttggtcaaggcttttttgctatagccaaattcagcgtgtaaaagacagagagctcacatctgtctgttcgtaagcttcggtgagaacaccaaggaagcgcactcaagattcgtaggagggcgggaagggtccctggcggcgatatccacatcggcggtgagccaaggcatgtcaggagagtgagtgcgcgaacccagccgccggatagcgcaaacaccaccgcggacgagggccccgcatgtggagaaatcgcaggggtcagcggagccgaagtgtggtggactagcctcctccagggagaacccccttcctgaccactgtatgtcccccgccacataaggggagaggagggacagcacagcctactctcccctggccgacgatcagggtcaccaccttctcctctgctctcccctcgccattcttccaaaccaccctccgccaaagattccacggacagtcaccctcccaacaacccaggcctcctttcagcagcggctcccgccccacagccaccgcgccctctcacccccgcggttctgcccgccgcctctgccgagtctgtgcacttcacctccctgggtcccgctcccccctgagcttacagtggacgaggggcaggacggggggaaggccattcggctgcccttctagcttcagaatcacccagtgaacgggtttcaaccgtagccggcaagatgcgcctctccggttttccgaggctttggaacctgcacaattgttctgcaaaagacggtggctccgcctagcattggatgggcgcttgctctgcatggtgatgccggagcgagggtcgactgtccgtatgtcgcagtcgggtggtgtgcttgcttccaagtctggagttggctggttcaagctcgttctactgagcgtttcttgcattttaaaaatgcttaaaccgctggcaactttcttctacccagcacattctctcatggaatggcagagcaagaccaactttacccgcctctcctccgtgtctcccatacgacatgaggacgtaaatcaaggtccgctaggattctaggatctctctctctctctctctctctctctctctctctctctctcgacggagtctctctctgtcaccaggctggagtgcagtggcgccatctcggctcattgcaacctccgactccctggttcaagcgattctcctgcctcagcctcccgagtagctgggattataggcacgcgccaccacgcccagctaatttttgtatttatagtagagacgggggtttcatcatgttggccaggatggtatcaatctcctgacctcgtgatgcacccgcctttgcctcctaaagtgttgggattacaggcttgagccaccgcgcccggccttctctctattttgtttgtttgtttgtttgtttgtttgtttactgtcattcatttagccctttccatacgcttttgaagttaaattggttctgtgattttatgattacatataatgttctagtcattcttgtacgggcattttcggcgttttcagccactggtgtatttctataggatagaggtgcaattactataggaagagcaattactccatcatagtgttcacacggtttttatatcattccattctctctcctctgttggcttattagctataactctttcttttgttactttagtaattcccttagggcttatagcaaacctttttaactgaacacagtcaaccttcaagtgatattaaacctcgccttctggccttgaagttattgctgacatgtactttgcttttacgcatgttataaacccacaacccattgttattgcttttgtttaaatggtcaaacttttacaaaagaaatttacaaaataagaaaatacctagtatagttacctatttctggtgttcttcatttcctcatgtagatctggattttcatctggtattggattccttctgcccggaagactcctttgacgtttctgtagtgtgggtcagctggtagtgaattcggtcagcttatgtaagtctctaaatgtccttacttcacttccagttttgggaatttattttttctggcagagtattctaggttaacttcctctgccctcagtaccttaaagatgttgcttctctgtctgctcccattgcattgctgctcccagtgggggccggcgagagcagaaagaaagttgatggcaattctcatctttgttcctgtgtaggtacaatgtctttttcttctggctggatttcagcaatgttattatgaggtatctagcagtggttttcttcatgtttcttgtgctttggtttcctcagctccttgggtcactggatttataattttcattatggttgggaacttttcagctattgtttcttcaaaaattggctgggaacagtggctcacaccttcaggaatcaggaggtgttgagtgaggccgggaattggagaccagcctgagcaacatactgaaaccccactcgtaataaaaataacaaagaaagaaaataaatgcttcctttcctccccgctccttttcagggactcacattactcataaattaggcctcttaaatctgccctacagttcactgataatcttttcatttaaaaaaaaatcttttgtctgtgagtttcattttgcatattttcaattattcatggttccatattccctgatcatttcttctgcaacgtctaatctgctgttaatcc

SEQ ID NO: 1879866 - DNA, 4001 bp, Homo sapiens; identical to SEQ ID NO: 1575

SEQ ID NO: 1879867 - DNA, 4001 bp, Homo sapiens
acaagggtatggtaggaaaaaaaaacaacatttctttttctattccagactcttctctctgtgctccttttcagtatttcactccaggaatagcccaggcagcatggcatcatgagagcagtcacggcagcaagagctgccaccagacactggcatgtactaggcactagcaacacgccaggctccctgcattttaacctcattttagcccttttcacaggtattatttctccctttatacaggtgaggaagctgaggctcagagcccttagtttgtccaggggtatataactattaagtaatacagctagaattctagcacagttctctctaacctgtcactgcttttaggatgcacaccaattgtccctaatgcttattagcatgtagattcctgggtacagaacaggtctgaagtgggacccaaaagtgtgctttcttaaacaagctctcagctgattctgaggcagaagaccagccactgggaaacaaggcgctatgaatgttttttcagcctgtgttcctcagaaatactagagtcaaaaaagtgaccagacatctgaaaagaaagccgggaggcggagtttctatggttagatatgtttaagaaatactgcatattatattcctttctggatgatttacaatgtacattagcaaattaaggattctgaaatagcttgtggtcaataaacttattcagctatacttaagagtatttccaaaactttagttaactacagaatcctcctatattaacaatatctattaaaacctcccaagactcagcaaatggaatggactttaggaagcaactgctatgctacacttcctaactccagcccgcactggcctctctctttcctacctctctctaaggatgcaataagagaagtcctaagctctggtcatggcctcaccctcacttactacgtgtgacttttgggaagccacttaacctctttgggtttgctcctcagcagttaattaggggtaataatacctgcatgccgatagggacttcatgattaggataatggaggtccaaacactgtgtaacccgcacaagactgcactccctggaaggactgttacatcttttggcctgtgactaaactcagttgagcactgtgtaatataccaattgatcttgttttcccacatttcgtttatggatttcatctcctaaataactgtgtgatcgcagccctctgtgggcttcatttcctcctctgtaaaatgagggctctattttgaggaccctccgggcactggccttttagaagtctactaaaaatcaaaatgctaaagggcaacacatgttacacctcactatgtaccaaacgcttcgtaagcatcacctcctgactctccacaacagctttatgaggcagatcctattattcggccctattttacaggcggaaacttggactcagaaaggcaaaacagcttgctcaagggctcacaactatttaggtggtagagctaagatatgaacctacctctgacaccaaagtgcacttcaacaccctactatcacccaacaaagaattctggccacagaatcaccttgctgcggtattcctgactgaatcaagatacgctggggaagaggcatctgaagatagcccgggttctgacctcggccctgctgcctaactgcctggtgacttcaggtaagttctgtgtcttctcggggttcacttttctacacgcgaaatggcggtgttgaactaagtcagtggtcaaaccagctcacttgtggcgcctgctacaaccagagtttcctgatgactctgatgcagtgtggggtgggtccggaagcctggatttttatccgacgccccaaatgagatcggcggaaccagaactctaaacctccggtcatggctgatgcccccgcccaaggcccccatgagggccttgggaggctgtggagcccaggccagcgccagcctggacctgtggggtccaaggtccccaaatcctcgagtgagcgacgtcaagggggcgcgacacgacctcgcgaatgtgcggtccttcatgacgtgagcagggcgcgaccgacggtcccttttcggttctctacagcgcaaggcctcgctgaagcgaacccatcgtgggaagggcgcggagaaagcggggagaaagagcagggggacgtcgggcctgcgcctggcaccgccgctacctggattcgcgggcccctcacacactcacctgccggtaaggatagctggccatggtgattctgacgtcacactcaggcaaggggtggggctttccgctctcaaacccgcccctcgtctcggctttggggctgggcccgcatctgattggacgtccgcgcctgtcaatcttgggtgctgtcggccgacggaagtgacgatgggggcggtgggcggatgcctacccgagagaccaggggagctaagtgattgatggagcttccggaagtcttggcggctgtaccagcgctaatgttcctccttttcctgaggtggagtgggccgaagaggtggtcaggttgggaaatttagtgagaagcctgggtggggtgttgctgcggtagccatgttataacctggcaaatgggacgcatgatagtgacgtaattgctggagtagctcctgagtttccgcagatgagccgcgggaaaggagacgaggggcggtggccaggcggttgccctgacaacggggaaccgaccgactcttcccggtagggagaggcgatggcggaattactcctctaatgtcaaggtactgggtaccagttagtacccttgtagtgggatacagatctgtggtctttggagaaaaaaaccccagatcattagagttggaggaaaattgaattatctagtgcctctttcttcataaatggggaaactgaggtgcagagaggcagttgccttgccctagctcacagtgggtcgcctagaaccggggtcaatggatgtccagttctcagcagggaggtctaggtcggtccccatcgtaggtcaaatcctggtgaccgagtgatctcagcaccatgtacttgccactcagtggttccgtttctacacttatttgtgtgcttatttgatttctttgtcaagttctttcatgtgggctagggttttgtctgtttttgcttgtcattataactccagtacctagtatagcgactgacacgattattaaaataaatgaataaatgaatgttacgaactgttatccagtctagtccatctatctaaccaagtgcactttccaaaatcacagtgctgatcatgccacttgcccactacacagcctacaatggatgctcttcatccacgcctacaaaataaggcccaatctcttcattctggtactccaggcccttcagaatctggcccagcctcaactttccaatcttacggccccttctgctactctgtatttctgtgctcagttccaccattcagcacttctgctttggagggaggatctttgttttatcactttctaactgtatcaccttaggcaggttttttgtttgtttgtttttaatttccaacttttaagatcaggggtatatgagcaggatgtggtttgttacataggtaaatgtgtgccatggtggtttgtcgcacacatcatcccatcacccaagtgttaagcccagcatccattagctattcttcctgatgctctccctcttcccacctccctctacgctccgacagaccccagtggtgtatgtgctctcctcattcagctcccacttataagtggtaacatgcggtgtttggttttctgtttctctgttagtttgctgaggataatggcttccaattccatccacgtccctgcaaaggacatgatcttgttccttttttatggctgcatagtattccacagtgtatatctaccacattttatttaggcaagttatttaacctctctaaatttcacttttcttagctgacaggaacaaatgtgtaaatttgaaaatgagcttattatacc

SEQ ID NO: 1879868 - DNA, 4001 bp, Homo sapiens; identical to SEQ ID NO: 1577

SEQ ID NO: 1879869 - DNA, 4001 bp, Homo sapiens
atctgtttagctctttgctttatcccctgcgccacagtaagcatctaataaatatctttggaatgaatgagtaagcaggtagtgagggggaataacctgtggtatagaagcacaattaaagtgatataatatcttaccttgcacaatattagtcattcattatggaagagcatctgtcttccatctctccccatttgatattctccgatagtttaagatctaagtgattggaagccaagtgactgatcaagacttatatactctggaaagatcctaagatatctttccctcatataagacaagctatgcaatatagaggctacaaaaaaaaatcttaaaggagaacaggatatcaaacctgaatgaacgctgggcccacttctcctgatccacacggggagccagtccagactttccagcccacaggacattgtcacaggcgaagtacaaggctcgattgaggtgactaacagtgatgcagaatctcaggacaacatctgataggtgaacagctcttttggctgactcaagggcatctgctgagttacccaggcgtagaacttgtggagattagaaagggaaagcaaggatttgtaagtggagaggcagataacaagaaacagaaacagagaaagcaagagggcaaaagttgagcaataataatgacaatttttttaaagagcagaaacaggctgggcatggtggctcaagcctgtaatcccaacattttgggaggccgaggtgggtggatcacctgaggtcacgagtttgagaccagcctggccaacatggtgtaaccccatctctactaaaaatacaaaaattagcccggcatggtggtgggcacctgtagtcccagctgctcaggaggctgagacaggagaattgcttgaacctgggaggcagaggttgcagtgagccaagattgcgccactgcactctgacctggacgagagactctgtctcaaaaaaataaaaaataaagagcagaaacagtccatttttcaatttcaaatttaatttttgtgccagtttagttttctcaaacttgacccattctctccagtccgcctaattacttccatacccctgctctcttatctcaactggactcatgcagagggtaagtgcagagccaaatgagaaagaagaacagagagggtacaggaaggagggacaaaggaaggtgagctggggatggaggaaaggttgggggataaaaggaaagacagagttacttacgctttcttccaaggctcaggtggctctccagttgtcgaatctgtttctgtaactcaggactggctccatgcctctgcagcgcatggccaagaagagagcaagcatactgggcggccctagaggagagggcaggcaaggtaaggtggagacctccctaaccttccgctcaaaactatcttccaaaaggcacagacagacttccccctttcccagtttgagaacactccccttcctcctccatgcccatatctcaccatttctccaggccagaggaagggaaaggcataaggagaaaaaagagtctagaaaggggtggggagcactattgaatgttgagcaaattagagatttgacaatgatgaggcctgaaggggccagtgcaggccgcaggggtccatcacaagcacatcagcgtgagcatgtacgtgatcgatgagggggaggcagacagttggagggcattttattcctcagaataggtgaactgagagatttcaaggccctctagctgaatggagaccaaacgccagggcggaggcaggggagttcccgaatggcagcacggtgtggggacacggaaactgggagtgcctcctcagctctgggggcagagtctggggctatccaccgtggggcgaatgctcctcattccatcaccgcccagtgaggacactgtcggtcttatgtggacacagcaaccctgagcggcctccccgctggcccactcatgcctcagtttccccatctcttccgcgaacggaaaggaatcatctcaacagcggctcaaatctgcgcctcacggtccgttcgggcccccgtagccggagttgacccttcttgacccccctgtagcctaaactgacttcgcctcactagagtcttcctctgtccatccctcccccgccccacccccattcctattcgggccgcacctacacagccgctcccgggcttggctctgagcactgaagcggacccaggcgtccatgacagccgcagcccaggctccgcggccctgctcccgccccacttcccgcccctagtcacgcctactgcgcgacccaacggtgcctcgcgagggacaaacagtatcagaaaagaaagcttggccctggaagcggaatttcaggacgcgaaactcgtgtcttttgagcctccatctgtgtattactgtgcgtgtctgcgtcacagcttccccttatcagacgacccctactccctagcacgcctccagcggcaccttcttctttaaatattcatgaccaagggcggggcctgcaggggccggggcggggcgagaaagcgccgcagtgatctccacgtcttggaggccgccggcataggtgtgcgcctggcagaacctcacaaatacacatgcacgcaggccccgactgaatccagggctgtaggggctaaagaggtctaggtcagtagaggcctgaagcccaggctggtctgtccaaggaaaaaggagcgtgattggtaccagatcttcgttccctgcagaaccttgacagttgaacaagtgacctcctccagaacagatggagagtctccagaagcagaggctttagtgaacgaaattcgcaataatcagctccagatcctgaaaaggagggcgaagaatcagtggccaaagctaaccgcttcatacccacacttcatcctcctcagtttctctccaggccaccatgtctgcaggcaacggcaccccttggggtcagcagcgggggaggaggtctgggctggatcaggagtggaggtggagggctcagagctgcccaccttctcggcagcagccaaggtccgagtgggagtgaccattgtgctgtttgtttcttcggctggagggaacctggcagtcctgtggtcagtgacacggcgggaacccagccagctccgcccctctccggtcaggagactcttcatccatttagcagccgccgacttactagtcacttttgtggttatgcccctagatgccacctggaatatcactgttcaatggctggctgtggacatcgcatgtcggacactgatgttcctgaaactaatggccacgtattctgcagctttcctgcctgtggtcattggattggaccgccaggcagcagtactcaacccgcttggatcccgttcaggtgtaaggaaacttctgggggcagcctggggacttagtttcctgcttgccttcccccaggtgagtgacctaggactcaggaccgggcaggacagggatttgggtccatagcatgagttaaagggtgcgcttgggggccattagccattaattctcagggagtaagcctctgcttgcttttttttttttttgccggctcactgcaacctccgcctcccgggttcaagcaattctcctccctcagcctcccgagaagctacaggcgcccgctaccatgcccggctaatttttgtatttttagtagaggcgaggtttcaccatgttggccaggtggtctccatctcttgacctcatgatccacctgtctcagcctcccaaagtgctgagattacaggcgtgagccaccgcaccctgctacctctgctctctcttctgtaagattatttgtatgttaatttacatctgttaagagcctgccttttcgattcctcagggatctagaactagaaataccatttgacccagccatcccattactgggtatatacccaaaggactataaatcatgctgctataaagacacatgcacacatgtttattgcggcactattcacaacag

SEQ ID NO: 1879870 - DNA, 4001 bp, Homo sapiens; identical to SEQ ID NO: 1581

SEQ ID NO: 1879871 - DNA, 4001 bp, Homo sapiens; identical to SEQ ID NO: 1584

SEQ ID NO: 1879872 - DNA, 4001 bp, Homo sapiens
taaatgggtctaggtgctggggtcccttatcttgtctcctgctaaatcacagaggtttggagagtcccttcagatctccaataaacttgtttgtggaggcctggggagtttcttcagacccccaataaaactcgtttaatactaaatggctcctgttaagaatgccttcgttatttcgtcatgctttaaggcccaggaaaaacctaggcaaaactcttggtgggcttttgttacattccagcctttgtataagggcactggcttctttttttttttttttcctcttaatatttaattgaaccactcagtcggtactgaaacagttgttagggaggcctgtgttagtgagacctggcctgccacgtatggatgctcatgatagtttcttcataatagcccaaacgtggaatgatagaaatgtccaataataagtgaaagtacaaacatacatggtatagccacacgaaggaatactactcagtatttacaagacattacagatggattttaaaattacattgatgcatgaaagaaggcagacacaaaagaacacaggtatcatttcatttatagaaaatggttaaaaatgcaaacggacctgaagtgacagtggctccttggggctgagggttgaaaggctgatgaactgcaaaggggtacaagaaactttggggcatagggaatttcctctatcttggttgtggcagtagttccgttagtgtatccatttgtaaacgtgcattgaattacacattttaaagtggtgcagtctgttgtaccgaaattatgcctttataaagttgatttcatcatcttaatttctccatactagcaattagcagctagaaaatgaaattcaataaaacataatagagattaacagccagaatcattacatgcttaacaatacatgcaatgaagcaggtacaaggcccctaaaagcaattggtgagaaaaattaaagaaggctaaataaatatatatcatgttcattgcttggaagactcaattttgttagcatattacatcaacacaattctgcttaatatttctagtaggagattttagagaaatttgaaagctagtttcaaaatgtatttgaaaatcaaagaacctagaataagcaagtcggtattgaagaagcaataagttggaggacttactctgctagatttcaaacctgattttaaagctacagtaattttaaaacagtagtaatggtgtcagtattcataaatacatcaaagtgaaagaatacagactcaaacaatatgcccacatatgtacagttattgattttttttagtagaaacttttttattcataaaaaatccatcaaaacaaaaaagttttccagccacacacaggaggggtatgggtgggggaaggtgtctgtccatctatccctggcccccagcccatgtggttttggcagcaataaggtgtgtggagtaatgactcctgaaattaaaatggtgtgtgtatgtgaaggaaaggcgggcaaagctgtggggagcggtggagtggaaggaacaaaggaggtcagtactgggaacgctgaaggtgggaggccatttcataacattacttgtcgatgaaattgccatggataccttctttgcccatcagcaggcctagcgtcttggcagtcatggtgacaatgacgttgaaggtgggggctccaccgatgctcttcatacgaagatccgtggtcaattccccatcctgcagcagtgagtccaggaccacagtatatttctggccccccagtgtcagcccattcatgacaaagcttgaccagtctttgccaaccaggacaccaacctcagctggcgtgatgttgaggaaggttttccctgggacggcggcccagatggaaggcgggtccttgttgcccacaatggcagtgtcctaacaggtcccgtccgccacgaggctgtagatggaggtgtccacctggccgttgcgttgctgcaggggctcctctggtcgctgctgctggggccgcctgggctggcgggtgggggaggcggagagctcgatgcaggtgctgtcctcctcgccacgactctgctagctgtgcagtagccctcgctccgccacttaaaaaagaaaaaaatatatatatataatatatatacacgtgttatatatattgtatattatgtatatacacgtattatatatatatacacgtatgtatatacacgtatatatattatatatattcatgtgtgtgtatatattatatatacgtgtatacaggtatatatgtatatataatatatatacacgtgtatatatattatatatatatatacgtgtgccatgttggtttgctgcacccattaactcgtcatttacattaggtatttctcctaatgctatccctcccccagccctcaccccatgacaggccctggtgtgtgatgttccccgtcctgtgtccaagtgttctcattgttcagttcccacccatgagtgagaacatgcttgcaccgccgcttctaaatgttttaaaaacagacaccaatgcccttcattggggaaatgaaagacttttaagtaaaacgattttgagtgaaataatatttgttgttttaaaaagttaatattaaccactctccatcatatgttgaaattatcttaagatgtgaaagttaaaattagaaaccttgtaaaggaaaaataggaaatagtttcatgaacttgacacaggaaaatatttcttagactagatactgtagcactcaccacaataagaaatcaagcgaattgcacttcatttttaaaaagcttctccttattatgttgttgtttaacaacttaaacgctatctctagaccaggaataattatttgctatataatacagcaaaaaatatgtatgtataaatggactcattcaaaatatataaagaactcctattacaaagaaattgacaaacagcccagtatatcaatgaatataaaaatttgagaagatattttccataagaagatatctaaatgcacattaggcatgagaaaaccaaattttaggatatcactacacacctggcatagtttaaaagactgaaaatattaagtgtgtgggaatgtagagcaactggaaatggcctacatctttcatagaaatgtaaaacaatacaaatactttgcaaaactctgtccaacattttctacccattcaccaagcaactccatccctagctatagatacccaggaaaataagtatgtatcttcacagaaataattgtatgagaatattcatagttacttatgcacagtagttatcaagtaaacctgtctcccatcagaaaaatggatatcaaattgtgtgataatcatacaatcaataggatattacttggccaaaacaaaatgaaacaagggaaaaacacaatcaaacaaattagtggcatatatacacacttgagtaaagagaagtcggccgggcgcggtggctcacgcctgtaatcccagtactttgggaggccgaggcggcagatcacgaggtcaggagatcgagaccatcgtggctaacacagtgaaaccccgtctctactaaaaatacaaaaaaagaaaaaaaaaaagaaaagaaaaattagccaggcgtggtggcgggcgcctgtattcccagctacttgggagtctgaggcaggagaatagcgtgaacctgggaggcagagcttgcagtgagcctagatcgcgtcactgcactccagcctgggagacagagtgagactctgtctcaaaaaaataaaaaagtcaaaacaagagaacatactaaatgattccatttttttatttatgacttcatgactaccattaagaaaatataacctgttgggaaactgtttctgccttgatgatgttgtacagacaagagataaacagtgaggaatgtgcttagatgtattgggaaagacacgggtctgtggcattgtcacaagggtacacgaatactgagagtgaatgctgaaggaatgatccccatt

SEQ ID NO: 1879873 - DNA, 4001 bp, Homo sapiens
tcccaggttcacgccattctcctgcctcaccctcccgagtatcagggactacaggtgcccactaccaagaccggctaatttttttgtatttttagtagagatggggtttcaccatgttagccagggtggtctcaatctcctgacttcgtgatccgcctgcctcggcctcccaaagtgctgggattacaggtgtgagccaccacgcctggcctaatttaaaattgttaaagtgtatttaaaataagatttttcccaaattttctgaaatacatgaattttgtatagcaagttatactcattgtgtcagaacaccttataacctggaccccatctgatcttgggttgcctagaatccccagggaccctcattttctgagcccttcacaggacgaaggttctcaccaggtgaagtagaagctgaagacgggctgagtaagctggctctgctgcagcatcccctgcattactgtaggggaattcccctctgccatgtttgggtaggccattcccaggatcccgtcaaagtctgaatagtaaaaggggtcgctgggctcattctcactcaggccaaactcctggttattgacaacgatgttatgaacctatggcaagcagacagtatggcttgacaattcaggtgcacaaattgcatggcttcccagactaatgtgcacagggtatggaatccagaaaccctcctggggagagaacatcagcttctttcatgcagaacccaaccacaagggtgggagtggagggtgaaagagcaacctttctcatcaggtgtgtctcggaaaaaagagtgtggatgttggagaagtggaagaagtttttttctggagttatagtttccacttccatggacagtgaaagaattgaatggtttcatactgaacaatctatgtgcaagaatgattagaggaattgtaggtgtttgaactaaagaaataagaaaatagtaaaaaggcttgtcttcaaatatgcgaagtgcaactgggtggaagaggcaatagacttatctgtgtgtttccagagggcagagttaggaccacacagcaaagctgcaagaagacacaacaactttagcacaacataaaggcttcctgcagtcaggactgctgtggaagcgatttacgtcctgggatgaaggctgaattagtctttgtgttccttccaacactcagcttctgggaagcttggacctaattagtaagcatgggtttctctaatagtgtaagactctagaaaatgggagccaaaccacagaccctcagaggctatgaaaacattacttacagtcacagtgtcatagcccaggaacacactcaggctgccactcccataggatagtccataggtttgtccatcgtttctgaaggtggaggacaggctgggattgaacctgttgtgattggctatagaaagacagaatggaatattcatttcatttgcagttttccaaaacacgtgaaggctacttatccttgatggattgggctcatcagaccaaggctgggatagggcatcaccctagatcttttcttgtagacaaactgtgctagtcctagaaaagtctatgacacactttgcccaaattccttccagctgaccattccctgagagaaagattgcctcagacttaccagaaacactgggccacagaagggcgctcaggggaaggaaaggaagccttagtctgtttctgctgtctgtctccaaaaaagtcagcacttctgaaaagtggtgctgaagtgacagactgagagcaatttctcaatgttccaaacagaaggaggatacgtgatggacaaagaactctggacttagaatgattcacctgcactcaaatcccagctccactcctctatctgctcccctcatggtgtggagggtggtagtgacatactcacagcagacttggctctggcagtagatggagggcagctacagattggaggaacccgtatcaaagaggactaggaaattttggggtggtgtcccagtgctgatctccccaaagtagaaagactgcaaaagaaaggtttatcaccttcattaagtaaccaagccttgtcttaagaacggacaagcagttaacccacaggaagccaccctctgcccaaatcattttcttgggggaatgagaggcttatcccacaagttttccttcccatctggagttagttcctttcaagattctactttttgtccctaattgcaagcctttggccagctaagacttagtatggcaagacaatatcctcttccaaagtgttttctacttttacaataagctgatatcttcacagatttatcatgctatactggagtacccagaattggggaaacaatcactttttcttttttcctggtgtccagacacacacacacacacacacacacacacacaccaccaccaccaccaccaccatcacactcttctccccttctctttcaatgttagatacttctaccaccattttcctcccttctggtcacacactagcagagggtgctaggcagctggaaaagagacagcatggagagaaagaagagctcttcactggaaggtagtttaagctctaagttaacatgggccagtcatgtcacttacctacctctagtttcttcacctataaaatgtgggtgttgaaatagaagatccctaacgtggcttccagctcagacatgcaacataacatctcactaaggacagtccacaggacagcagaatgtcaagatgccctgatgagacttggtgggcttgagaatattcagacatttgctccggggactttgcatctttccaaagagggagagatgcagtatctgagccactggagcttttgcctgacatcctcacatgtattttccttctttcccctgcagctcattgccaggacttcctttggatctctcagttgacttgaacattcccaccatgaatctcttaatcatgtaaatgaggctttagcaggatgggccagcaacgagaggaaaggaggaaagaaaaggaattactatactcttagatggtaccaactcataacttgttctgattctttccatagaaagggtgagactttggtttagtaactagtcaaaaattacagctaatgagcagtataagtgagtatctaagaatggtggttatacaagggttatggacattccccgccccatcactcacatccaggtagttggtgaagggctcataagcaacagcatcattattgaaataatacttggcaattggatcagcctttgggtggtccctcagaaacgtctccagtacaccctgctcctccattctctggcggatagacttgcctttcctcagaatgatcctgcagagaatagggtaaacaaacaaaaatagaaacggaatgagtcttggccccatgaaagcaatctcttcaatgacctgacctgcagtgtttaaatctctccagtactctactcaagaaaagccctctataagcaatgctctcagattttagcacattctaaccactgctgtcactccagaattcctggtgtggaatagaccatatcatatttttggggtattgtgtttatatattgtttccagagaataaatatcttatttctttccaatctcttctataagtttggggtaaggattgtgcatccttccttcttagccaacacccacacccataaccccaccccccaaatactcacacaccatccatccatttcaagtcttagcccccagtgggtgttcctttcacagtaaaagagtcaacctgattggtgttccaggagacctacagaggaaggcctttgccctttcctagcttgtcatgctccccgaaggctggaatccacaattaggccaaatcccaatacataactttccacacctcctgagagatgtaggcaagcaagaccaagaccaggatcttcatggtgctgacttttaactccccaccaacatgcaggacatgatggcagagccagaggttggggcacacaga

SEQ ID NO: 1879874 - DNA, 4001 bp, Homo sapiens; identical to SEQ ID NO: 1601

SEQ ID NO: 1879875 - DNA, 4001 bp, Homo sapiens; identical to SEQ ID NO: 1606

SEQ ID NO: 1879876 - DNA, 4001 bp, Homo sapiens
tcttacccgtaattcagcctgaatgaggctttttaaaaaaatcgagtttcctgtttttatttaggcttcctcatttgcacctcctcctttgaggtagagaagaggggaactgggacgacctttcgtgggcaccaggatgggggcgttgcagggcggggagacgggggtccagagaaccggggaagggccgctgggaggtcccgaaaagtgcgctgtgggtggggcgagggtgaagcaggtaggggcgagatttccggggtcgcgggtggggggcgccctggagcggccaaggtgcagggtcctcgcgtggcacccttgggatctgcccagtttgcggatggagcgcggggctgatcgggcaggtctcacttgtgcaggtgttccctggaaggtgggacctgcagatcttgaaccccaccagactccatcaagggggcttcttcccgccgattcctgagaagtcctacctctgagatgctgggcacagccgcacgtggatgtgggcgggtgtgccgtgggttggagtgggaaggggcaattattcctctctcagggctctcggaggggaaggtttactgctccctagggactttgaaaccaagggctaaccccctgctctcttccaggagagtgggataccgcccgggtgcctgacggtgccttggtgttcttgacaattgaatggtaccatcgggacattactccccaaagaactggtcgttcttacctaggtgatttcagctggacaactgtaggagctgagtggtgttgtcttcattttacagttaaggaaacgaaggctcagaaaagttaaataactcaccaacccacacagtttacaagtagtttctccaggatcccagctctttccgacgccagcgcgtttaatcatctgggggtgccgttgcttgcgggggaaggagaatgtcctagtaattctcttgggggggatttggaggggacgactgttcagagaggcaccctctaagatacccttgagactcctctgtaacacccgctgctgctgttcacaccccctccccaatttgattgatgtgttgagtggggcggaaggttcttttggttgatgaggctgcgaccaaacgcaaggagatataaatagagctttctctttggctctctctagagcagaaatgccaaccccttagcatttccatggcctgctggagtttcatttcttgatattaggattccagccatcttggctggtgagaggcctgctggcggcttcctgggcttggtcctcttttggtgctttcacagaatgatggaagacactggagtgggctggaggagtgctcttaaaacccagttgtggctgagagcggtagctcatacctgtcatcccagtgctttgggaggcccagacgggaggatcacttgaagccaggagttcaaggttgcagtaagctattacagtgccactgcgctccagcctgggtgacagagcaagagcccatctctgagaaacataatacaacaacccagttgcctgctccagagacaactaagctagcctccttctgagccccacttcccccgcccttcagcccctgttcagaaacagactacattggccacactactcacttagatgtttctggaattagggcacgtgccccagaggtactcccgaccacgcagatgtccccttctggcaggaaaagcgcgtttctgcgtttctgcagcctcagtccacgccgccaggtctttgcactaagctgtgggctccgtttctcctccgataccatgtttagcaagtgtttcctgagatcacacggggtgccaggggctgtgctaagaacagggcaggcagactgggagggcatcagcccctggggggcttacaggacagacagtccaccaatggttgtgcgaaagccagcccgctttcgcacaactgtccgatggaattcatggaggtgggagtggggatggtgagagtcggttcctgcttcatcttgttttacttaaattgcacagtgaaagggagaagtgaatgtgcaacggatgaagcaattcccctttggctgggttattttcaaaaccatttttgtgtagagagcagttcccgccctccctgaggccagctgccggtgtgggcctgatggtggggtttggggccccagcaaatgtttccttaacgtgggaccttcagaaggctctttcaggctgggcgcggtggctcacgcctgtaattccagcactttgggaggccgaggtgggcggatcacttgaggtcaggagttcaagaccatcttggccaacatggtgaatatctgtctctacgaaaaatgcaaaaaaaaaaaattagctgggcgtggtgatgagcacctgtaatcccagctacttgggaggtggaggcaggagaatcgcttcaatccgggaggtggaggttgcagtgtgctgagattgtgccactgcactccagcctgggcaacagagtgagactacatttcaaaaaaaaaaaaaagaaaaaaaagctctttcagccaggagggtggcttcagctactccccaggggacaagtgtgtttttcagcaaagctgttagagaagatggtctagaagcagtaccccgggatggaggagacaaggaagggccctatccactggaggatggcagagcctggcttgtttgaaagggaggaaaatattgtcatcttggtaccggtgacagtgtttcataaatagcgaaggtggcaaaacgccacctctctccctacagttaacgctaagactgagttgtctttagtttggttggtggaaatccccggcaatcatagcagaaatgctgccagtttcaagatggaaaaaataaaaaacccaggaaccccccgccccccccccttttttattgcagctaaacactgtgacttgctgtgggtcctaccaaaataacggccattctcccctccctgagggccagcacagtccctagggcctgtgaaagttccccttccagctgcactggctggatatgcgtgaaactcccctccctccccagaagtcacaaccttaccacctcggataagggtcagggctcctggaaatgggtcccttttcctattactttctttcttttttcttcttttttttttttttttttgagacggagtctcgctttgtcgcccaggctggagtgcaatggtgtgatctcggcccactgcaacctctgcctccaggttcaagcgattctcccacctcagcctcctgagtagctggaattacagatgtgcgccactatggccagctatttttagtatttttagcagtgacggtgttttgccatgttggccaggctggtctcgaactcctgaccttaggtgatctgcccaccttggcctcccagagcgctaggattaaaggcgtgagccaccatgcgcggccttcctattacattctgagcacagggggagtgatcagagtgaagggtgtggcatttccaaagtggtatttcggttggcttctgtttcactcatattgggggaaattgcttccacttagagaaaatgccggaagagtgggcggtgccaggagtagggtgggggaggaggagatgcagaaagggatagacctatttgggatttttggtcctggagggatgctgtacgggttaagtatcccttatccaaaatgcttgggaccagaaatggggtggagtttggattttggaatatttgcattatatgcttaccaactgaccattccaaatccaaatatctgacatctgaaatgctccaaggagctttgtatttgatcatgatggcactcaaaaattttggattttggaacgttgtagatttcagatttgggatgctcaaccagtgttaacctcctgtggttgctgtaacaaatgacctcaaactttgtggcttaaaacagaaacgtgcatgcttatagtttcagctacttgggaggctgaggtgggaggatcacttgtgcccaggagtttgaggctgcagtgagccatgattgagc

SEQ ID NO: 1879877 - DNA, 4001 bp, Homo sapiens
tctcgaactcctgacctcaggtgatccgccctcctcagcctcccaaagtgctgggattacaggcgtgagccactgcgcccagcagttataattaaaaattttttaaagagatgagtatctcactgtgttgtccaggctcgagtgcagtgactattgacaggtgctatcaatagcgcactgcagcctcaaactcaagcgatcctcctgcctcaaactcaagcgatcctcctgcctcagcctgtgagtagctgcaactacaggcgccctcagtcgtgcctggctttgcctctgatttttttctgactttagccttcctggtcttgtccccactcagcagtggtgtcttacctgaccacacctagaaatgctgaatgccaatttgagttagaaagagaatagcagaattccagccaggttggaggctaggatattggtgagcatttgggagaagctgagatttcatcacagcaaaagtgtgatgaaatcacacatcacaaagtgtcaggagagggagaagtgactgatgcagcaaatactcttccatcttctagggctccttgaagggaacaagggctccaatgagtgggagcagaggctcatttggtttcctgccttatgttttgggatttaacaagaggattggcccttttagtagcaagtagaggagcaggaatctaatttcttggctccatcatagctcaccgcagacttctgggccaagcaatccttctcccttggcctcctaagtagctaggactacaggcaaatgccaccatgccaggctaattttcttttttttttttttttagtagagacgaggtctcactgttttgcccaggttgttcttaaactcctggccttaaatgatcctcccacctcggcctcgcaaagtgctgagattacaggcgtgagccaccgtgcccgccttaatttactctgatttttcttttctttttaaaatagagacgggggtctcactgtgtggcccaggctggtcttgaactcctgggctcaagtgatcctcctgccctggcctcccaaagtgctgggactacaggcgtgagccactgtgccaggtctactctgatatttaacagtggtaaaattcatttatccactaaatgactttatttatactctcacttaatttcagaaaggactgaaggtacctgagctgtgaacaaagaatcagagactggtttttcctccatctctgccactaactagttgtgccacctggggcaagtcacttggtctccttgtgtctgttatccatgtgtgagagccaatacttaatatgagtgccaggcactgttctagagattttccatgcatctgtattcactcttttaattcttctctacacaatttattaaggtctctatctttttagagtttgtcagggcagttccagttcatcgtggcaatacaagaaagtcacttttgggggcttttgccatttcaaagaatcttggatttttctctgggctccagagacacccgtgcctgacacccccaatttgaacccccagcggatcattgggttccattgctgatggggaccttgtgtttgagcttgactttccctccatccatgctggagataaacggaagtcttcgcgcagggggacgattgcaggacggggccgctagggaggagggctcccacacgtggggaatgggggtggaggaaccgctgaagctcgtctgccctttggaaaatctcgttggtgtcctagccctgggatcattgtacttaccaggttggggggctctgcacccagaactcctcccagcctctgtctgcccgtccaaggtccggcgtgacttccggtggctgatttctcatcttggggaaatccccgccctgggggggtccggtgtggcctgcagggagcctgactcacccgtcggctgagtcagggggtcccagctgccctcggatgtctgctgcaccgctcccctccctcaggcgggggacggcaggaaggagggagagatgggagggcgtgggggcggggccgggggcggtctccagcccccggcccgggctccgccctctcccgggatctgtgaaagcacagccagggtgcgggcgggtgagtgcccacctggtgcagggtgtgaagagcgagagcgcgtgtatgagcacgagcgtctgtggtctctgtgtgtccgtttacatgattgcgcctgtgtctgtgtgtgcgcatctgcatgcgtgtctttttgagtgaatgtctgtgtgtgacttctagggacggccagggaagaggagtgtcccctcccaccctggccccccgtcttctcatcctggactccctctcttctctctcctccttggggggtgctctgggcatccgggacccctggcaaggctgccgggtgctgggaggacgcagaggccgccgagggcggagggaagcgtcaggcctggctgcgcgcgccctggctagggagctccgagtcccggccgcctggtcctttcattctgggcttcttcgagattctcgagggcttccagccggcagtgttttctccttgccgtcttctcaggcacgaggaaggctcctggagctcatctgcctgggatgggcggccctgccttgacctcacgtgcagcaattaggaccaccaaggagtgttcttcaaaccaccttctaccaccccgcgggacacgccagggctgattctggtgctcgcaccccgcttcctcctctgcgttcccctgtggcaaaggtttgtcttgggctgtggacccgaaagaatattctaaggggagatgggctcttgcagagcaagaggggtatggtttcagcaccaaactaaactggtgccagcgctagctctgcccaagaggctgtgcagacagtgtttgtgtgagtacgtgagggtgagagtccctgcccgcctagcttcggcttccccacttacaaccaagggagaacaacatctatcttacagtgtagatgcctggataaaaactggagcgcctggccgagcactttgggaggctgacgcggtaggatggcttgagcccaggagttcgagaccagcgtaggcaacatagttagacccccgcctctacaaaaaattttaaaaaattagctgagtgaggtggtgcgcacttgaggtctcagctacacgggaggctggggtgagaggatcgattgagccagagaggtagaggctacagtgagctatgatcgcaccactgcaccccagccagggcaacagagcaagaccctgtctcaaaaacaaaaacactggagcgcccagagttttttttaagtgcgggacaaggattgtctcggtgttgttactgcacgcacaccgcccgttgtaatggatagatgcattagtgaaagtgctaggtacactcatttattttctaaatctcacatataagggaacccccgatggaaaggcccatcagctagggaacagccagcaggctggatttgagcccagagcccgggctggccaattactcgagtgagtctggctccggctctgtgacctgggtccagtaccccgccctttctgcggatgccttgcaaagcggggagcggaaagcagtttggtggacgaccagccctcccttgctttgcaggtggcgctttctatttattgattgtaaggtgaaacctaggccagagccagcgtgcgcgcgccgtcggggtcccgcggctgctctggggctcagggtgcgaaccccaagggccccgcctggcagcgtcctgggcctccgggcgagaacagcgggggtcggggaggatttgcagcgtccactcctctctccgccgcccgtgtgagctcgggcgcttctcccggctgggggtgtgagaatttgccgacggtgcccgcgccgccgccggccccggccccgccccagccccgaggacgccccgcccccagccggcgccccgccccgcctgccagtagtcccagccccgccccgggccgcgcccctccgccgagccccgcttgcctgcacctcg

SEQ ID NO: 1879878 - DNA, 4001 bp, Homo sapiens
ggagctcaggcaaaaagtcttcactggaaataaagactcgaggaataaaatcttatctactctacctgaaaacgaactctccttttaaacccacattccattttcttccttttgcatgacttaacttggagtttaccacacacgttcttgaattgttactttttccaaatctatcagtctcctttctccccccagatcttaaaatatgtttcaagatacccagaatgtcctgtgtgggaccaccagcagcccaaagatggttgtgaaaccttggccaatgttttaaggagaacatctgctacacctctcactaaatctataccactgaataggtgcttccagggaaaggggcttggggaatagttggggcccatgaggagagaattaaattgtcttctgagcctgggaatatggagtggcagattctctcaaaccttactctgagaccacgtacccaacaaacaaacaataagcaccaaagtattgggggcccagatgaaggaccaagtaactaagtgtgtcaagtgaataagaaatgctcataggaatagtaggtcacctgcttttgacttgactgtatagttctaggcaacatgtattctagtgagaaccataatgagctaaagaccagaggtctttctgcaatttctgggattctatgaattccgtagttctcactgatgtcccaggagagtatgatataaagctgagagtggatttttgccagtccagtggttgaggcccaagacaaaactaattttattaaaagaaaaaatgagtgatatcttatgcttcagtgtattaaggaatattttattagtaataggacttatctttgtataggataaatattaatgatctcttaaatcccttgtataatagtgtttccagactcctaaacacactgattattcaatttagacttactaaaatttgccaatgtttattttccaaaacagagcatgctcaagtctatctggcatccttggtggtttttttttttttagtggttccggatttaattgggggtgaaagggtgctgcaaagttgctcagagggcccacagctgggcccacgagtgtttgcttttgctactgaacagagaagcgtggcctaactacaaacaactctgggccctcgcatctgcctccaggacctggtgggacatggggcggctctgctgaccagatcttctctttggaacactcctcccaccacattgccctgggtctgcgagcctccctcccatgctgaagtcaactccttaatggagagtctggaggtcgcagccccaactggggactgacagggagtggggaaccccagggcccccagtctggaagggcccccagtctggaagggccccctcccagccattttggtaacaataaatactgtgtgacagtggcagggagtggggggttcggccactggccagcaggcagcgggggaaccccgaggccaggcctgggcccccaatcctcactccgtgcggacaatgacgtggatgccggaatccgtgaacactgtcccgctcatctcccccgtccgccgcgcaaaccaggggtcttcaaatggcttctgcatctgacctttgctgaaggcacccaggtctcccctggccttggccgagctgcagtcgctgaattgtgaggccggagactcaaagtccttctctcctgccttgatcttctggatgtagccgctgatcagctccagggcctcctccttggtccgggtgatttcctgccgccaggtcgagggccgccttgactggcttcactagcaggtgcgagcggcggaccctggcgggctccccctgccagattttgccgccactgctgctgttcccgctgggccgctcccactggctggggttagtgatgtggttgaagtagtaccctcggcctgaggggcggctcatgcgcttttcccagccaggcggcagtttctcctcgtccgccatctttcctcctcacgctcttgtttttgtaaataaagttttattggaacacggtcatatttatttgctaatgtatctagcaaatacatttggctgcttgtgtactacaaccacagaactgaatagttgagaatgacaccctatggactgcagagcctgaaacatttcctatctctgagggcctggtggcagttagaattaaactctactctgtagatactttctgaccaagacaatgtattaaaaaaaattatttcttacctttatattagtgtagtttaaatttgatcgattccttttgtgggaagaaaggtacactctatgccacctctaagtctttttctattgcttttgaaacctttggttcataacttcatgcccgggaaaccatattttaaaatttataatatagcttcctactattcctttgacagtcttttgaatgggcaacaattttcttttgcttgttctgggggaaagaaaagctgtcccatagggttttatgacccatttcctgaagcttatttatttaaaataccatttcttctattttaattttatctcattttatttatatgaccgtagtttccatcagtttttaattatcatcactatagtttcattctgtcactacattttccacttttgaagttgtctttctgctgtttccctacgttttgtacctttaaaatattacattcttatttctgttttcagagatggcattcagtattattggctgtatttcactcttctaagtttgactgtcttcacttacccacaagattttagacagtccataacacagtctattacttttcttgttcgtgtgccagttgctaaactataatcattctgtcaaattgtccaaaaaaaatgttccttttagatgaacatatgtaacagggtttttaatttcatgagcatacaaacaagtaagattttctcagaaaaataaaatagaactcatggtatttttatgttagtattgttctttgtgagcaatcattcattcattcattcctataacgtgcttctttgtggcaggcgccctgtgggcactggagttacaaagattccagagacgcagggtttctccacctcagcactactgacattttggactggttaattctttgacatagggggctatcgtgtgcattgtaggatgtttagcacatcctacacagcctctgctctgaagggcttattttctaaatgggaatgacctttaaataaataattacttcatagagtgacaagtgccacgataaaagtatggatagattgctataggaacacagaagaaggaacaacaaacagttcagtaattaggaataattttaagaagtggcatttgagctaggttttagagaaacttgttatgaaaatcacatgtacttgcaaatgtaaagagaaataatgaaaatactgaaagagtaattctaaagttgagatataatcaacagatttttttgagattgtagctcgagatagcattatgcacataatcttatatatgcaatacaacctcaaaggatttaaaagattttggtccaaagtgaagaagctctaaaaattcccattagagtatgttgcaggaaagtctattgtcctactctcatgaatggaaaaggaaacttctgggatgtagtgtttgtcaaccttggcacaactgacattttgtatgagataattgtttgttgtgggggactatcttgtgcactctaagatgtttagcagcatccaaagtacccactagataccagcagcactctttacagttgttaccatcacaatgtctccagacattgtcaaatgtctcctctctttactgattgtcagaaaagtaagcatcttacctccatttgttacctccttatgctactaggtgggttcccatgtggctttcccttagctattcaaactagcctacctgaggaatgcactcattggctctacgccttcttcatgaaagtaagcactggtggctctggggcctatctccctttctccacatggaagtccattggtgtga

SEQ ID NO: 1879879 - DNA, 4001 bp, Homo sapiens
ggggaaaggctatttcaacaatgcatgctgccccatgcagaggtgtacacatggaaaagcttggagcacgggcaggggacaggcagtatttgtcacctgagtgaagggcatcagtaggagatagggtagaggaagaattgggttgggaccagagaagggaagaccctcactaacaaagcaggctttgggttgagactgtgttaacagatgttctagctacagcttcccttcctgttgcagagaccatctgcccgagtagccgcaaatgtgcttcatctaagcctctggggtgaacatattctagccctgaagaatctgaagttagacaagatggttggctggctcctccaacaatcggccgccactttgttggccaacaggctcacagagaagtgttgtgtggaaacaaaaatgaagatgctctttctggctaacctggagtgtgaaacgctctgccaggcagccctcctcctctgctcatggagggcagccctgtgatgtccctgcatggagctggtgaattactaaaagaacatggcatcctctgtgtcgtgatggtctgtgaatggtgagggtgggagtcaggagacaagacagcgcagagagggctggttagccggaaaaggcctcgggcttggcaaatggaagaacttgagtgagagttcagtctgcagtcctctgctcacagacatctgaaaagtgaatggccaagctggtctagtagatgaggctggactgaggaggggtaggcctgcatccacagagaggatccaggccaaggcactggctgtcagtggcagagtttggctgtgacctttgcccctaacacgaggaactcgtttgaagggggcagcgtagcatgtctgatttgccacctggatgaaggcagacatcaacatgggtcagcacgttcagttacgggagtgggaaattacatgaggcctgggcctctgcgttcccaagctgtgcgttctggaccagctactgaattattaatctcacttagcgaaagtgacggatgagcagtaagtaagtaagtgtggggatttaaacttgagggtttccctcctgactagcctctcttacaggaattgtgaaatattaaatgcaaatttacaactgcagatgacgtatgtgccttgaactgaatatttggctttaagaatgattcttatactctgaaggtgagaatattttgtgggcaggtatcaacattggggaagagatttcatgtctaactaactaactttatacatgatttttaggaagctattgcctaaatcagcgtcaacatgcagtaaaggttgtcttcaactgagctgttctagttttctcttccccagcactgtcatctagattttccatttcagtgattcccacccctcggtctactagcaacaacaactttcttgtatcctttgaggagacgttagggagaaccatcatttcacagttaaaagaaagacagtccagtcctaggcaaaatttcatgaagccacttaggattttgtatccagtcagtcatcacccacagcaacccccacccacagccattagcaaaccaggaccggggccaggtgaagtttgagggcaacatctcgctttatttttatttatttatttatttatttatttatttatttatatttgagacagagtcttaacactgttgcccaggctggagtgcaatggcgtgatctcagctcactgcaagctctgcctcttggattcatgcctttctcctgcctcagcctcccgagtagctgggactacaggtgcccaccaccacgcccagctaattttttgtacttttagtagagacagggttttaccgtgttagccaggatagtctcgatctcctgacctcgtgagccgcctgcctcggcctcccaaagtgctgggattacaggcatgagccaccgtgcctggccacgtccctattttagaaatgagaggagtgactgcacataggaaaaatgccacttttagcaattcaaagtggaaaaacttcttttatataaaaattatcccaactcccaccccttggctctcagtgttgcatctcccacagaggtaaagttgtgccattttcccacggctttaaacaaagcaaaacaaaaccaccaatcctaataacccccctccttgccccgtctccacgctgtgcggagagggctctagcccctcagtcggacttctccttctccttcatgtgcaagaagacgatgctgaagatgaagagccccagcatcatggagaaggcgctggcgtagtaggggtaggccgaggggatgaagcgctcatactgcgtgtgctggagtggccgcacggatacctgcaggaggacagaggtggcaggacctggccactgcagagcccaggcagggcacatgctagctgaaaacagaagctgtcacctgtgcttacctgagtggaagagtacaggtgtgtgtagcctagccggttgtaatccactttaaactggaatacaccatacacgtcgggcaacttgaactgaacactgtatttgccacctgcggaagaaccaacaagaataaccgggaggggtttcccagagcttttcctggttgggcctcgagagcaagtgaggcctggggccgtttctggcagcatcctcgtgcaggaactacactcacctttcttcttcaggaaggtcctcacaaaaggatcaatgcggacaaactccagctgaatgtcatcgccatcaaaggggacccatttgccatttgagagctgctggatcacgatgctatactcctgagataaaaggccaggttagccagggctggccatgactggaggccttccaccacctgcaggcagagctgcacttaattcccacccgacgaacatggcaggaatgcccaggagttcagaagacctgcagatgcccctgccacccggccctgatcagtaaccagtctctctcctcagcaaggttaatcccccaacacagcatctctgcctcttctctgaaggcctagattccttcacacagtattcatggcccatcaaagtctggacccaaaccaccctcctgccccgacatgtgccaggcactttcaagtattcatgcttccatattcgctttctcttgcctaacaaattcaacctaatgacctatttctcttattaagtccaacttcctgggcagagttaatcagtgaagcccctcccactgctgccccccatagcaaatacacacacctcttcaaaagaagtgctcctattaggacatcagttttcacgccaggctctgcatctcacctggcatgcttaggtgtagggattaacttattcatctttatttatgccctttaggccagcaaagaagtgttcaataagtgcttctgagctgagctcagtcagcttggcaaaccctttgggccctcccaccccaaacatctcttaccactaggtcagtgacagtgtaggcattgggtggggctgtctcgcccacccgatgatgggacacaggccccacacggaggacaccctcctccttgaacacccagcgggagagggccacagctagttcatagttgcctgtctgggaatacctgcaggagggaaacaggagcagcttgggcaccagagccacctttccagtggtgcctgatgggcaggaccactcatgtccaccatgacagtaccctagcgaagttctgcctgtaggccttgggcacctagggactcatggttaaagggaacgcaggaaacaaacgaaaagatatggctggttgcttgtcatctgcacaacaaatacacaaatttctaaaaggaacggtggaggttagggatctctagataagtcactactaccttaaaaaattggaagtgccaataccagcaatatagcaataaagccctgaaataatctgacagcacctgaaacactcagcctctgacacttttagctaaaagcctccttcttccccttctgagtcctccccatatacacacactgcaccacccggatc

SEQ ID NO: 1879880 - DNA, 4001 bp, Homo sapiens
ttaccactctctccaggtagttttaacaaaggtattgtaccgcagcttcaaaaaatcaaaagttacgcgtttacctatccattcactgctcagacaaaacaaaaacaaaagctacctgtaggagacttcgaaattccttaataccatagtgtcattaaaaacaaacacctagatttactttacttagctatattttactaagtagtcaggttagctttaatgcttaccacgccaaggaaaggtggcttttttcctttcccgagggtaatcccgtcccacctccccctcccttaaataaagttaaaacaacccaaaaaaacccagctaattctcagctctgtacagttctccagtacaagcaacagtagttcaacctcaagaaaaagacatcttaaaggccgtacattaaaagttgccagggatccagccgcttacatttcatgaaaagtacagaccatacccgtttagctagctgtgcaccttaactggtcgagaaggcgcgctgggggctgggtttgagggtgagcaaaaggcaagattattagtttgggttgacgtgggggtcaaggggagagcagaggaataatctgtaagatctgagtcccgaagctctttgggttatggaggttagaaaagggcctgttaaagttaggcccaagtttcggcaaggtggaactgggaaaaaaaaaaaagaaagaaaaaaaaaacgaaacccgaaaaaacaacagcgagcaggctcccgagttctagcgttcacagtgaagccgttaaacgcagcaggaaagtaggcgtgtgttttcttcctcttcccgcctccccagagactcgagcccagtcctttcccctcattttcaccccagccgagtccaatggctgccctcgccgcggagtcgggtcggaagacgccccgccccctcgccgcgttcgccctagggaacccctccgccccaccttccctgcccgatgaggggcagtggctgccgccgtcacgtgtgctggcagccgccaagtgaggccgcttttgcgacgcggtgacagccaaatggtgcgacaggaggagctgcagccgcggccgcagcgcccgcacggagaggcttgaggcggctcctggcgtcgcccagagggagcgactagacgaacagtccggtgagggcggcgagaggaagcccgctacgagtgccctagctccccgccgctctcgatgaaccggacggaataagccgcgcctccagcaggggctgcgcctccatgaatccctagttgtttttttttttttctttctctcccctctcctcacccccaccccgagccccgtcccgccttctcccttcgccagaggcggccgcgtccaggtgcggagtccataccggagcgcaatggcgtccaaccccgaacggggggagattctgctcacggaactgcaggtaagggccgcggccctggtgagaggcgctggcggaggagacagggagagagccccgcgcggcgtcggggaccgaggaaagccctgcggccgccgcgcccctagcccgctaagtgcggaaactccgggatgtcactcgggaaatgcttccctcggggaaccgcttccctggggagccggaccctctcccccgccaaagccctggcctgccaccgctttggtttgattctgcctaccagaggggaccccatctctgcagccctgctgcagcgggagcctgctctcgcctggtccccggagaggccggcccgtcgccccctccctcggtgtcagagctacccgcgaacgcccctgttgccccctcccttcgcgcggccgggccccgccccgcctttcctccgtacaccgctccttaaactcctttgaatgactcccaagctgttttcttgtccctccccctcccctcagactccgcacaaagagcgcccccataacttccagcccctagacaagtttttttaaaaaacgagtctcaccaaatgtttgcttcacttcagcagccctcttcaggtgacagagtttctttcctctattttgagggttatctttttcttttcttttcctttctttttttttttttaaccgagtgataaatacagggtgcctttctctgctacccctgcccagatccgggagctcagatgctgatgcttttcagactttcattttccctctcatttgagcaccagagaaagagctaataagttgtttactaatgagaaagcagtcgactaagggaaaacattgggcaccacatgtctgcaaaagatgagagcaaagtagatcgcttagttaagtcatgtcgagtagcaatgttatttcccatttccagataaatatttgataatgtaggcacgattttctttagatctctatggtgtacatggggacttaagctaccctgtcgggtttttcattacttgggagtgttccagagatgtttgttttttgacttaaaagttattttgctttattttaatatagttatcttttagctactcaaagattgtagatgggaattaggagaaaaaaatagcatgcctgcatttctttttgtgtgttggacagttaattttttttaaaaaaaagactaaatcaagaaattctgaagagttgatgtcaaaattaagtattgcaactgcatctaaatttcttgtttaaatatactttttaagaaatctctttataagtttggtttcttgtgcagtcagacgtaagcttgaaaactttggtataatggttgatatttcctccacaaaaatagagactttaacaatgtatatcaatgcagtgttgcacatttagaatcctttggtaatgcaaagctgaatttcatataattgaaaatgttgctatgtagtattttaattacagttagccttttataagcagatcttacagcataccacatttgctaaatgaatggaatttactattttattaatagtaaataatttacatgagcttttaaaatgaagatgatgtgaggcaagtcagaaatactttacattgcctggtcttgaaccatgaaaaacatactttggttttgattgagaaagatgatagggtcacttttcttttgaattgagcagtgttagagttacaatatatttggcattggtacttgtatgttatagaaagttggcataaaagacacctactttggcactggaactgaaaatatattttcatgtgtattaataacatttaggatcttttaattaataagatcaattttgataataacaaggaagcaagcaaagaaggaagaaattttaaatatgatgacctagaaatacgaccaaaatagaggaatacctaaagttaagcttctagataaactgaaatataaccccttccagaaaaagaatagtttttattaagtgttaccttataggttgtcatatatccaagtcattttcttggtttatttgactcccagttttgataaaagttattgcatttaaactttatcgtgtttattaaaatgtttgcgactattacttatatcaacacttaaagataaatagtcataaagtttgcttctccaaatatttccatctattcagactttttatttcattgggtcctgaaacttagtgtacagcaaccaagtatttattaaacttttgtttcaagattcacttttttaaaaagcttctaaattgtttgaatttagactgaaatactgtttaatatgaagttcttaattcttctctgccatacagattttaagtatttaagaagttttgtagccagttttaagatgtatttaatggttaaaactgttactttgctatgtatcctgtctcaggaatacttgtttactctgaaagttacatattacaacctggctttaataaaattgatatttatttagaaatatatccagcttttcattattttttcaaattgtagaatttgaaatactccactgcttgagctggaattggcttttggtcatggaaaggcaaagtaagaaaatctgaaactacagtattctgtcttgttaattact

SEQ ID NO: 1879881 - DNA, 4001 bp, Homo sapiens
gggtacccatccccaaaacaaagtgatttggattaaaccaaaatagatttcataggctctgaaaataaaatacaggacagatttttccccctaggcccaatactactgcaaagtataagaaagtctttttaagagaaaacaaaccatcacagagttgatacttagctaggacctgttttaatgctagtaaagccccaagagagtttgttttgcccgcagaggaggggaaagtgtgtggaagttggtggaggtagtcattttggttattagtaaataaatcaagcagcagagaacatgaggcctaggcaactgctagagaagccaaggcccagcttcccccctctcttcccagcacggcctgggtttgatctcagagccctgcggattgccaaggaaaaaaaaaatcatatcgaaccacaaaagcacatggggcgaatgtaaaatataaacacggcgttgggctgtgagtggctgttattaaaggtctgaattactaaacatgagaggcggggaaagccaggcggccatttcaataatataaacctccccgaattagacattattcaaatgagaagaggttcagctaagcagagagtaaagacgacccagcacacagcgagaaaacaccgccacagaagaagggagggggatccccgtccctccccaccgactcccaacaggagagaggaaatcgagaatacgatcaacttgtcaggccagcccattctggggcaggagggcagccctttacatccaagttctcgggaggcctctgggcgcttctggggcctcggagcgagaggccccggagggccacccgccccgtgcgtcccggtcaggcgcagggggtggggggaacggagggggggcagcggggaggggcaaagggagacggaggtcagaccacgccaggcacctccagcccaactcgcccgcgaagccccggccgacaacgcaaaggggctgccgaccgccggccgggggcgcgcgggccgccccagaggacatcccctcggaaggaacttgccccaaggactccttccaatccagtccaccccccagggggggcacgcagacccctgcgcgggttccccacccccgccgccccaggccacctcgcagcgcccacgaccgctcacccctacccacctagagagcaggcctggcttgggtcaggccaccacattggggaccagtggggcgaggccgaagtgcctggggccgtgacccccgggctcagccccgcgcggggcgcgggcagggagctctccccgcgcgcacccccggttgccctgagggccgccccccaaggcgggcagcgcccccccgcccgggcccgctcccgggggaagacgcgtgcgggtgtccggccgccggggtccgctccggccccgccgcctccccggcattgtgctcgccgccgcctccatcccccttcacgccccccaccccgcgcccgcccggccccggccgcccgcccgcgccctactgcgccccgccggcccagcagctatgaatatgtaaaatgtctttattgtcctctccctctgccccggccccgccgccccgccgcggacccgctcgggttcgggcacggcggcgaggaggcggcagcggcggccggcagaggaggagggccggtgccgacgggcagacggcgagcggcggcggggtgggccgggtgcaggaggagggcagtggatcgcagccccctttgccccttgtcttccccctccgcctggccgctccgagcctctttccccctccgctcagcgcccggcgggggctcaatgctccccggccccccatctccccgccgttaattataataatcctgagtactaataaattatgctaagtcgcgggggggggcagcgggagccggggttgagtatgaatatgaatatgtaaaatgctgtaatgattacctgctgctgctgccgccgcggctgaactctcatcttgactcgctgctcctccgtccgccattttgaatattttaaccaaaatcgcccggtcgataaaccctccctcgctctggctcccctcccccctcccgccctgcttgcctcctccctcctctccgccccctcccgctccttcctctccccgggcgcgcgccagggggcgcgcgaggccggctctgttcgccccggccccctcagaagagctccacccccttcccgcgctctgcgcacgcgccttcggggcgctgtggcccttcggtagctaaagcagcgccctcaatcagccaggcaccctgtggcttcatttttcgtctcggctctgcgcatgcgcgcctttctcctgccgccagaagtgtcgccggcgcatgcgctccctctagctcagaaccagattatatagtatcccgggcgcctgtgtcttcttacacttctcccttttcctcccgccttgcttccctcctggcttcgctccggtctcccccagtggcctgtggcattgtaaaagcacggcaaggagcgcagcggccagaaacgtgggggcgcgtggaagggcagtgagcggcccgcgtgccctgtgctccgcactttcttcagggtttccgcgcagttgaaacattggcaacaatggataagccgctcctcgctaggtaatttccggccctctgggcaggtaggggcggaaacgaccgccacgggagccgggcatgaggcacctgctgagccacacgcgggcctcccgctttaaatttgaatccgagctaatccccgcccccggctctgctagtgcaggagacccggccccggcaaacgcgagggggagtgtcgtgtgattgttttaattagccctaaatctcttctgctctacttgcttctaacgccaggctggcttcctcgggagctaggcgtcttattaagtcgctaatttccgccctacccttcctttctgccttcacgcccctctaacgccgctccccccaatcgaaacagaccccatattctgaggcttccccccgcgccttcttcccgccttggaacaccttttaaaacctagcagtaagctgatgactaataaaaatgtcgaaatcgtaacttcatcgtgaattttattttgctgtgtttctcagagtaaatatggtattggggaaaggtttcgcgttgcacatatctttcttggtaactagacataatgttgctgagttttctttatcttaaatggcgaaattccctggacaaagtcccaggtctaattattttacgaatttttaaagccctatttttgtttgtttgtttgttttttaagaatagaaaggtgtatttcatggtaagcaaagtttaaaaaaaatcagctctagttaatctgtcttgagagatatgactgaagtttaaattgggtagaactgctggttctacaattaaaaacaaaactgatttccaagtgagtgcaattattttaatgggtaaagttttaatcatcagtcctagaatgctcgttggactcctttaactgtgcaagtacagttaaagctattgtcagtgacaggcaacgatttgggggtgggattgatttgttcgtggtaattaagccttagggtgtgtgcatgactgtttgaaccaaataattagaccgccctgtaatctaattatttagagccacgccaaccagcacacttaaggaaatgaaatatttaactagttaatctggaaatatggcctaagttattttcaccagcattactgtaagggaagtctcagaattgacaaccttattggaaatagttaagtacatgcccctgctctggggaccacaaatttgaaatcatctccattaagaaaaagagctcaaataccctcatttaatttcctgtcttctatttaatcctagttttgctctttggttcaaaaagtatattaatatgaccttcggaaagtcattgaagctagtgtatgtgttatgcattctttactgtttcacttctataaaaggaaattttcatggaaaggatttttatttaaggaaggatagttctgtgagaa

SEQ ID NO: 1879882 - DNA, 4001 bp, Homo sapiens
gtttttgttgttgctgttgttgttattgtttttgagaccgagtcacccaggctggaatgcagtggcgcaatcttggctcactgcaacctctgtctcctgggttcaagtgattctcatgcctcagccacccaagtagctgggattacaagcatgcgccaccatgcccagctaatttttgtatttttagtagagacggggtttccccatgttggccaggctggtcttgaactcctgacctcaagtgatccgcctgccttggcctcccaaagtactgtgattacaggcatgactcaccacacccagcactaaattctttttttctttttttttgagacggagtctcgctctgtcgcccaggctggtatacagtggcacaatctcggctcactgcaacctctgcctcccaggttcaagtgattctcctcctgagtagctgggattacaggcgcacaccaccacaccaccatgcctggctaatttttttgtatttttagtagagacgggtttttaccatattggtcaggctggtctcaaactcctgacctgatgatcctcccgcctcggcctcccgaagtgctgggattacaggtgtgagctacggcgccccaccatcctaaattcttatatactgttagatcttagggtcttttcaattttttttttttttttttttttttactgtgtcccaggcttaagaaaaaagtgatacatgatgtgggattaaaatcaagaacatcattgaacttcaccttccctccaaccagttgccccaaactcccctgcccccaccctttgtgttcccaattccttccttagtgaatgaagaacttaattccaaaagccctggcacaaactccaggttctctttccctagctcctcccctccccctgtcccccattcctagaagggcaggcacctcagtttgaatgcatgggagagcccagggtggtgacggagacgggggaaaggcttccccctcagggaaagggaccgaggagtacagtgcagtgaagtgagggctcccatagcctggggtaccaaaatggggccctggggccagaggaaaggatactggtacccctgagaaaggagacccagcagcctcaaaatcctctcgttatgcatagtcgctgcttgattgcttgcctttctggcaccggttacagaaccacactcggaccacatccttctcgagcccaagctgctgggcgatgtggctgatctgctgcagtgtgggtttcgggcactgcaggaacaaattctccaggttgcctctcactcggttctcgatactggttcgctttctctttcgagcctgcaagagggtttctgctttgcatgtctcctgaagattttcattgttgtcagcttcctccacccacttctgcagcaagggccgcagcttacacatgttcttgaagctaagctgcagaccctcaaagcggcagatggtcgtttggctgaacaccttcccaaatagaacccccagggtgagccccacatcggcctgtgtatatcccagggtgatcctcttctgcttcaggagcttggcaaattgttcgagttctttctgcagagctttgatgttctgggactcctgcgggttttgctccagcttctccttctccagtttcacggcaccaggggggacggtgcagggctccagggaggtgccatcggagttgctctccaccctgactcctgcttcgccctcaggctgagaggtctccaagccgccttggggcactagccgcactccaacctgaggcccacagtacgccatccccccacagaactcatacagcggggggcatgggggaatcccccacacctcagagcctgacccaactcccggcccgattcctggccctccaggagggccttggaagcttagccaggtccgaggatcaacccagcccggctccggcccccctggcccatcacctccaccgcctggagggggcaagaaggcaggcatccgaagccaggtgtcccgccatggggaaggaaggcgccccaagctgggggcctggtgaaatgtcaaatatttttatattcctttctatcagtctattttggtatctctgtcatagcagtttaattattgaagctttaaaacactgacaaggaggatgatttctgcctttactgtagtttgagacatcttgaccatttatgttaggaagggtcatctttaaaatgtgcttcaagaaaaggctttcatcagcctgggtaacatggtgaaaccccgtctttaccaaaaaatacaataaattagctgggcgtggtggtgttgcacgcctgtggtcccagctacttgggaggctgaggtggggggatcgcttgagccagggaagcagaggttgcagtgagcctagattgtaccactgcactccaacctggatgacagagtaagacttcgtctcaacaacgacaaaaaaggcttttgaataggttagcctttctattccagcaaattctagtatcatggtcagcaaaattaaacacatactttttcacaagattgtattctgagatttgaagagattataaagagaaagataaaatttctgccctcaagagattgtgtagggaaggacatgacacactgagttcccagagatagcaacagtttttcaacttgttctaattggagcttacactagtacttgttatataatatgtattcatttattttttcaattagtatttgttggaagattattatgtttcatgtacttagaattgatagagtggtgaataaatctagaaacttttcctaccttcatggattttaaccatccaagtgctattatgaagagttacttagagttataagagtactgtatataatagaaataactaacttagtttcccagaaaaagtaaggactatgctaaaaatgtgaagaataggcttcatctgttatttaaaggagtgaggagagagcatacacaaaagtctgaaaaagcatgatagtttcaggcaagcgaaagaaagcttttgtggtcaaaacatggagtagagtagcatgggatacagatagaggttgtagggatcagattgtgccaagaaccttgtatgatatattaaagattttggtcactatttgttgattaatataaaaccagaatgcacaggaagaatttaatggttatgaggtgggcttctagactcggaaaacctaggttcaaatcctggttttaaaaagaaaaaggtatatttttaaaacacttataaatttttgctgtaaaaaataaaatcaggccaggtgtggtggctcacacctgtaatcccagcagtttgtcaggctgaggcaggaggatcacttgaggccaggagttcaagacagcctgagcagtgtggctggttgtagctaccgtttctacaaagaactgtttgtttgtttgtttattttagacagggtcttgctgcgtcccccaggctggactacagtggcacaatctcagttcactgcaacctccacctcccgggctcaagcgtctccacccccatccctcccccacagtggctgggactgcaggcgggggccaccaggcctggctaatttttgtgttttttgtagagatggggtctcactatgttacccaggctggttttgaactcctgcactcaagcgatcctctcaacttgacctcccaaagtgctaagattacaggtgtgagcaccgcacctggtccatctctacaaaacatttaaaaattaaatgagcgtggtggctcgtgtctgtggttctagctacttgggaggctgaggtgggaggatcacttgcactcaggaggttgaggctgcaatgagctgtgttccttcactgcactccagccttggtgacagagtgtgaccttgcctctaaaaatacatatatattatagcaagactttgtctctaaaaatatgtatcttataatgtatattatatgtaaatattatatatatatatatttttgttgttgttgagacggcatcttgctctgttgccc

SEQ ID NO: 1879883 - DNA, 4001 bp, Homo sapiens; identical to SEQ ID NO: 1678

SEQ ID NO: 1879884 - DNA, 4001 bp, Homo sapiens
taccctcctgattcttactatacactttttttttgagacggagtctctttctgtcacccaggctggagtgcagtggcgcgatctcggctcactgcaagctccgcctcccgggttcacgccattctcctgcctcagcctcccgattagctgggactataggagcctgccaccacgcccggctaattttttggatttttagtagagatggggtttcaccgtcttagccaggatggtctcgatctcctgacctcgtgatccgcccgcctctgcctcccaaagtgctgggattgcaggcgtgagccaccgcgcctggcctttttactatacactttttatattaaatgatgagaaatcaaagcccccaaatggttccaacttaaagtctaacctcaaatccaacagatttttttttttttttttttttttttttttttgagacggagtctggctctgtcactcaggttggagtgcagtggcgcgatctcagctcactgcaagctccgcctcccgggttcactccattctcctgcctcagcctcccaagtagctgggactacaggcgcccgccactacgcccggctaattttttgcatttttagtagagacggggtttcactgtgttagccaggatggtctcgatctcctgacttcgtgatccgcccgcctcggcctcccaaagtgctgcgattacaggtgtgagccaccgcgcccagccagattgttaatttttgtaaatttcaacccatagccacaccatcatcctagctctgctgtcctcagaaccttcctattccatctccaagatcaccaccatgctgacctagagagacatccccctgaaattcattatataccagccatacacagaatgctcatgacttaaaattttttcctattttcctggcatcaggaatcttaagagggacttttcagtgtcacctgtttcataatacagcagaatcagaatatctgtgatgtttccaaaaggaataaaagtagcacaaagaactgtccttcaccccctttgcagataccaagagcattctgaatcaatgtctccacacttttggtgcagttgctccaacaccttgttaacatgagcacagggaggagaggaagggaggggtcccaatactcttctgggtataacaaaaccacttgtgagatacactcctctccctatccctcttctgacctacattttttgccctggtttatggtgacaatttcctgaatgggatcgccttctttttctctcctccgttatcccaagaaaatacaaatacgattatattactcttctggttggtattcttcaaaagcagtccaatggccaacggagaaaaatccacatttcttagtatagcatatactaagtatggccagactctgggttttgactctcgctgcttgtctccattcaggcaacagcctggctcccaccttggctgcttggttaactttgcatctttcaaacccatctctggactcagagcatcccgaaagtttaccctcacctctccggatggggcggtcattccccagtctggtttcaacatcaccgtccatcatacaatcgccatcacagcattcaccaactcgtgcagtgaggctgttctcgtaatttcccagctattctgggacctccttcctctaatggaccagagctgtggagtttgtggaacgaacgaatgagggctgacgtcacggtagcagatcgcaaccaccactctgggtccagggtcagaaggggtagggaaaagggatctgggcagctctagcaggcaccactcacaggtcgagagcgtgaagcaccacaagagacctggcccaggatgcgtagggccatgggtccgcaccccgcccactctgcccacccccagctcaatcttggcactgcctgcgaggaccctgccttgctccacaccaccctaccctttgtgaaccctctcggcggccgccatcttgcttccagcgcttccgccggaagcccgcaccgtgccccaccccatccggcaccagattaaggaaagaaggggccgtccggaaacaaggacatctcctttagatctgttaaggtgacaccagatttttttttttttttttttgagacggagtctcgctctgtcgcccaggctggagtgcagtggcgcgatctcggctcactgctagctccgcctcccaggttcacgccattctcctgcctcagcctcccaagaagttgtaactacaggtgcccgccaccacgcccggctaattttttttgtatttttagtagagacggggtttcaccgtgttagccaggatggtctcgatctcctgaccttgtgatccgcccgcctcggcatcccaaagtgctgggattacaggcgttagccactgtgcccagccgaggtgacaccagatctaaaggagcctgccaagagggatgagcattctaaggactgcctggatggggcactaaggaagcaccaagcaagctccaggagggaaagcaggcaaggctggagccgcagggaaagtaggctgcaaagggatgtgatcttggcctttaggatgtcattttactgtcactttgaacatcaaagaaaccacaagcactgaagacttcagcaccatttgctatagtcacagacctcccattttccctgctaggggaaaacttggttgcagaatctggggaactggatccgctgactcgaatgcagcataaactgactgcaggaaataagaggggacaggacacaccccaaccgagttcaggaagggaaggacggggctcaactaaccaactgggatctgcagatctcaccgtatgtccttggggtgtgcgccaaccccactctgccccagattttcctgggccagacccatggtctgctctgaccacatcagatctctgttccctctaagttaaatggggctaatgtaacaatcatactgtaacagaacagtgtgggacaggatcatatttaacagttctgtgtatcttgctaatctttgtcagcttcaagtcaagaaagaataaactatcactggaaccaattcacatcctaaagttacttccagtgaaaaccggaattcatagagtaaaactgtggtcagagacagaggcagttttatggagattttttttctttattgggaaacgtaagacttgggtacatcaaataaaaccaatttctgggggaaaaaatcaaaacccacaataaaaaaaaagttaacactgtctgggccacagcagaacccaaagaacatattcgtataattgaaaaattctaggtgcttcataattgaccttttgatacaaaatgacctattaaatttgcaatttgtaatccttggtgttgaggtccataggacaagctaggaagtcttcaaaccttgagttgaattccataaggggttatttggcttttgaatcctgtaaagaaaagcaccaacacaaataaatgcataatcaaataatttagattcattaacatatagtggataaaggaaggtattctagaagagagtttctcaacctcagtgctattgacactttggacattctgttgggtctgtcctcctgtgtactgtacaacatttagcagcatctctggtctttaccactagatgacaaggctcctgaggcccttgacaagagggtcatgactatgccaagtcaaccctcccaacacaccagctctggtccttaccatgtgctttttccttagcttattttactgtctcttctttccctatctggagacacctacaaccatcaaccagtactagttttattattcactcaagctcctgcagacaaagtccacagtcctcatgataagaagtcacctgcaacacactccgtgtaactaactgtacttattgtattcccagagctaagcagtgagcatatatacaacctcaggtcaaaccacaaagacaatgctcataggaacaatgctcataggaacaaaaatgaaaatagccacacatacggtttttccttgtct

SEQ ID NO: 1879885 - DNA, 4001 bp, Homo sapiens; identical to SEQ ID NO: 1691

SEQ ID NO: 1879886 - DNA, 4001 bp, Homo sapiens; identical to SEQ ID NO: 1721

SEQ ID NO: 1879887 - DNA, 4001 bp, Homo sapiens
cctgccgcagaaagagcaggaacccaattttcaactgtttaaagtttactgcataaataaagctaaggattaaatgttattcaccatactgtatccatgctaaaaaggtcttaccttttaaaagctaaaaaaactaattcatagaattacaatcagacctactctcgtaagaggattccaaatttatttgtgtactttatcaacccaaagttgaactgtattcaagagatgttttctataaaaagcaactaatctctcaaaatccttcaataacctaattactcaactgggggaaaaggtgggcaagacaaaagagaatgtccttttgttaccatctctacacatacgttcaaatgatagaaaacactttgtgcggtctgtcaagtttttaagagtgaatatagacaaaaatggattgtgtattagatgctccggataaaatttttaaagaccactaaggctattattaatattctttaaaatagaaattaactttcggaggcctggaaggtattttttatactacataatttgcagggaagtggaaaaagcctacctaattggtgaaggaccaaaagcaatggccaaaaaaacccacaaaaatctaattagtcgttcatttaaccagggaaatgcatttatggcgattgagcatgattaatagtgcatacctctacctgcgaccctgggctgctccgagcctcgctgcaagactgagtcaatcctgctaacgaaacaagaactgagacaagagtgcagtgaggaggcgccaggtgagctccccagcacagccaagccagcaccgaccctgccgcagaagcccagggcccagataattctaaattagcccaatgcacaggtggctgagacctcttactcctgacttcctgctgggaaaatttccaggccttctgtacacctcttgaaatggcacctctccaccctcatccccccaccccacccgacacacacgcactgaccatttccctgcctggatcggatagtgagtaccaacaacacgaggccaatactgaagtcattacacgccctggccaggggtgagcgggagaagcaccaacaagttggcgctcagcagatccacgtcaaaaggaataattttaaagctgtaaactggaaaggcttctgttactctttcctcctctcccccatccctcttgcccaactccccccaggggtgggcaggaggttgggggaggagagagatcaatagtggcgggctctcccggccctaaaaatctaaaatggaaacgagagggcggccccagtccgacccctcccagacacactacaggccgcagccacccctccgccgaaccaccttcccccacccacaaatcttcagatttcgggggccgccttcgcccgtttcctccataccccctcttccgaacttacccccaaagccaaggcctacacacttcgtaccttaaagtagatctcgtccaccacctcgtggtaggtcttgagctcgtagagctgtactttgaagtaaggcgacgacaggatgttggtcaggatcatggggttgaggttcatggtcttctcgttgccccagagcgggagcacattgccctgcttgccggagaccgccggcttggtagcgccgccgccgccgcactgctgctgttgctgagccgcagctgcagccgcctggtgctgcggctgcgagttgcctgtcagcgcggggctgttgttagccatgttgcggcggaaggaaggagggagggaaggaggggggggagggggccaagctcgatctcgctcttcgggacaacggtctgggaccctactccatcgaacgtcgtcgggagaaggggccgcctcgctgtgccccagctgggcaagagagggcacccgacgccgacaaaatgaccccgggccaagagcagacagcgaaacccagaccgcgagaactccacgcagaaggcgagccggcagccagggagctcgatctcttccgccaactgcccctgggaacaagatggcgggcccggcggatatgacgccacgcaccccagcgttccaagctgagctggcggccaatcagagacgctcagttgggctggagcgtcctcttcctaggtccccgcgttctctgcacgctgaagtcgctgcagtgacctccgtacctgactcttaggggatttctcctgagaatttgggggccgggggagagggttgtaggcctaatccgttgttgttgtattttgactgggggcttgatttcttttgtcgggagctgagccaggaagggttcgcatggctgcggtgtgcttgctaatatcgtcactctgacttctgcagagtatccgagaggggtctcctgggatctcagttttaaggttctctggaaggtacaatggtcagggaccccactcctccaggagattctgatcaaaggtcacgtacttcgccagcctctagtgtccagccagaagtcttaaatttattcatccgtaagattgagataacatctggctgggctgttgtgagcattgaaagagctaatgtacttgtagtgcctagtagactgttccaggcatctggtaggcgccttttctttttctccctgctccagatctttggattctaggaatgtatccggagtgataaacattgggcgagatactgtatattgggagtgggtgtgtgaatgtgtggggagtttgaatgtggcaatcttgacttcagtggcgcatacacaggaggagaaaaggataagatggaaactttggggaaaatccacatctggatgaaaataaaccagaagaggagagagagagagcgaagaccagcagaaaagtatttaaaccaagagacagttgtttgacagaatacaaggaaatagaaaagataagtgaatggagtgattgattagtgtttggagctgtacggtacgaaagtggatatcctgtctggttcctttgttttaggttgcaagagaactagaaccctgagaggagaagcagttttcaccttcttactagcaaatcttgtttttctctatagtggtttttattaacttccaaaggaaaactgaagatcctaacccctgtgtcatgagttatcacgttaaaagtccatagaaaaaattttttttaacccagttctttttgtgtatatattttttgccttgataatactagtttattgagtttgccgagtgacacattgccaaatcttatgccctatttttaattcctcagatacatgatctttctgtatagtcttagacagtctttacccctagtctgtttggatgaagagcttggtagagaggttgagtttgatatctaagtgtcagcggcatcaaactcggagccaggtattatgataaagtgctttaacatattcagtgaatccctacaacaggctgaagatgttatttttatccccattttttagaaaactttattcagttataattgaagacctctacgctgcacatatataaagccgtaagtttggtttgatcagttttgacatatatgtatacccattaaaccactactacaataaacataatcttctgtcaatcccaaaagttttcttgtgccctttgtaatccatctctctttccaacctcataccgaagcaaccactttctgtcagtagagactagtttgcattttcttgaatcttaaataaatgaaatcattatccccacacagtgttctctttttttttgcctccttattgcatgtatcagcaggttgtgttttgttttaattactgattagtattcagttgtatggatttatcactattttgtttatctaatcattgatgggaacagcatttttatttgtaatagccccaaattagaaacaacacaaattgttgttgaaaatgctgtgaacatttgtgactagactgtctggattttttttttttttttttgagacagagtcccactctctggcccaggctggagagccctctttcagcaggaagtagccagatagacttgacatccctct

SEQ ID NO: 1879888 - DNA, 4001 bp, Homo sapiens; identical to SEQ ID NO: 1755

SEQ ID NO: 1879889 - DNA, 4001 bp, Homo sapiens
aacagtcagcatcactggactaagcagaaagcctctcaggacagagaggcttgcaaatgaaaaatgacaatacaggccgggcacggtggctcacacttgtaatcccagcactttgggaggtcaaggcaggcagatcataagaggcaggcagatcatgaggtcaggagtttgagaccagcctgaccaacagggtgaaatgccatttctactaaaaatacaaattagctgggcgtggtggtgcgcacctgtaatcccagctactcaggaggctgaggcaggagaactgcttgaacccaggaggcagaggttgcagtgggccaagatcgtgccactgcatccagcctgggcaacagagtgaggctccgtctcaaaaaaacaaaaaacaaaaaaaaattacaatacatcatgacattaaaagttgcaagtactcaagaaaatgttaagcattagaactaaagtttaaacgatgagtagttttcttagccaaaaaggaaggattccaaaggatctctaccataaagactttctttaatagacaaaccagctcttaacttctaattcaaatttgaagctaactgcctcaacaacttcctttttaaggatcagtgtaattcatttctaatgtgctttattattaaccaaaatatattcattttcatgacaaaaagtaataaaaaacaaaaaacttagattaacaaaattataagatataggtcaaaccacttaccatccatttaaaatcattatttcccctcagaaaattggggtatcgttttatattacaagaagccatgtgtgaaagcattttcaatttcttgatcattcatacttactttaaaaggttattcttacagactgacagttctagaaaaacttatggtgattacaaactgtttatatggtccaactttacaaatgaaaggaaacattttacacttgggttttgttagctacgttatagttttcaaaagcaaaagctaaaattttccagtaattatgataatagatccaacaatcccagtttcaaacatagtattttcctaccttcacgccaactgcaacctcagtgacgattctgcaaagaaaaaataagtagtttcaacctcctgttattcttctaatcactcactctttggctctaaaactttttaggatagtccatcattcataaatcttccagccactcacacacagatggggataaaaaataccacagatgatccgtgacttacctgtactgttaccaacctggttttctaaaagtaactttcaaatgtgagacaacttgtggtattttttaacaacacattcaatagccaaaaagaacaaaacccaaaacactatgccatttctacaatgccagtatactgagattaataatttaacgcttaaactctttagtagtctccacaggaaccaggaatcaggaaacatgaattctagtgcaagttttgacatcaatttccgtgttgatctggggggaatactgaacttctctggatttgtttcatctggaaaataatctttaggtaacatctaggatgatttgaattctgtgagactgtgttaacttttataaaatcttgtttttagtaccttttaaaacacaccaaactctaggcgcttaaccaaattgttgattcttcaaatactcactgattttaataaatgtacttgttaaatgatactatgtttacactcccaaaagagctgcatactgctgtatttttgaccttaagcgtgccccctttctaacattgagttaaattactgagtcttttcaggtgtgaagcatatgagcgagacatcggtccctaccatttcacagtcttgcctctcacctcactcagcattccgtcttgactcaggttcgcaaagatgcagcatggttctgggtttttatagtcgtttttccagaaactgaccaaagtagctaaagagatagccctttgttgactatctgctcttgtttctgccattgctgttggcctttgcccatgtgactgatgtcggcttcaaacacttcgttttttagatgatttaatttctgggcccttttgccaagccttgaatgttttcagtccccacaaaaaggcattttttcctccctcccgcccccactaccagactcaaatgaaaacaaaggagtatgacatctgccctcccccttcctcccgccgccgcacgccctccccccttccccagcggctcccactaggctttccccggagctcccgccaccggcatctctcccgaccacggagggccgggcgaggccggagaggttgctcatggctggggtccacatggggtgcctctctcctcttcccctagaggctcccccaatccaaaggcctgtctctgcccatcccactcgctctcacaggcaccgctaacccaagggtcgggtcccaaggtacggatcgaaatggctcctagagggggcagggacagaccggggagacgttatggggttcccaccccatcccccgccgccaagccggtgcccgctcccactccgggatcctcacccccgccatcgcccctatgcctccccagcctccaagcccgctttcttctcattttctcgaccaaagcccgccgggggaagcaaagggaggggtgtgtgcgatggggcgggggttgggtaacggcagcccagccctgggaggggccgcgggagggtttctccccggcccgggaccgggccgaaggacggtccaactcctctctcacacacaccttctcgccggcccgattacatacccgtccattgccgaaccggacaaagcttcgctcacaagaaccgagccacgcagccagcgagccacacaagcggcgagaaaatggcggctggggcccgacggaaattgccgaaggtgccgaggcgcacgggccaccgcgcggcagcggcggcggcggaaagagccgagcgcgccggcgcccggcagcgggaggcgagcggcagggcgctgggactagggggagtgggcgccgcagccgacgcctcctccgcgccttcgcgcgcctttctccctccgccctccgcctgccgtcctctggaacctggcgttctgctgcagaccgcggcgacctggtttcccctccttgtgggggcgtgggtgggacacctcccaacagctctccacactctctctgccctgactgcaggacgcccccaggcagcctccacttttcactccaagccaagtaccagcttggctaccgtcaacctatgcgggccaaggaaaaaacattggatagcttttctcctaagccatcttttatttgcagaccggctccagcctctaaaacaaaaatctttaccccactgaacgagaccacttggtaacaacagtactttctcaagcaagtagaactcctcagactgaaatacaggcttttgcttcaagacctgtagtaccaagccaagtggaggaaaatgtgattctcacttcagttggtgattagtgtgcgcctgtagaaaatattcacaatacgctaggtggaaatagacacaaatggagccatgtgttaaaatgctacaatagttggagtttaacatttggaggcatgaaagggaaagtggagatgggagtgggaacaactgagtcttcagattggttagagaaagtagaagcattaaaatgggctatgcaaattgactccctttgctatatcttacggtctcaatttttacttgatactatagtggacattttacttcaacgtgtttttatcagaggctcaacaaaattgggaaaggcacccgcttgaaaatttgctcagtgagtagcgactttgccagtacccatccttctcctgcacccttcacctccacccccaacacacacaaggacaaatgcacttctaattctgaaaaatgacaaatactccctgtgtccctccagttactctcaatactcactctgggtttttctgtgtctccttcaggcaaagctcttatcctttgctaattggaatttcatatactaaatgat

SEQ ID NO: 1879890 - DNA, 4001 bp, Homo sapiens; identical to SEQ ID NO: 1758

SEQ ID NO: 1879891 - DNA, 4001 bp, Homo sapiens; identical to SEQ ID NO: 1766

SEQ ID NO: 1879892 - DNA, 4001 bp, Homo sapiens; identical to SEQ ID NO: 1768

SEQ ID NO: 1879893 - DNA, 4001 bp, Homo sapiens
cactcacaggtccactctgtggcattgggccccactgcccgatggggcctggcagcagcactgagcgtcagctcatagggggggccctgagacaggtgaagggaggtgtgatgggagactccccgtctgaatactgcagtcagattggtgccacctaggaggtctgtgagcaccaagtggagccaggcagcccccttggagccgttccaggaggcttgcaaggcactggtgcccagggtatgcagtaccaggtgatctggagacacaggggctggaggaaggatggagagaaaatgtcaggctcaagaaaggcccctggagcaggatgctggcagggaccctggcactagggagcacagaagcccaggcacattggaacatggctggctatgaggctctggactttccaccattcccaccactcccagattggctgccacccggggccttgcccaagtgcccaccttacctgtccactgatggaggctggttgttgcttggaggttgccagcccaggtgttaacttccaaaatatactcaatacctggcaagaggttgccaaaattgtaggacagggtgcccaggggcatggagatattatgtgccaatgtctgggattctaggtggtagaggagaaggcagtagccatcctgcttcccgggggcatcaccccatgaggcctccaggctggatgggctcccagaatgtggagctgcagtccatggacagttgacggggctgcatcagcggaagacagagacaccaaggtcagtgccacaggggcatcaccgctctgcctgtagtgctcctaaataggtcactgtactagacatgatctacagagaagttgcgctccctgccagcactccagggcagccacctcctgccccaaccccaggcaacaaccccgccccttcagcctgcagccctcatacagtgcgagcagtgagggtgatggtgacattctgcccacagggtcgcagggcagtcacttccagctggtagcgaccccctgacaccagatcttggaacttaaagctggatgcattggtgtgggcctggagctgctgcccttcaggagagctgagggggctcagacatgtgaggcggagggcatgggtgaacctgcctggccccggggctgcccagctcagaaagaggctagtaggtctcccctggctggtgatgttcacgttcaggggtgggcctggggaaaaggaggtgctttcagaacccactaacagcctttctgccttaaagaagaatggaaggccaaaaaaaagaaaaagccagggtagagccagggtctggtgtggaaaaattggcctcacacccccgactcttcacccccagaactccctcccccgctgaagacacctacctgcactctccctgcctggactcccttccagggagaggcatgcttcctcctgcaggaagaaaggaggcagagagttggggaaatggacagaggcctctgggaaggctactggtggaaggtggaaggggattgtgactctcaggctgcagacaagcccacctcttcctgatgctgtagcaggacgagccgcagacaaaactcctcagacaccagattaaagaaggaagaggccgggtgcggtggctcacgcctgtaatcccagcactttgggtggtggggcagggccaggatccaagagaaggctctgttgccgtgtctgacagccccacacatggccaaggggcatctcccggaagcatgcccatggcgcatctgttctccaggcaggctggagcaatctgttctcgctcgctgcgccacgtgctggccctggtggaaagggagtggcctctcctcgcctaatgcagaccagctgtggggtcccgaggagcgctgggagatctggatgtgccctggagagcggggaccccacccgctggcctgctcccccatgcccaccttacctctgccagaaaaccccggaaccagagcagggcagcgaacaggattgggagcctcatcctgatagctgcagagtaaagttgggaggcagcaaggggaggagccagtcccctagcccaccttgccttgcttgctggcaggcaaggaaggcgggcatgggtgggaagggcagagtttcaagcacaagcaggcagcaggcagcaggcagcaaaagcaaggggctgcctcttagccccagagcctgacccccgctctctccagccttggcaaggctcttgaagggagagaggcggaggctggctccaggcccagaaggtggaaagggattgtgactctcaggctgcagacaagcccacctcttcctgatgctgtagcaggacgagccacagacaaaactcctcagacaccagattaaagaaggaagaggccgggcacagtggctcacgcctgtaatcccagcactttgggagcccgaggcgggcgggtcacgaggtcaggagaccgagaccatcctggctattatggtgaaaccccgtctctactaaaaatacaaaaattagccaggcatggtggtaggtgcctgtaatcccagctactagggaggctgaggcaggagaatggcgtgaacccgggaggcggagcttgcagtgagccgagatcgtgccaccgcactccagcctgggtgatagagtgagactctgtctcaaaacaaaaaaaaaagaaagaagaggtttattcagccgggagcgtcagccgacttgcgtcttaagagccgagctccctgaaaaagaaattcttggcctttttaaaggcttacaactctaaggggtccacgtgaaagggtcgtgataaattgagcaagcgtggggaacgtgactgggggctacatgtatcagctaacggaacagaaagttttgcagtgctttttcatacaatgtctggaattcacagataacacaagtagtttaggtcaggggttgatattattattattacttttttaactcctagggccgggtggtggtgctaaggttgtctggctacttaacttctgtttctttccaactttttgctttctctctttcctcctgtcttgtgaactaggcaaggtgagggggaggagggagggcagcagaagtagtagtggtctccttccttaatgcctcccctacctgtagcccactcccagccctcagctctccagggaggaaagtgtcctgtgctcttggggaagaccaagaggagaggtggctctgcaaatggacacatttgcagctggctgtcccactccttggctctggaggaggggcacagtgtctgttgactccatcaccgagtgcgagatagatagtgtttctgtgggggtgcgtgtggtcttggtgacaccatgtggatgtgtgttcctgtgtcctaggtggatggccagctgagtgtgtgtctccttttgtatatccatgtggtaccacgctcttgtggacagaagcacatactttggctgctgagtcacagcaattgtagatctagagcccacctggcccttgggcctcctctggtcccacctcatcactgccagatgaggaagctgataaccagagaggggaagagcccaagtgtctgaacagaaaagctgggcttgaacctgggacctcggactccatagaacagagatggcagaccctgctccaaacctcccaaattggggtcctctcagctgggaatcctctgaggagcaattcaagtacctgggacttttgcttgccttcccccacttcttttccccgaatcagcagcgtccatcctggttcccctgcccctcccaacccccacctggctttgggcactgctggaacccaggcaagcctgcctgaggcctggcctcaaagataatgaacttggggctttgctttactcctgactagagcccttgagtcaccccgagctgctcacccaggtgctcccacctacagacagctgaggatgaggagtgagaatggaagaaaaggctttgggccctgggagtgaagcccaggactcagaacaaactcaggtagtggggaga

SEQ ID NO: 1879894 - DNA, 4001 bp, Homo sapiens; identical to SEQ ID NO: 1779

SEQ ID NO: 1879895 - DNA, 4001 bp, Homo sapiens; identical to SEQ ID NO: 1786

SEQ ID NO: 1879896 - DNA, 4001 bp, Homo sapiens; identical to SEQ ID NO: 1794

SEQ ID NO: 1879897 - DNA, 4001 bp, Homo sapiens
tgtatcccagaacttaaagttaaaaaaaaaatagtaggattactaaaaaagcaggattactggcggttggcagaggccttttcttgagctcaggaatggatgatgccactgaaagagcagatgtggaaataaattctggaaatgtttcgcataccacttgtaatgctgtttttaagataattgcttgggtaaataaattccttatacattgactagtaaagagatactcaactttgtacatttgatgccatattcacttgctgtctaacttatgttaccatggcattaatttagtataaataaaaatgctctaggtctactcagtgctgagccttgaaatctcagcactcaacatctcttatccactaaagcacacactgttgtttacacgtggaagactgactatgcagccagtctagtaagcaagcaagcaagcaagcaagcagggtcctagatattaaaaatgaccattcctgtaaaccatcaagccacaaatcaacaagcttaatcacaaaagtttcttgagggaacaaagttgaagtaatatccattgagtcattgtggaactatctgtacttgtggttgattagccaggtaagctggtttttcctcagtttcctcacctgttaaacaagaggcagaatgatgttctctctaaaacacttcttgctttgaaatactattactctaaataagactttggagaaactcacaaaatacatccttgttaactctcaataagcccaaacaatattccaggaccccacaaaaccagaaaactaacaggaccccttgtagaccagtctctttgtgcaacgtagggagaaagggcgggggggactaaagaacctcccaaaaggtattaaaaatagcaacatgtaattatgaaaaatcttgttccacattaggtagccacattcaagaaaaactgttggagatctactatgtccaaggcacggtttaagttattactgttcaattttgaaattattattgttaacttgtcagtaatttcttaaacctaaactggtgaaactctccttgggtggacataaaagtaaagccatggccaaggagggagacagtctacaaataaaccaaaaataaaatacaagtgacatcattaaaggaaaaaagccaacacactgcacaaagatcaaagacaaaacagagaaacatgtttggttaatactgggctttgagtatttcatgtgcctgagaggcccgtccgtccatccacaccacacttcttcaccatgctgttgcaaaccaatgacaagttcagcttcagcgcggacagggcgcagggcgcagaccctgtgcatatcccagaatcccggacccactgccactccactctgggaaggaagaaggcgctcccccttgggtgactgtaagataaagcagcttcttcgatctctttgtccaataagaaagaaacgttggcccataaagaaagaaagaaacaaataaataggaaaggtgtgagaaggaagggaagctcctttcttttctgtttaaatttcccgcacccttttacctccccgccttctcaaacggtctttactttgagcagcagagacccggaccgctcaatacccggctatccctgggagggtacttggaaagtaggcgggacaggccggatgaataattcggtgtccgacttttcctgcctgcggcgcagtccctccccggcttcgttactcgagtgcacacgcggccgggctctcggccctcgattgcttcagcctatcaccctgggatgccgcctgccgctgccgccgccgccgccgccgccaccgccaccgccaccgccaccgccaccgccgtggctgccgggtttgtgggatccgccgcggagcaggagccagagctgtggccggagctgtggcctgagagtcagggggcgggcaggctcattccagaagtgggggccgaggacaggcgggctagaacccggggccaccgccccctacccctcctcaggctgagggaacgggcactcggagcttctgaggcggcggcggcgggagccggtcagagggggcggcccctggcggcgacgcccccaagcccagccctgcccggccccgctccatccccagccagagcctggtctgaccgcgagagacgccggcggggctgaagaaggcggctccgaggaggtgggagggcgagcctcccctcccgggttcttctgcgtcctctcccgggagggacccacacacacctgagcccggacccacccttggtcggggccacgctggatcctcctcccggcctgggtcccgcccgccgactgcaggtgggctgcatcgcccgagcctcgggcagtgggcgacggggaaggaggtgagaggtgtccgcgccggctgccgctcgggtccctgccctcgctgcgcgctctcctcctccccttaccgcaggcagggcgcggagccgcgcgccagcccgccccgaagccgccgcctcgtccccctcccgcctcggggcaccatggagctctctccgtcgtccggaggagccgcggaggcgctgtcctggccggagatgttcccggcgctggagtccgactcgccgctgcccccggaggacctggacgcggttgtcccagtcagtggagccgtcgccggtggcatgttggatcggatccttctggagtccgtgtgccagcaacagagctgggtccgggtgtacggtaaggaccacaggccgtcttagaggctggtgtttcctatttttgcttgggctgaaattcattccctaagtcacaggctcattcccagtcctcatccgtgctaggtcagtttcccacatccctttttgttctgggggtgcatttctgacaagtttcttcagactatcacttgggcagggatgtcactcagtatggtctttggacctcttcagacacctgcagtaagtttaatgcgggagttgggctatccaagacgtaattcttaggcgattacttcaagggaacagccaggcaatcaatcttcaagaaggtatgatggaaaaactccatgaaaccaagtgaatggattttcgtctctttttattgttgaatgaggcaagactggaaaccaagatattatgaaaaagcagaggataagctaatgaatgaaaaaaatgcaaactatgtatttggtgggagcaagactaatctataacctctgcctgaacctcactctctctaaaagcaaccacttattccaacgggtgtggattgtttcagattacactattgtttctgaatctcgttgtaaagtgactgggttgccactcagcaggttaaaagtgatgaacacactaaaactttccctttctgcattcctggtaaccacctctttaattaaaactgaatgatgagattctattagggtgagccttgtggcagcactaaaaccatgctggttttgaaaactcatagcttaaggatttatagcctggcattcaggactgagctgtggctttccaaaatattgaaacggcaagatgtttatcgcctagctcacgtgactgcagaagacattagtaacgtggctgagtataagatggcaaatttgaagcacctgggatcaaacacaatgttaagatgttatcctgcagtcttgtgcatctaagcctgtagtgatcaagtaccttatgtttttttctttcatctttctgaacagggtatatgcttactattcaagagtgaccaagacttaggtttttttctgtgtagttcagttgatttgaagacttaatgtccatcgcaaagatcatagaactaggagtccagagatctcagttcttgtctcagttctaccactaaatggctatgggatttggggcagatcgagtcacatttttggcttgtgattcctcatctgtaaagtgagtggattggattaaatcatcactagtgacccttttaatcataaaaatccaggaattcttcttataaccagttcttaaggatttgtgtaccactttgtattttgctggctgtt

SEQ ID NO: 1879898 - DNA, 4001 bp, Homo sapiens; identical to SEQ ID NO: 1811

SEQ ID NO: 1879899 - DNA, 4001 bp, Homo sapiens
cactccagcctgggcgacagagcgagactccgtctcaaaaaaaaaaaaaaaaaatggagagaaaaaacttaatcctaatgtcgtagtttaagcccctgaatccggccatgcctgaagccccaaacttttctattatgtgagtcaatgcattccatttgctgcttaacccagtctgattgatgtattccatgaaaaaaagagaatcttgaataatactggaaaatgcgaaccccgttccctgaaccatcatgtaggattgctcacttcttcctctgctttgtcagcactttgcaaatgtctcagtgcacaaatacaactgtatcacaatcactgtctcccccatctgtgagctcctcaggtggcagatctctatggaccttacccttgcaagcccaacacccacacagggcctaatacctcagggaaactaaattaagctaatctggttgtttgacttaggatctctcagggccattttttttgtgtgaacgtgcatcagacatctccaggcagggctatggaatgcagctgtttccaatctcatttgatgtgaaaactcaattttttggccaggtgcaatggctcacgcctataatcccagcactctgggaagccaaggcaggaggattgcttgagttcaggagtttgagaccagcctgggcaacattgtgaaaccttgtctctacaaaaagtagaaaaattagccaggcatggtggcatgtgcctgtagtcccaactactcaggaggctgagatgggaggatcacttgagcctggatggttgaggctatgattgtgccactgcactccaacctaggcaacagagcagacccatctcaaaacaaacaaaaaaacaccaaaaaaaaaaaaaaaaacaaccctcaatttttgcaaaagttgctgtgttagaggaatttagagaaaaaataattactatagtccttagagtgaccttgacaaaagaagcagcttgccatcaatattagttaaacgaatgaaagtgaagaacttagtttaagacaagatggggagcaggagcagcacggttggaggcagcaggaaccacagaagcagcaagcaggaagtaggaggggcgatctgctggacatacctcggtgactatgctgggctcaactgctggggagcccttggggtcataatccaaccctgatttcttagtttacatctaacagggattagatgtgctgtacacattttagtccatcttcctgccccatgatgcaggcgctgagtgcctttgatgttaagcttcactgtgcctcactttgcctctgaaaggtcttgagtgggtaatgagagctgattttcttctaactgcacattcctttttttttttttttttgagacggagtcttgctatgctgtccaggctggtctcagactcctggcctcaaccgatcctcccacctctgcctcctgagttagctgggactacgggtgcgcaccactgcgtgactgcgcgtccttgtaggtgggagatgagcccagttattttccctgctgtgtgaccctgcttccttctctgccggctaagggaagagacaccagctgccttccaagttgggctcaggagctttgtcatcatagttgttattggtggtaataatacctgccaatgtaagcctcggtcctatcactgaaactcgctcaacagcttagaccccggctcttccctttgcgtaatagttgtaatcatgtcccatggtctcctaaggcgtcggagacaagcaagactgcgtggaagggtttttacacgaaaaagaaagcattaaacatgtggattgtatgacaacggtagatagggcatagggtgaagaggagtaagaggaggagggagagcgggaggagggagaagagcacgagtggggaggagaggaggggaggggatgggaggggaggggaaggagtgggtaaggggaagagggttgtacccgccagggcgggacccagcctgtgccgtcccacaccttgtgctagctccagctcagctacctgcggccgcctctcctcgggcaatgaggcgccgggaagcccacagcatctgataatatccgggccgccggttgccgggaggtgaaccgaggtaaactcgccgcgcgcggggcgcagtgtacatagtaaccagccctgagtaaacgttcgtcatattcctatgagctgctccggggactgtcctacggggctagcaggaaaaggagatcggctctctccgctcccggtggaaaacgagaaggtcgccagaggtcctgttttcggggtgatctaaagcccccgccccagcgctacagcccaagccccccacaggctggggaccaggaacccggaggagcgggaggagggcgcgcgcggcgagacacccccaccccggcccccgcgcgcccccgccccggtccccgcccgggtccccgccttgtcctgggctctggcgcctgcgccgccgtgcgcgcgccctgccagaacaggaggggacgaggcgggcgcgcggcgccggcagcctagctcagccgggacaccgccctagtcccagcccagggggccgctctcgccggcgtcgagggcgtggcggcgaggctgctgctgcaggcggctcccggctctgccttcggccccgcccgccgcccaccaggctcccagaggccccgcagctcgcgccgtccggctccccgcagccccgtcgggcagcccgggcccgtccgctgccctcccggctcccgtcctgcggcggcggggcgtgcaggtgaggccccacggcgcccggcctctccagcaggtttgcacccagcgcggggcggggcggggcggggcgggtggggggggtggtgcatgaaaagttaaaaaaaaaaaaaaaaaaaaaaaagccgccccgagaagtccgggaggggtgggcactccgagccgcgggaccgggagatgctaccgcgcgcgacctcgcctcccgcgacctcgcctcccgccgcacccttctcgcgcgcggggtctagtctggcagcctcgagggtggtgtcccggaaaacaaaacaaaaatgttttgtcttctccaccaacgattttctcccaccaagtgtgtttgaccttttgaaaagccgacaggcccagcctgcctgtgaaggcaggagcggtgtaggggcgcctggaaggtggaagccccctgtctttctcccttgccccgcttcccccacggtgcgtggatcaccatcgcattagtgactccctaacttcttgaaacttgtctgtctgcttctgtccgccgcctggacaggtagggcaggagtgatctgttccaggttgattcttctagcttccgtgcaaaatctgatcatctcctttagagattaggattctagtgtaggaagcaatccagatccgtgtttcagatacaaacaaggattatttaaagtgatgttttcctgtagtgctgaaagccaaaaatattcgcttccacttgttggaagccaccaagtacaccacatttatttgaacttttcatagaagtctctgatgtactatttggcaaaagaagcaattgatttatctgtagctgtgattacatacgatgtaaagtaatttgttttaagactatttcattggctttggttcaatatcttaaactctgtaaacacataattcaggagccagatatgcatcacacaaatgtgttctttttggtggggatttaaattgatctagaaatgggctttccatccaggaagactgtgaaaagcttgaaaactgagtctcttctttagccaggtcatcagctttacattttactgcattggcaagccttgccttttcttttctcttctcttctcttttcttctttttgagacaaggcctcgctctgtcatccagctgaagtgcagtggtgcaaacacagctcactgcagcctcaacttcccaggatcaagcgatcctcccacctctcagcgtcctgagtagctgggactacagatgccggctaattttttgtagagattgggt

SEQ ID NO: 1879900 - DNA, 4001 bp, Homo sapiens; identical to SEQ ID NO: 1820

SEQ ID NO: 1879901 - DNA, 4001 bp, Homo sapiens; identical to SEQ ID NO: 1847

SEQ ID NO: 1879902 - DNA, 4001 bp, Homo sapiens; identical to SEQ ID NO: 1852

SEQ ID NO: 1879903 - DNA, 4001 bp, Homo sapiens
cagcccggggcaaaacagggccaccccccgacccgctacaccccacgccctcttgcccccccggccgggtcttggtcgggacaagcgaccgtggtgggggcgttgtgagagaaaggccccgcgcggctgggccggctgttcgccttcggccagccctgacggctctgggtgggtggggcaagagggggcctcgcaggagcccctgtgcggcgagggatccaaaacgctgcctccgcgacagggcggaggaccggagggcgtcccaggatcgtgggccctgggccctgacgcctcggagcactccctgctccgagcgggcccgatgtggtggaagctcgggagcgcgggagccgggggaaggccgcgggccagcggctcgggggtccccgatccgagccccgcggccccgggctggcggtgtcggctgcaatccggcgggcacggccgggccgggctgggctcttggggcagccaggcgcctccttcagcgtctacggccataccaccctgaacgcgcccgatctcgtctgatctcggaagctaagcagggtcgggcctggttagtacttggatgggagaccgcctgggaataccgggtgctgtaggctttttctttggctttttgctgtttctttccttttcttccagacggagtctcgccctgtcgcccaggctggagtgcagtggcgccatctcggctcactgcaagctccgcctcccgggttcacgccattccccggcctcagcctcccgagtagctgggcctacaggcgcccgccaccacgcccggctactttgttctatttttcctagagacgggctttcaccctgttagccgggatggtctggagctcctgacctcgtgatccacccgcctcggcctcccagagtgctgggattacaggcgcgagccaccgcgcccgcccggcctgctgtaggcttttgtggcttccccgctgcctcccttccccccacagtcgccatgcttcccaacctcccctgactctgctccccctttaccgcccacctacacccccgccgcagccgcagccggggtcctcctgctgggggtccgcccctactgcacgccggcccggcagcagcatcccaccgcttccgcctcgccgccgccccgccaggagcccggctccagcctgggagggcagggggccggaccccaaaggcgcagccgctgggttccctgccgttcgcggtgccttcccgctcccggaacgcccaggcgattcaattcacccatcgggcgccgtcgtcgcacccttccaaaccgggggaaggggcgggcaggggcagcgggtgccacagacgccagccaagacgtcggctccggaacgcatgggctgctttacccgggggaaggacattgcttcgccagccaccgggaaaacaggccctgtgcacccgggattcccaatgccccccgcttcgtgtcgacgactccagtcccgaggactcgccagagacccaggcctccgggcccgcccggtgccacggctcccgccaaacgggcgggcgcgctctgcaaatctcggggcccgccgcaaggcacccagagcacagggaggtgccaagaaaggcaggagcctacgaaacccacctccaaagcaagcaattcatccaagaaaacgcccgcctcagcgctccgttggtcctctcgcacggaccgcctggcccccgtgttctgggcgcagcccaagccccctccaccctatcccggcctgctcaagagggcgctgcctaacggagccgggcgcttcctctctaaggctctatcgctctcgctctctagctccctccgcctctctcttctgggtttccccctggacctcgcgctacttttgtcgttttccctctgtctctctgtctctctctctctctttctctgtgcctctctctttctcagcctctctgtctgtctccttccctctcgccctcccctgtctctctcgatcgctgtctctctccctccctcggtttctatctctccatccatctcgtccttgctctccttcaagccgcgtgtgtgtgtgcgtgcgtgtgcgcgtgcgtgtgtgcgtgtgtgtctgtgtgtgtgtgtgtgtccgcgcgcgcgggtgcgagcgcgcccgggtgtgtctgtgtgtgggggagtggatttgctcctggtggcggtggggtgtgtctgggtttctctcaggccctctcacccgagatcaggccgccgcctctagtgccagcccggggcaaaacagggccaccccccgacccgctacaccccacgccctcttgcccccccggccgggtcttggtcgggacaagcgaccgtggtgggggcgttgtgagagaaaggccccgcgcggctgggccggctgttcgccttcggccagccctgacggctctgggtgggtggggcaagagggggcctcgcaggagcccctgtgcggcgagggatccaaaacgctgcctccgcgacagggcggaggaccggagggcgtcccaggatcgtgggccctgggccctgacgcctcggagcactccctgctccgagcgggcccgatgtggtggaagctcgggagcgcgggagccgggggaaggccgcgggccagcggctcgggggtccccgatccgagccccgcggccccgggctggcggtgtcggctgcaatccggcgggcacggccgggccgggccgggctcttggggcagccaggcgcctccttcagcgtctacggccataccaccctgaacgcgcccgatctcgtctgatctcggaagctaagcagggtcgggcctggttagtacttggatgggagaccgcctgggaataccgggtgctgtaggctttttctttggctttttgctgtttctttccttttcttccagacggagtctcgccctgtcgcccaggctggagtgcagtggcgccatctcggctcactgcaagctccgcctcccaggttcacgccattccccggcctcagcctcccgagtagctgggcctacaggcgcccgccaccacgcccggctactttgttctatttttcctagagacgggctttcaccctgttagccgggatggtctggagctcctgacctcgtgatccacccgcctcggcctcccagagtgctgggattacaggcgcgagccaccgcgcccgcccggcctgctgtaggcttttgtggcttccccgctgcctcccttccccccacagtcgccatgctacccaacctcccctgactctgctccccctttaccgcccacctacacccccgccgcagccgcagccggggtcctcctgctgggggtccgcccctactgcacgccggccgggcagcagcatcccaccgcttccgcctcgccgccgccccgccaggagcccggctccagcctgggagggcagggggccggaccccaaaggcgcagccgctgggttccctgccgttcgcggtgccttcccgctcccggaacgcccaggcgattcaattcacccatcgggcgccgtcgtcgcacccttccaaaccgggggaaggggcgggcaggggcagcgggtgccacagacgccagccaagacgtcggctccggaacgcatgggctgctttacccgggggaaggacattgcttcgccagccaccgggaaaacaggccctgtgcacccgggattcccaatgccccccgcttcgtgtcgacgactccagtcccgaggactcgccagagacccaggcctccgggcccgcccggtgccacggctcccgccaaacgggcgggcgcgctctgcaaatctcggggcccgccgcaaggcacccagagcacagggaggtgccaagaaaggcaggagcctacgaaacccacctccaaagcaagcaattcatccaagaaaacgcccgcctcagcgctccgttggtcctctcgcacggaccgcctggaccccgtgttctgggcgcagcccaagccccctccaccctatcccggcctgctcaagagggcgctgcctaacggagccgggc

SEQ ID NO: 1879904 - DNA, 4001 bp, Homo sapiens
ctccgccctgtcgcggaggcagcgttttggatccctcgccgcacaggggctcctgcgaggccccctcttgccccacccacccagagccgtcagggctggccgaaggcgaacagccggcccagccgcgcggggcctttctctcacaacgcccccaccacggtcgcttgtcccgaccaagacccggccgggggggcaagagggcgtggggtgtagcgggtcggggggtggccctgttttgccccgggctggcactagaggcggcggcctgatctcgggtgagagggcctgagagaaacccagacacaccccaccgccaccaggagcaaatccactcccccacacacagacacacccgggcgcgctcgcacgcgcgcgcgcggactcacacacacacacacagacacacagacacacacgcacacacgcacgcgcacacgcacgcacacacacacgcggcttgaaggagagcaaggacgagatggatggagagatagaaaccgagggagggagagagacagcgatcgagagagacaggggagggcgagagggaaggagacagacagagaggctgagaaagagagaggcacagagaaagagagagagagagacagagagacagagggaaaacgacaaaagtagcgcgaggtccagggggaaacccagaagagagaggcggagggagctagagagcgagagcgatagagccttagagaggaagcgcccggctccgttaggcagcgccctcttgagcaggccgggatagggtggagggggcttgggctgcgcccagaacacgggggccaggcggtccgtgcgagaggaccaacggagcgctgaggcgggcgttttcttggatgaattgcttgctttggaggtgggtttcgtaggctcctgcctttcttggcacctccctgtgctctgggtgccttgcggcgggccccgagatttgcagagcgcgcccgcccgtttggcgggagccgtggcaccgggcgggcccggaggcctgggtctctggcgagtcctcgggactggagtcgtcgacacgaagcggggggcattgggaatcccgggtgcacagggcctgttttcccggtggctggcgaagcaatgtccttcccccgggtaaagcagcccatgcgttccggagccgacgtcttggctggcgtctgtggcacccgctgcccctgcccgccccttcccccggtttggaagggtgcgacgacggcgcccgatgggtgaattgaatcgcctgggcgttccgggagcgggaaggcaccgcgaacggcagggaacccagcggctgcgcctttggggtccggccccctgccctcccaggctggagccgggctcctggcggggcggcggcgaggcggaagcggtgggatgctgctgcccggccggcgtgcagtaggggcggacccccagcaggaggaccccggctgcggctgcggcgggggtgtaggtgggcggtaaagggggagcagagtcaggggaggttgggaagcatggcgactgtggggggaagggaggcagcggggaagccacaaaagcctacagcaggccgggcgggcgcggtggctcgcgcctgtaatcccagcactctgggaggccgaggcgggtggatcacgaggtcaggagctccagaccatcccggctaacagggtgaaagcccgtctctaggaaaaatagaacaaagtagccgggcgtggtggcgggcgcctgtaggcccagctactcgggaggctgaggccggggaatggcgtgaacccgggaggcggagcttgcagtgagccgagatggcgccactgcactccagcctgggcgacagggcgagactccgtctggaagaaaaggaaagaaacagcaaaaagccaaagaaaaagcctacagcacccggtattcccaggcggtctcccatccaagtactaaccaggcccgaccctgcttagcttccgagatcagacgagatcgggcgcgttcagggtggtatggccgtagacgctgaaggaggcgcctggctgccccaagagcccagcccggcccggccgtgcccgccggattgcagccgacaccgccagcccggggccgcggggctcggatcggggacccccgagccgctggcccgcggccttcccccggctcccgcgctcccgagcttccaccacatcgggcccgctcggagcagggagtgctccgaggcgtcagggcccagggcccacgatcctgggacgccctccggtcctccgccctgtcgcggaggcagcgttttggatccctcgccgcacaggggctcctgcgaggccccctcttgccccacccacccagagccgtcagggctggccgaaggcgaacagccggcccagccgcgcggggcctttctctcacaacgcccccaccacggtcgcttgtcccgaccaagacccggccgggggggcaagagggcgtggggtgtagcgggtcggggggtggccctgttttgccccgggctggcactagaggcggcggcctgatctcgggtgagagggcctgagagaaacccagacacaccccaccgccaccaggagcaaatccactcccccacacacagacacacccgggcgcgctcgcacgcgcgcgcgcggactcacacacacacacacagacacacagacacacacgcacacacgcacgcgcacacgcacgcacacacacacgcggcttgaaggagagcaaggacgagatggatggagagatagaaaccgagggagggagagagacagcgatcgagagagacaggggagggcgagagggaaggagacagacagagaggctgagaaagagagaggcacagagaaagagagagagagagacagagagacagagggaaaacgacaaaagtagcgcgaggtccagggggaaacccagaagagagaggcggagggagctagagagcgagagcgatagagccttagagaggaagcgcccggctccgttaggcagcgccctcttgagcaggccgggatagggtggagggggcttgggctgcgcccagaacacggggtccaggcggtccgtgcgagaggaccaacggagcgctgaggcgggcgttttcttggatgaattgcttgctttggaggtgggtttcgtaggctcctgcctttcttggcacctccctgtgctctgggtgccttgcggcgggccccgagatttgcagagcgcgcccgcccgtttggcgggagccgtggcaccgggcgggcccggaggcctgggtctctggcgagtcctcgggactggagtcgtcgacacgaagcggggggcattgggaatcccgggtgcacagggcctgttttcccggtggctggcgaagcaatgtccttcccccgggtaaagcagcccatgcgttccggagccgacgtcttggctggcgtctgtggcacccgctgcccctgcccgccccttcccccggtttggaagggtgcgacgacggcgcccgatgggtgaattgaatcgcctgggcgttccgggagcgggaaggcaccgcaaacggcagggaacccagcggctgcgcctttggggtccggccccctgccctcccaggctggagccgggctcctggcggggcggcggcgaggcggaagcggtgggatgctgctgcccggccggcgtgcagtaggggcggacccccagcaggaggaccccggctgcggctgcggcgggggtgtaggtgggcggtaaagggggagcagagtcaggggaggttgggaagcatggcgactgtggggggaagggaggcagcggggaagccacaaaagcctacagcaggccgggcgggcgcggtggctcgcgcctgtaatcccagcactctgggaggccgaggcgggtggatcacgaggtcaggagctccagaccatcccggctaacagggtgaaagcccgtctctaggaaaaatagaacaaagtagccgggcgtggtggcgggcgcctgtaggcccagctactcgggaggctgaggccggggaatgg

SEQ ID NO: 1879905 - DNA, 4001 bp, Homo sapiens
ctccgccctgtcgcggaggcagcgttttggatccctcgccgcacaggggctcctgcgaggccccctcttgccccacccacccagagccgtcagggctggccgaaggcgaacagccggcccagccgcgcggggcctttctctcacaacgcccccaccacggtcgcttgtcccgaccaagacccggccgggggggcaagagggcgtggggtgtagcgggtcggggggtggccctgttttgccccgggctggcactagaggcggcggcctgatctcgggtgagagggcctgagagaaacccagacacaccccaccgccaccaggagcaaatccactcccccacacacagacacacccgggcgcgctcgcacgcgcgcgcgcggactcacacacacacacacagacacacagacacacacgcacacacgcacgcgcacacgcacgcacacacacacgcggcttgaaggagagcaaggacgagatggatggagagatagaaaccgagggagggagagagacagcgatcgagagagacaggggagggcgagagggaaggagacagacagagaggctgagaaagagagaggcacagagaaagagagagagagagacagagagacagagggaaaacgacaaaagtagcgcgaggtccagggggaaacccagaagagagaggcggagggagctagagagcgagagcgatagagccttagagaggaagcgcccggctccgttaggcagcgccctcttgagcaggccgggatagggtggagggggcttgggctgcgcccagaacacggggtccaggcggtccgtgcgagaggaccaacggagcgctgaggcgggcgttttcttggatgaattgcttgctttggaggtgggtttcgtaggctcctgcctttcttggcacctccctgtgctctgggtgccttgcggcgggccccgagatttgcagagcgcgcccgcccgtttggcgggagccgtggcaccgggcgggcccggaggcctgggtctctggcgagtcctcgggactggagtcgtcgacacgaagcggggggcattgggaatcccgggtgcacagggcctgttttcccggtggctggcgaagcaatgtccttcccccgggtaaagcagcccatgcgttccggagccgacgtcttggctggcgtctgtggcacccgctgcccctgcccgccccttcccccggtttggaagggtgcgacgacggcgcccgatgggtgaattgaatcgcctgggcgttccgggagcgggaaggcaccgcaaacggcagggaacccagcggctgcgcctttggggtccggccccctgccctcccaggctggagccgggctcctggcggggcggcggcgaggcggaagcggtgggatgctgctgcccggccggcgtgcagtaggggcggacccccagcaggaggaccccggctgcggctgcggcgggggtgtaggtgggcggtaaagggggagcagagtcaggggaggttgggaagcatggcgactgtggggggaagggaggcagcggggaagccacaaaagcctacagcaggccgggcgggcgcggtggctcgcgcctgtaatcccagcactctgggaggccgaggcgggtggatcacgaggtcaggagctccagaccatcccggctaacagggtgaaagcccgtctctaggaaaaatagaacaaagtagccgggcgtggtggcgggcgcctgtaggcccagctactcgggaggctgaggccggggaatggcgtgaacccgggaggcggagcttgcagtgagccgagatggcgccactgcactccagcctgggcgacagggcgagactccgtctggaagaaaaggaaagaaacagcaaaaagccaaagaaaaagcctacagcacccggtattcccaggcggtctcccatccaagtactaaccaggcccgaccctgcttagcttccgagatcagacgagatcgggcgcgttcagggtggtatggccgtagacgctgaaggaggcgcctggctgccccaagagcccagcccggcccggccgtgcccgccggattgcagccgacaccgccagcccggggccgcggggctcggatcggggacccccgagccgctggcccgcggccttcccccggctcccgcgctcccgagcttccaccacatcgggcccgctcggagcagggagtgctccgaggcgtcagggcccagggcccacgatcctgggacgccctccggtcctccgccctgtcgcggaggcagcgttttggatccctcgccgcacaggggctcctgcgaggccccctcttgccccacccacccagagccgtcagggctggccgaaggcgaacagccggcccagccgcgcggggcctttctctcacaacgcccccaccacggtcgcttgtcccgaccaagacccggccgggggggcaagagggcgtggggtgtagcgggtcggggggtggccctgttttgccccgggctggcactagaggcggcggcctgatctcgggtgagagggcctgagagaaacccagacacaccccaccgccaccaggagcaaatccactcccccacacacagacacacccgggcgcgctcgcacgcgcgcgcgcggactcacacacacacacacagacacacagacacacacgcacacacgcacgcgcacacgcacgcacacacacacgcggcttgaaggagagcaaggacgagatggatggagagatagaaaccgagggagggagagagacagcgatcgagagagacaggggagggcgagagggaaggagacagacagagaggctgagaaagagagaggcacagagaaagagagagagagagacagagagacagagggaaaacgacaaaagtagcgcgaggtccagggggaaacccagaagagagaggcggagggagctagagagcgagagcgatagagccttagagaggaagcgcccggctccgttaggcagcgccctcttgagcaggccgggatagggtggagggggcttgggctgcgcccagaacacgggggccaggcggtccgtgcgagaggaccaacggagcgctgaggcgggcgttttcttggatgaattgcttgctttggaggtgggtttcgtaggctcctgcctttcttggcacctccctgtgctctgggtgccttgcggcgggccccgagatttgcagagcgcgcccgcccgtttggcgggagccgtggcaccgggcgggcccggaggcctgggtctctggcgagtcctcgggactggagtcgtcgacacgaagcggggggcattgggaatcccgggtgcacagggcctgttttcccggtggctggcgaagcaatgtccttcccccgggtaaagcagcccatgcgttccggagccgacgtcttggctggcgtctgtggcacccgctgcccctgcccgccccttcccccggtttggaagggtgcgacgacggcgcccgatgggtgaattgaatcgcctgggcgttccgggagcgggaaggcaccgcgaacggcagggaacccagcggctgcgcctttggggtccggccccctgccctcccaggctggagccgggctcctggcggggcggcggcgaggcggaagcggtgggatgctgctgcccggccggcgtgcagtaggggcggacccccagcaggaggaccccggctgcggctgcggcgggggtgtaggtgggcggtaaagggggagcagagtcaggggaggttgggtagcatggcgactgtggggggaagggaggcagcggggaagccacaaaagcctacagcaggccgggcgggcgcggtggctcgcgcctgtaatcccagcactctgggaggccgaggcgggtggatcacgaggtcaggagctccagaccatcccggctaacagggtgaaagcccgtctctaggaaaaatagaacaaagtagccgggcgtggtggcgggcgcctgtaggcccagctactcgggaggctgaggccggggaatgg

SEQ ID NO: 1879906 - DNA, 4001 bp, Homo sapiens
ctccgccctgtcgcggaggcagcgttttggatccctcgccgcacaggggctcctgcgaggccccctcttgccccacccacccagagccgtcagggctggccgaaggcgaacagccggcccagccgcgcggggcctttctctcacaacgcccccaccacggtcgcttgtcccgaccaagacccggccgggggggcaagagggcgtggggtgtagcgggtcggggggtggccctgttttgccccgggctggcactagaggcggcggcctgatctcgggtgagagggcctgagagaaacccagacacaccccaccgccaccaggagcaaatccactcccccacacacagacacacccgggcgcgctcgcacgcgcgcgcgcggactcacacacacacacacagacacacagacacacacgcacacacgcacgcgcacacgcacgcacacacacacgcggcttgaaggagagcaaggacgagatggatggagagatagaaaccgagggagggagagagacagcgatcgagagagacaggggagggcgagagggaaggagacagacagagaggctgagaaagagagaggcacagagaaagagagagagagagacagagagacagagggaaaacgacaaaagtagcgcgaggtccagggggaaacccagaagagagaggcggagggagctagagagcgagagcgatagagccttagagaggaagcgcccggctccgttaggcagcgccctcttgagcaggccgggatagggtggagggggcttgggctgcgcccagaacacgggggccaggcggtccgtgcgagaggaccaacggagcgctgaggcgggcgttttcttggatgaattgcttgctttggaggtgggtttcgtaggctcctgcctttcttggcacctccctgtgctctgggtgccttgcggcgggccccgagatttgcagagcgcgcccgcccgtttggcgggagccgtggcaccgggcgggcccggaggcctgggtctctggcgagtcctcgggactggagtcgtcgacacgaagcggggggcattgggaatcccgggtgcacagggcctgttttcccggtggctggcgaagcaatgtccttcccccgggtaaagcagcccatgcgttccggagccgacgtcttggctggcgtctgtggcacccgctgcccctgcccgccccttcccccggtttggaagggtgcgacgacggcgcccgatgggtgaattgaatcgcctgggcgttccgggagcgggaaggcaccgcgaacggcagggaacccagcggctgcgcctttggggtccggccccctgccctcccaggctggagccgggctcctggcggggcggcggcgaggcggaagcggtgggatgctgctgcccggccggcgtgcagtaggggcggacccccagcaggaggaccccggctgcggctgcggcgggggtgtaggtgggcggtaaagggggagcagagtcaggggaggttgggtagcatggcgactgtggggggaagggaggcagcggggaagccacaaaagcctacagcaggccgggcgggcgcggtggctcgcgcctgtaatcccagcactctgggaggccgaggcgggtggatcacgaggtcaggagctccagaccatcccggctaacagggtgaaagcccgtctctaggaaaaatagaacaaagtagccgggcgtggtggcgggcgcctgtaggcccagctactcgggaggctgaggccggggaatggcgtgaacccgggaggcggagcttgcagtgagccgagatggcgccactgcactccagcctgggcgacagggcgagactccgtctggaagaaaaggaaagaaacagcaaaaagccaaagaaaaagcctacagcacccggtattcccaggcggtctcccatccaagtactaaccaggcccgaccctgcttagcttccgagatcagacgagatcgggcgcgttcagggtggtatggccgtagacgctgaaggaggcgcctggctgccccaagagcccagcccggcccggccgtgcccgccggattgcagccgacaccgccagcccggggccgcggggctcggatcggggacccccgagccgctggcccgcggccttcccccggctcccgcgctcccgagcttccaccacatcgggcccgctcggagcagggagtgctccgaggcgtcagggcccagggcccacgatcctgggacgccctccggtcctccgccctgtcgcggaggcagcgttttggatccctcgccgcacaggggctcctgcgaggccccctcttgccccacccacccagagccgtcagggctggccgaaggcgaacagccggcccagccgcgcggggcctttctctcacaacgcccccaccacggtcgcttgtcccgaccaagacccggccgggggggcaagagggcgtggggtgtagcgggtcggggggtggccctgttttgccccgggctggcactagaggcggcggcctgatctcgggtgagagggcctgagagaaacccagacacaccccaccgccaccaggagcaaatccactcccccacacacagacacacccgggcgcgctcgcacgcgcgcgcgcggactcacacacacacacacagacacacagacacacacgcacacacgcacgcgcacacgcacgcacacacacacgcggcttgaaggagagcaaggacgagatggatggagagatagaaaccgagggagggagagagacagcgatcgagagagacaggggagggcgagagggaaggagacagacagagaggctgagaaagagagaggcacagagaaagagagagagagagacagagagacagagggaaaacgacaaaagtagcgcgaggtccagggggaaacccagaagagagaggcggagggagctagagagcgagagcgatagagccttagagaggaagcgcccggctccgttaggcagcgccctcttgagcaggccgggatagggtggagggggcttgggctgcgcccagaacacggggtccaggcggtccgtgcgagaggaccaacggagcgctgaggcgggcgttttcttggatgaattgcttgctttggaggtgggtttcgtaggctcctgcctttcttggcacctccctgtgctctgggtgccttgcggcgggccccgagatttgcagagcgcgcccgcccgtttggcgggagccgtggcaccgggcgggcccggaggcctgggtctctggcgagtcctcgggactggagtcgtcgacacgaagcggggggcattgggaatcccgggtgcacagggcctgttttcccggtggctggcgaagcaatgtccttcccccgggtaaagcagcccatgcgttccggagccgacgtcttggctggcgtctgtggcacccgctgcccctgcccgccccttcccccggtttggaagggtgcgacgacggcgcccgatgggtgaattgaatcgcctgggcgttccgggagcgggaaggcaccgcgaacggcagggaacccagcggctgcgcctttggggtccggccccctgccctcccaggctggagccgggctcctggcggggcggcggcgaggcggaagcggtgggatgctgctgccgggccggcgtgcagtaggggcggacccccagcaggaggaccccggctgcggctgcggcgggggtgtaggtgggcggtaaagggggagcagagtcaggggaggttgggaagcatggcgactgtggggggaagggaggcagcggggaagccacaaaagcctacagcaggccgggcgggcgcggtggctcgcgcctgtaatcccagcactctgggaggccgaggcgggtggatcacgaggtcaggagctccagaccatcccggctaacagggtgaaagcccgtctctaggaaaaatagaacaaagtagccgggcgtggtggcgggcgcctgtaggcccagctactcgggaggctgaggccggggaatgg

SEQ ID NO: 1879907 - DNA, 4001 bp, Homo sapiens
ctccgccctgtcgcggaggcagcgttttggatccctcgccgcacaggggctcctgcgaggccccctcttgccccacccacccagagccgtcagggctggccgaaggcgaacagccggcccagccgcgcggggcctttctctcacaacgcccccaccacggtcgcttgtcccgaccaagacccggccgggggggcaagagggcgtggggtgtagcgggtcggggggtggccctgttttgccccgggctggcactagaggcggcggcctgatctcgggtgagagggcctgagagaaacccagacacaccccaccgccaccaggagcaaatccactcccccacacacagacacacccgggcgcgctcgcacgcgcgcgcgcggactcacacacacacacacagacacacagacacacacgcacacacgcacgcgcacacgcacgcacacacacacgcggcttgaaggagagcaaggacgagatggatggagagatagaaaccgagggagggagagagacagcgatcgagagagacaggggagggcgagagggaaggagacagacagagaggctgagaaagagagaggcacagagaaagagagagagagagacagagagacagagggaaaacgacaaaagtagcgcgaggtccagggggaaacccagaagagagaggcggagggagctagagagcgagagcgatagagccttagagaggaagcgcccggctccgttaggcagcgccctcttgagcaggccgggatagggtggagggggcttgggctgcgcccagaacacggggtccaggcggtccgtgcgagaggaccaacggagcgctgaggcgggcgttttcttggatgaattgcttgctttggaggtgggtttcgtaggctcctgcctttcttggcacctccctgtgctctgggtgccttgcggcgggccccgagatttgcagagcgcgcccgcccgtttggcgggagccgtggcaccgggcgggcccggaggcctgggtctctggcgagtcctcgggactggagtcgtcgacacgaagcggggggcattgggaatcccgggtgcacagggcctgttttcccggtggctggcgaagcaatgtccttcccccgggtaaagcagcccatgcgttccggagccgacgtcttggctggcgtctgtggcacccgctgcccctgcccgccccttcccccggtttggaagggtgcgacgacggcgcccgatgggtgaattgaatcgcctgggcgttccgggagcgggaaggcaccgcgaacggcagggaacccagcggctgcgcctttggggtccggccccctgccctcccaggctggagccgggctcctggcggggcggcggcgaggcggaagcggtgggatgctgctgccgggccggcgtgcagtaggggcggacccccagcaggaggaccccggctgcggctgcggcgggggtgtaggtgggcggtaaagggggagcagagtcaggggaggttgggaagcatggcgactgtggggggaagggaggcagcggggaagccacaaaagcctacagcaggccgggcgggcgcggtggctcgcgcctgtaatcccagcactctgggaggccgaggcgggtggatcacgaggtcaggagctccagaccatcccggctaacagggtgaaagcccgtctctaggaaaaatagaacaaagtagccgggcgtggtggcgggcgcctgtaggcccagctactcgggaggctgaggccggggaatggcgtgaacccgggaggcggagcttgcagtgagccgagatggcgccactgcactccagcctgggcgacagggcgagactccgtctggaagaaaaggaaagaaacagcaaaaagccaaagaaaaagcctacagcacccggtattcccaggcggtctcccatccaagtactaaccaggcccgaccctgcttagcttccgagatcagacgagatcgggcgcgttcagggtggtatggccgtagacgctgaaggaggcgcctggctgccccaagagcccagcccggcccggccgtgcccgccggattgcagccgacaccgccagcccggggccgcggggctcggatcggggacccccgagccgctggcccgcggccttcccccagctcccgcgctcccgagcttccaccacatcgggcccgctcggagcagggagtgctccgaggcgtcagggcccagggcccacgatcctgggacgccctccggtcctccgccctgtcgcggaggcagcgttttggatccctcgccgcacaggggctcctgcgaggccccctcttgccccacccacccagagccgtcagggctggccgaaggcgaacagccggcccagccgcgcggggcctttctctcacaacgcccccaccacggtcgcttgtcccgaccaagacccggccgggggggcaagagggcgtggggtgtagcgggtcggggggtggccctgttttgccccgggctggcactagaggcggcggcctgatctcgggtgagagggcctgagagaaacccagacacaccccaccgccaccaggagcaaatccactcccccacacacagacacacccgggcgcgctcgcacgcgcgcgcgcggactcacacacacacacacagacacacagacacacacgcacacacgcacgcgcacacgcacgcacacacacacgcggcttgaaggagagcaaggacgagatggatggagagatagaaaccgagggagggagagagacagcgatcgagagagacaggggagggcgagagggaaggagacagacagagaggctgagaaagagagaggcacagagaaagagagagagagagacagagagacagagggaaaacgacaaaagtagcgcgaggtccagggggaaacccagaagagagaggcggagggagctagagagcgagagcgatagagccttagagaggaagtgcccggctccgttaggcagcgccgtcttgagcaggtcgggatagggtggagggggcttgggctgcgcccagaacacgggggccaggcggtccgtgcgagaggaccaacggagcgctgaggcgggcgttttcttggatgaattgcttgctttggaggtgggtttcgtaggctcctgcctttcttggcagctccctgtgctctgggtgccttgcggcgggccccgagatttgcagagcgcgcccgcccgtttggcgggagccgtggcaccgggcgggcccggaggcctgggtctctggcgagtcctcgggactggagtcgtcgacacgaagcggggggcattgggaatcccgggtgcacagggcctgttttcccggtggctggcgaagcaatgtccttcccccgggtaaagcagcccatgcgttccggagccgacgtcttggctggcgtctgtggcacccgctgcccctgcccgccccttcccccggtttggaagggtgcgacgacggcgcccgatgggtgaattgaatcgcctgggcgttccgggagcgggaaggcaccgcgaacggcagggaacccagcggctgcgcctttggggtccggccccctgccctcccaggctggagccgggctcctggcggggcggcggcgaggcggaagcggtgggatgctgctgccgggccggcgtgcagtaggggcggacccccagcaggaggaccccggctgcggctgcggcgggggtgtaggtgggcggtaaagggggagcagagtcaggggaggttgggtagcatggcgactgtggggggaagggaggcagcggggaagccacaaaagcctacagcaggccgggcgggcgcggtggctcgcgcctgtaatcccagcactctgggaggccgaggcgggtggatcacgaggtcaggagctccagaccatcccggctaacagggtgaaagcccgtctctaggaaaaatagaacaaagtagccgggcgtggtggcgggcgcctgtaggcccagctactcgggaggctgaggccggggaatgg

SEQ ID NO: 1879908 - DNA, 4001 bp, Homo sapiens
ctccgccctgtcgcggaggcagcgttttggatccctcgccgcacaggggctcctgcgaggccccctcttgccccacccacccagagccgtcagggctggccgaaggcgaacagccggcccagccgcgcggggcctttctctcacaacgcccccaccacggtcgcttgtcccgaccaagacccggccgggggggcaagagggcgtggggtgtagcgggtcggggggtggccctgttttgccccgggctggcactagaggcggcggcctgatctcgggtgagagggcctgagagaaacccagacacaccccaccgccaccaggagcaaatccactcccccacacacagacacacccgggcgcgctcgcacgcgcgcgcgcggactcacacacacacacacagacacacagacacacacgcacacacgcacgcgcacacgcacgcacacacacacgcggcttgaaggagagcaaggacgagatggatggagagatagaaaccgagggagggagagagacagcgatcgagagagacaggggagggcgagagggaaggagacagacagagaggctgagaaagagagaggcacagagaaagagagagagagagacagagagacagagggaaaacgacaaaagtagcgcgaggtccagggggaaacccagaagagagaggcggagggagctagagagcgagagcgatagagccttagagaggaagtgcccggctccgttaggcagcgccgtcttgagcaggtcgggatagggtggagggggcttgggctgcgcccagaacacgggggccaggcggtccgtgcgagaggaccaacggagcgctgaggcgggcgttttcttggatgaattgcttgctttggaggtgggtttcgtaggctcctgcctttcttggcagctccctgtgctctgggtgccttgcggcgggccccgagatttgcagagcgcgcccgcccgtttggcgggagccgtggcaccgggcgggcccggaggcctgggtctctggcgagtcctcgggactggagtcgtcgacacgaagcggggggcattgggaatcccgggtgcacagggcctgttttcccggtggctggcgaagcaatgtccttcccccgggtaaagcagcccatgcgttccggagccgacgtcttggctggcgtctgtggcacccgctgcccctgcccgccccttcccccggtttggaagggtgcgacgacggcgcccgatgggtgaattgaatcgcctgggcgttccgggagcgggaaggcaccgcgaacggcagggaacccagcggctgcgcctttggggtccggccccctgccctcccaggctggagccgggctcctggcggggcggcggcgaggcggaagcggtgggatgctgctgccgggccggcgtgcagtaggggcggacccccagcaggaggaccccggctgcggctgcggcgggggtgtaggtgggcggtaaagggggagcagagtcaggggaggttgggtagcatggcgactgtggggggaagggaggcagcggggaagccacaaaagcctacagcaggccgggcgggcgcggtggctcgcgcctgtaatcccagcactctgggaggccgaggcgggtggatcacgaggtcaggagctccagaccatcccggctaacagggtgaaagcccgtctctaggaaaaatagaacaaagtagccgggcgtggtggcgggcgcctgtaggcccagctactcgggaggctgaggccggggaatggcgtgaacccgggaggcggagcttgcagtgagccgagatggcgccactgcactccagcctgggcgacagggcgagactccgtctggaagaaaaggaaagaaacagcaaaaagccaaagaaaaagcctacagcacccggtattcccaggcggtctcccatccaagtactaaccaggcccgaccctgcttagcttccgagatcagacgagatcgggcgcgttcagggtggtatggccgtagacgctgaaggaggcgcctggctgccccaagagcccagcccggcccggccgtgcccgccggattgcagccgacaccgccagcccggggccgcggggctcggatcggggacccccgagccgctggcccgcggccttcccccggctcccgcgctcccgagcttccaccacatcgggcccgctcggagcagggagtgctccgaggcgtcagggcccagggcccacgatcctgggacgccctccggtcctccgccctgtcgcggaggcagcgttttggatccctcgccgcacaggggctcctgcgaggccccctcttgccccacccacccagagccgtcagggctggccgaaggcgaacagccggcccagccgcgcggggcctttctctcacaacgcccccaccacggtcgcttgtcccgaccaagacccggccgggggggcaagagggcgtggggtgtagcgggtcggggggtggccctgttttgccccgggctggcactagaggcggcggcctgatctcgggtgagagggcctgagagaaacccagacacaccccaccgccaccaggagcaaatccactcccccacacacagacacacccgggcgcgctcgcacccgcgcgcgcggacacacacacacacacagacacacacgcacacacgcacgcgcacacgcacgcacacacacacgcggcttgaaggagagcaaggacgagatggatggagagatagaaaccgagggagggagagagacagcgatcgagagagacaggggagggcgagagggaaggagacagacagagaggctgagaaagagagaggcacagagaaagagagagagagagacagagagacagagggaaaacgacaaaagtagcgcgaggtccagggggaaacccagaagagagaggcggagggagctagagagcgagagcgatagagccttagagaggaagcgcccggctccgttaggcagcgccctcttgagcaggccgggatagggtggagggggcttgggctgcgcccagaacacggggtccaggcggtccgtgcgagaggaccaacggagcgctgaggcgggcgttttcttggatgaattgcttgctttggaggtgggtttcgtaggctcctgcctttcttggcacctccctgtgctctgggtgccttgcggcgggccccgagatttgcagagcgcgcccgcccgtttggcgggagccgtggcaccgggcgggcccggaggcctgggtctctggcgagtcctcgggactggagtcgtcgacacgcagcgggagggcattgggaatcccgggtgcacagggcctgttttcccggtggctggcgaagcaatgtccttcccccgggtaaagcagcccatgcgttctggagccgacgtcttggctggcgtctgtggcacccgctgcccctgcccgccccttcccccggtttggaagggtgcgacgacggcgcccgatgggtgaattgaatcacctgggcgttccgggagcgggaaggcaccgcgaacggcagggaacccagcggctgcgcctttggggtccggccccctgccctcccaggctggagccgggctcctggcggagcggtgggatgctgctgccgggccggcgtgcagtaggggcggacccccagcaggaggaccccggctgcggctgcggcgggggtgtaggtgggcggtaaaggcggagcagagtcaggggaggttgggaagcatggcgactgtggggggaagggaggcagccgggaagccacaaaagcctacagcaggccgggcgggcgcggtggctcgcgcctgtaatcccagcactctgggaggccgaggcgggtggatcacgaggtcaggagctccagaccatcccggctaacagggtgaaagcccgtctctaggaaaaatagaacaaagtagccgggcgtggtggcgggcgcctgtaggcccagctactcgggaggctgaggccggggaatggcgtgaacccgggaggcggagcttgca

SEQ ID NO: 1879909 - DNA, 4001 bp, Homo sapiens
ccacgatcctgggacgccctccggtcctccgccctgtcgcggaggcagcgttttggatccctcgccgcacaggggctcctgcgaggccccctcttgccccacccacccagagccgtcagggctggccgaaggcgaacagccggcccagccgcgcggggcctttctctcacaacgcccccaccacggtcgcttgtcccgaccaagacccggccgggggggcaagagggcgtggggtgtagcgggtcggggggtggccctgttttgccccgggctggcactagaggcggcggcctgatctcgggtgagagggcctgagagaaacccagacacaccccaccgccaccaggagcaaatccactcccccacacacagacacacccgggcgcgctcgcacccgcgcgcgcggacacacacacacacacagacacacacgcacacacgcacgcgcacacgcacgcacacacacacgcggcttgaaggagagcaaggacgagatggatggagagatagaaaccgagggagggagagagacagcgatcgagagagacaggggagggcgagagggaaggagacagacagagaggctgagaaagagagaggcacagagaaagagagagagagagacagagagacagagggaaaacgacaaaagtagcgcgaggtccagggggaaacccagaagagagaggcggagggagctagagagcgagagcgatagagccttagagaggaagcgcccggctccgttaggcagcgccctcttgagcaggccgggatagggtggagggggcttgggctgcgcccagaacacggggtccaggcggtccgtgcgagaggaccaacggagcgctgaggcgggcgttttcttggatgaattgcttgctttggaggtgggtttcgtaggctcctgcctttcttggcacctccctgtgctctgggtgccttgcggcgggccccgagatttgcagagcgcgcccgcccgtttggcgggagccgtggcaccgggcgggcccggaggcctgggtctctggcgagtcctcgggactggagtcgtcgacacgcagcgggagggcattgggaatcccgggtgcacagggcctgttttcccggtggctggcgaagcaatgtccttcccccgggtaaagcagcccatgcgttctggagccgacgtcttggctggcgtctgtggcacccgctgcccctgcccgccccttcccccggtttggaagggtgcgacgacggcgcccgatgggtgaattgaatcacctgggcgttccgggagcgggaaggcaccgcgaacggcagggaacccagcggctgcgcctttggggtccggccccctgccctcccaggctggagccgggctcctggcggagcggtgggatgctgctgccgggccggcgtgcagtaggggcggacccccagcaggaggaccccggctgcggctgcggcgggggtgtaggtgggcggtaaaggcggagcagagtcaggggaggttgggaagcatggcgactgtggggggaagggaggcagccgggaagccacaaaagcctacagcaggccgggcgggcgcggtggctcgcgcctgtaatcccagcactctgggaggccgaggcgggtggatcacgaggtcaggagctccagaccatcccggctaacagggtgaaagcccgtctctaggaaaaatagaacaaagtagccgggcgtggtggcgggcgcctgtaggcccagctactcgggaggctgaggccggggaatggcgtgaacccgggaggcggagcttgcagtgagccgagatggcgccactgcactccagcctgggcgacagggcgagactccgtctggaagaaaaggaaagaaacagcaaaaagccaaagaaaaagcctacagcacccggtattcccaggcggtctcccatccaagtactaaccaggcccgaccctgcttagcttccgagatcagacgagatcgggcgcgttcagggtggtatggccgtagacgctgaaggaggcgcctggctgccccaagagcccagcccggcccggccgtgcccgccggattgcagccgacaccgccagcccggggccgcggggctcggatcggggacccccgagccgctggcccgcggccttcccccagctcccgcgctcccgagcttccaccacatcgggcccgctcggagcagggagtgctccgaggcgtcagggcccagggcccacgatcctgggacgccctccggtcctccgccctgtcgcggaggcagcgttttggatccctcgccgcacaggggctcctgcgaggccccctcttgccccacccacccagagccgtcagggctggccgaaggcgaacagccggcccagccgcgcggggcctttctctcacaacgcccccaccacggtcgcttgtcccgaccaagacccggccgggggggcaagagggcgtggggtgtagcgggtcggggggtggccctgttttgccccgggctggcactagaggcggcggcctgatctcgggtgagagggcctgagagaaacccagacacaccccaccgccaccaggagcaaatccactcccccacacacagacacacccgggcgcgctcgcacgcgcgcgcgcggactcacacacacacacacacacgcacgcgcacacgcacgcacacacacacgcggcttgaaggagagcaaggacgagatggatggagagatagaaaccgagggagggagagagacagcgatcgagagagacaggggagggcgagagggaaggagacagacagagaggctgagaaagagagaggcacagagaaagagagagagagagacagagagacagagggaaaacgacagaagtagcgcgaggtccagggggaaacccagaagagagaggcggagggagctagagagcgagagcgatagagccttagagaggaagcgcccggctccgttaggcagcgccctcttgagcaggccgggatagggtggagggggcttgggctgcgcccagaacacgggggccaggcggtccgtgcgagaggaccaacggagcgctgaggcgggcgttttcttggatgaattgcttgctttggaggtgggtttcgtaggctcctgcctttcttggcacctccctgtgctctgggtgccttgcggcgggccccgagatttgcagagcgcgcccgcccgtttggcgggagccgtggcaccgggcgggcccggaggcctgggtctctggcgagtcctcgggactggagtcgtcgacacgcagcgggagggcattgggaatcccgggtgcacagggcctgttttcccggtggctggcgaagcaatgtccttcccccgggtaaagcagcccatgcgttccggagccgacgtcttggctggcgtctgtggcacccgctgcccctgcccgccccttcccccggtttggaagggtgcgacgacggcgcccgatgggtgaattgaatcgcctgggcgttccgggagcgggaaggcaccgcgaacggcagggaacccagcggctgcgcctttggggtccggccccctgccctcccaggctggagccgggctcctggcggggcggcggcgaggcggaagcggtgggatgctgctgcccggccggcgtgcagtaggggcggacccccagcaggaggaccccggctgcggctgcggcgggggtgtaggtgggcggtaaagggggagcagagtcaggggaggttgggtagcatggcgactgtggggggaagggaggcagcggggaagccacaaaagcctacagcaggccgggcgggcgcggtggctcgcgcctgtaatcccagcactctgggaggccgaggcgggtggatcacgaggtcaggagctccagaccatcccggctaacagggtgaaagcccgtctctaggaaaaatagaacaaagtagccgggcgtggtggcgggcgcctgtaggcccagctactcgggaggctgaggccggggaatggcgtgaacccgggaggcggagc

SEQ ID NO: 1879910 - DNA, 4001 bp, Homo sapiens
atcctgggacgccctccggtcctccgccctgtcgcggaggcagcgttttggatccctcgccgcacaggggctcctgcgaggccccctcttgccccacccacccagagccgtcagggctggccgaaggcgaacagccggcccagccgcgcggggcctttctctcacaacgcccccaccacggtcgcttgtcccgaccaagacccggccgggggggcaagagggcgtggggtgtagcgggtcggggggtggccctgttttgccccgggctggcactagaggcggcggcctgatctcgggtgagagggcctgagagaaacccagacacaccccaccgccaccaggagcaaatccactcccccacacacagacacacccgggcgcgctcgcacgcgcgcgcgcggactcacacacacacacacacacgcacgcgcacacgcacgcacacacacacgcggcttgaaggagagcaaggacgagatggatggagagatagaaaccgagggagggagagagacagcgatcgagagagacaggggagggcgagagggaaggagacagacagagaggctgagaaagagagaggcacagagaaagagagagagagagacagagagacagagggaaaacgacagaagtagcgcgaggtccagggggaaacccagaagagagaggcggagggagctagagagcgagagcgatagagccttagagaggaagcgcccggctccgttaggcagcgccctcttgagcaggccgggatagggtggagggggcttgggctgcgcccagaacacgggggccaggcggtccgtgcgagaggaccaacggagcgctgaggcgggcgttttcttggatgaattgcttgctttggaggtgggtttcgtaggctcctgcctttcttggcacctccctgtgctctgggtgccttgcggcgggccccgagatttgcagagcgcgcccgcccgtttggcgggagccgtggcaccgggcgggcccggaggcctgggtctctggcgagtcctcgggactggagtcgtcgacacgcagcgggagggcattgggaatcccgggtgcacagggcctgttttcccggtggctggcgaagcaatgtccttcccccgggtaaagcagcccatgcgttccggagccgacgtcttggctggcgtctgtggcacccgctgcccctgcccgccccttcccccggtttggaagggtgcgacgacggcgcccgatgggtgaattgaatcgcctgggcgttccgggagcgggaaggcaccgcgaacggcagggaacccagcggctgcgcctttggggtccggccccctgccctcccaggctggagccgggctcctggcggggcggcggcgaggcggaagcggtgggatgctgctgcccggccggcgtgcagtaggggcggacccccagcaggaggaccccggctgcggctgcggcgggggtgtaggtgggcggtaaagggggagcagagtcaggggaggttgggtagcatggcgactgtggggggaagggaggcagcggggaagccacaaaagcctacagcaggccgggcgggcgcggtggctcgcgcctgtaatcccagcactctgggaggccgaggcgggtggatcacgaggtcaggagctccagaccatcccggctaacagggtgaaagcccgtctctaggaaaaatagaacaaagtagccgggcgtggtggcgggcgcctgtaggcccagctactcgggaggctgaggccggggaatggcgtgaacccgggaggcggagcttgcagtgagccgagatggcgccactgcactccagcctgggcgacagggcgagactccgtctggaagaaaaggaaagaaacagcaaaaagccaaagaaaaagcctacagcacccggtattcccaggcggtctcccatccaagtactaaccaggcccgaccctgcttagcttccgagatcagacgagatcgggcgcgttcagggtggtatggccgtagacgctgaaggaggcgcctggctgccccaagagcccagcccggcccggccgtgcccgccggattgcagccgacaccgccagcccggggccgcggggctcggatcggggacccccgagccgctggcccgcggccttcccccagctcccgcgctcccgagcttccaccacatcgggcccgctcggagcagggagtgctccgaggcgtcagggcccagggcccacgatcctgggacgccctccggtcctccgccctgtcgcggaggcagcgttttggatccctcgccgcacaggggctcctgcgaggccccctcttgccccacccacccagagccgtcagggctggccgaaggcgaacagccggcccagccgcgcggggcctttctctcacaacgcccccaccacggtcgcttgtcccgaccaagacccggccgggggggcaagagggcgtggggtgtagcgggtcggggggtggccctgttttgccccgggctggcactagaggcggcggcctgatctcgggtgagagggcctgagagaaacccagacacaccccaccgccaccaggagcaaatccactcccccacacacagacacacccgggcgcgctcgcacgcgcgcgcgcggactcacacacacacacacagacacacagacacacacgcacacacgcacgcgcacacgcacgcacacacacacgcggcttgaaggagagcaaggacgagatggatggagagatagaaaccgagggagggagagagacagcgatcgagagagacaggggagggcgagagggaaggagacagacagagaggctgagaaagagagaggcacagagaaagagagagagagagacagagagacagagggaaaacgacaaaagtagcgcgaggtccagggggaaacccagaagagagaggcggagggagctagagagcgagagcgatagagccttagagaggaagcgcccggctccgttaggcagcgccctcttgagcaggccgggatagggtggagggggcttgggctgcgcccagaacacggggtccaggcggtccgtgcgagaggaccaacggagcgctgaggcgggcgttttcttggatgaattgcttgctttggaggtgggtttcgtaggctcctgcctttcttggcacctccctgtgctctgggtgccttgcggcgggccccgagatttgcagagcgcgcccgcccgtttggcgggagccgtggcaccgggcgggcccggaggcctgggtctctggcgagtcctcgggactggagtcgtcgacacgcagcgggagggcattgggaatcccgggtgcacagggcctgttttcccggtggctggcgaagcaatgtccttcccccgggtaaagcagcccatgcgttccggagccgacgtcttggctggcgtctgtggcacccgctgcccctgcccgccccttcccccggtttggaagggtgcgacgacggcgcccgatgggtgaattgaatcgcctgggcgttccgggagcgggaaggcaccgcgaacggcagggaacccagcggctgcgcctttggggtccggccccctgccctcccaggctggagccgggctcctggcggggcggcggcgaggcggaagcggtgggatgctgctgccgggccggcgtgcagtaggggcggacccccagcaggaggaccccggctgcggctgcggcgggggtgtaggtgggcggtaaagggggagcagagtcaggggaggttgggaagcatggcgactgtggggggaagggaggcagcggggaagccacaaaagcctacagcaggccgggcgggcgcggtggctcgcgcctgtaatcccagcactctgggaggccgaggcgggtggatcacgaggtcaggagctccagaccatcccggctaacagggtgaaagcccgtctctaggaaaaatagaacaaagtagccgggcgtggtggcgggcgcctgtaggcccagctactcgggaggctgaggccggggaatg

SEQ ID NO: 1879911 - DNA, 4001 bp, Homo sapiens
tccgccctgtcgcggaggcagcgttttggatccctcgccgcacaggggctcctgcgaggccccctcttgccccacccacccagagccgtcagggctggccgaaggcgaacagccggcccagccgcgcggggcctttctctcacaacgcccccaccacggtcgcttgtcccgaccaagacccggccgggggggcaagagggcgtggggtgtagcgggtcggggggtggccctgttttgccccgggctggcactagaggcggcggcctgatctcgggtgagagggcctgagagaaacccagacacaccccaccgccaccaggagcaaatccactcccccacacacagacacacccgggcgcgctcgcacgcgcgcgcgcggactcacacacacacacacagacacacagacacacacgcacacacgcacgcgcacacgcacgcacacacacacgcggcttgaaggagagcaaggacgagatggatggagagatagaaaccgagggagggagagagacagcgatcgagagagacaggggagggcgagagggaaggagacagacagagaggctgagaaagagagaggcacagagaaagagagagagagagacagagagacagagggaaaacgacaaaagtagcgcgaggtccagggggaaacccagaagagagaggcggagggagctagagagcgagagcgatagagccttagagaggaagcgcccggctccgttaggcagcgccctcttgagcaggccgggatagggtggagggggcttgggctgcgcccagaacacggggtccaggcggtccgtgcgagaggaccaacggagcgctgaggcgggcgttttcttggatgaattgcttgctttggaggtgggtttcgtaggctcctgcctttcttggcacctccctgtgctctgggtgccttgcggcgggccccgagatttgcagagcgcgcccgcccgtttggcgggagccgtggcaccgggcgggcccggaggcctgggtctctggcgagtcctcgggactggagtcgtcgacacgcagcgggagggcattgggaatcccgggtgcacagggcctgttttcccggtggctggcgaagcaatgtccttcccccgggtaaagcagcccatgcgttccggagccgacgtcttggctggcgtctgtggcacccgctgcccctgcccgccccttcccccggtttggaagggtgcgacgacggcgcccgatgggtgaattgaatcgcctgggcgttccgggagcgggaaggcaccgcgaacggcagggaacccagcggctgcgcctttggggtccggccccctgccctcccaggctggagccgggctcctggcggggcggcggcgaggcggaagcggtgggatgctgctgccgggccggcgtgcagtaggggcggacccccagcaggaggaccccggctgcggctgcggcgggggtgtaggtgggcggtaaagggggagcagagtcaggggaggttgggaagcatggcgactgtggggggaagggaggcagcggggaagccacaaaagcctacagcaggccgggcgggcgcggtggctcgcgcctgtaatcccagcactctgggaggccgaggcgggtggatcacgaggtcaggagctccagaccatcccggctaacagggtgaaagcccgtctctaggaaaaatagaacaaagtagccgggcgtggtggcgggcgcctgtaggcccagctactcgggaggctgaggccggggaatggcgtgaacccgggaggcggagcttgcagtgagccgagatggcgccactgcactccagcctgggcgacagggcgagactccgtctggaagaaaaggaaagaaacagcaaaaagccaaagaaaaagcctacagcacccggtattcccaggcggtctcccatccaagtactaaccaggcccgaccctgcttagcttccgagatcagacgagatcgggcgcgttcagggtggtatggccgtagacgctgaaggaggcgcctggctgccccaagagcccagcccggcccggccgtgcccgccggattgcagccgacaccgccagcccggggccgcggggctcggatcggggacccccgagccgctggcccgcggccttcccccggctcccgcgctcccgagcttccaccacatcgggcccgctcggagcagggagtgctccgaggcgtcagggcccagggcccacgatcctgggacgccctccggtcctccgccctgtcgcggaggcagcgttttggatccctcgccgcacaggggctcctgcgaggccccctcttgccccacccacccagagccgtcagggctggccgaaggcgaacagccggcccagccgcgcggggcctttctctcacaacgcccccaccacggtcgcttgtcccgaccaagacccggccgggggggcaagagggcgtggggtgtagcgggtcggggggtggccctgttttgccccgggctggcactagaggcggcggcctgatctcgggtgagagggcctgagagaaacccagacacaccccaccgccaccaggagcaaatccactcccccacacacagacacacccgggcgcgctcgcacgcgcgcgcgcggactcacacacacacacacagacacacagacacacgcacacacgcacgcgcacacgcacgcacacacacacgcggcttgaaggagagcaaggacgagatggatggagagatagaaaccgagggagggagagagacagcgatcgagagagacaggggagggcgagagggaaggagacagacagagaggctgagaaagagagaggcacagagaaagagagagagagagacagagagacagagggaaaacgacaaaagtagcgcgaggtccagggggaaacccagaagagagaggcggagggagctagagagcgagagcgatagagccttagagaggaagtgcccggctccgttaggcagcgccgtcttgagcaggtcgggatagggtggagggggcttgggctgcgcccagaacacgggggccaggcggtccgtgcgagaggaccaacggagcgctgaggcgggcgttttcttggatgaattgcttgctttggaggtgggtttcgtaggctcctgcctttcttggcagctccctgtgctctgggtgccttgcggcgggccccgagatttgcagagcgcgcccgcccgtttggcgggagccgtggcaccgggcgggcccggaggcctgggtctctggcgagtcctcgggactggagtcgtcgacacgaagcggggggcattgggaatcccgggtgcacagggcctgttttcccggtggctggcgaagcaatgtccttcccccgggtaaagcagcccatgcgttccggagccgacgtcttggctggcgtctgtggcacccgctgcccctgcccgccccttcccccggtttggaagggtgcgacgacggcgcccgatgggtgaattgaatcgcctgggcgttccgggagcgggaaggcaccgcgaacggcagggaacccagcggctgcgcctttggggtccggccccctgccctcccaggctggagccgggctcctggcggggcggcggcgaggcggaagcggtgggatgctgctgccgggccggcgtgcagtaggggcggacccccagcaggaggaccccggctgcggctgcggcgggggtgtaggtgggcggtaaagggggagcagagtcaggggaggttgggtagcatggcgactgtggggggaagggaggcagccgggaagccacaaaagcctacagcaggccgggcgggcgcggtggctcgcgcctgtaatcccagcactctgggaggccgaggcgggtggatcacgaggtcaggagctccagaccatcccggctaacagggtgaaagcccgtctctaggaaaaatagaacaaagtagccgggcgtggtggcgggcgcctgtaggcccagctactcgggaggctgaggccggggaatggcg

SEQ ID NO: 1879912 - DNA, 4001 bp, Homo sapiens
tccgccctgtcgcggaggcagcgttttggatccctcgccgcacaggggctcctgcgaggccccctcttgccccacccacccagagccgtcagggctggccgaaggcgaacagccggcccagccgcgcggggcctttctctcacaacgcccccaccacggtcgcttgtcccgaccaagacccggccgggggggcaagagggcgtggggtgtagcgggtcggggggtggccctgttttgccccgggctggcactagaggcggcggcctgatctcgggtgagagggcctgagagaaacccagacacaccccaccgccaccaggagcaaatccactcccccacacacagacacacccgggcgcgctcgcacgcgcgcgcgcggactcacacacacacacacagacacacagacacacacgcacacacgcacgcgcacacgcacgcacacacacacgcggcttgaaggagagcaaggacgagatggatggagagatagaaaccgagggagggagagagacagcgatcgagagagacaggggagggcgagagggaaggagacagacagagaggctgagaaagagagaggcacagagaaagagagagagagagacagagagacagagggaaaacgacaaaagtagcgcgaggtccagggggaaacccagaagagagaggcggagggagctagagagcgagagcgatagagccttagagaggaagcgcccggctccgttaggcagcgccctcttgagcaggccgggatagggtggagggggcttgggctgcgcccagaacacggggtccaggcggtccgtgcgagaggaccaacggagcgctgaggcgggcgttttcttggatgaattgcttgctttggaggtgggtttcgtaggctcctgcctttcttggcacctccctgtgctctgggtgccttgcggcgggccccgagatttgcagagcgcgcccgcccgtttggcgggagccgtggcaccgggcgggcccggaggcctgggtctctggcgagtcctcgggactggagtcgtcgacacgcagcgggagggcattgggaatcccgggtgcacagggcctgttttcccggtggctggcgaagcaatgtccttcccccgggtaaagcagcccatgcgttccggagccgacgtcttggctggcgtctgtggcacccgctgcccctgcccgccccttcccccggtttggaagggtgcgacgacggcgcccgatgggtgaattgaatcgcctgggcgttccgggagcgggaaggcaccgcgaacggcagggaacccagcggctgcgcctttggggtccggccccctgccctcccaggctggagccgggctcctggcggggcggcggcgaggcggaagcggtgggatgctgctgccgggccggcgtgcagtaggggcggacccccagcaggaggaccccggctgcggctgcggcgggggtgtaggtgggcggtaaagggggagcagagtcaggggaggttgggaagcatggcgactgtggggggaagggaggcagcggggaagccacaaaagcctacagcaggccgggcgggcgcggtggctcgcgcctgtaatcccagcactctgggaggccgaggcgggtggatcacgaggtcaggagctccagaccatcccggctaacagggtgaaagcccgtctctaggaaaaatagaacaaagtagccgggcgtggtggcgggcgcctgtaggcccagctactcgggaggctgaggccggggaatggcgtgaacccgggaggcggagcttgcagtgagccgagatggcgccactgcactccagcctgggcgacagggcgagactccgtctggaagaaaaggaaagaaacagcaaaaagccaaagaaaaagcctacagcacccggtattcccaggcggtctcccatccaagtactaaccaggcccgaccctgcttagcttccgagatcagacgagatcgggcgcgttcagggtggtatggccgtagacgctgaaggaggcgcctggctgccccaagagcccagcccggcccggccgtgcccgccggattgcagccgacaccgccagcccggggccgcggggctcggatcggggacccccgagccgctggcccgcggccttcccccggctcccgcgctcccgagcttccaccacatcgggcccgctcggagcagggagtgctccgaggcgtcagggcccagggcccacgatcctgggacgccctccggtcctccgccctgtcgcggaggcagcgttttggatccctcgccgcacaggggctcctgcgaggccccctcttgccccacccacccagagccgtcagggctggccgaaggcgaacagccggcccagccgcgcggggcctttctctcacaacgcccccaccacggtcgcttgtcccgaccaagacccggccgggggggcaagagggcgtggggtgtagcgggtcggggggtggccctgttttgccccgggctggcactagaggcggcggcctgatctcgggtgagagggcctgagagaaacccagacacaccccaccgccaccaggagcaaatccactcccccacacacagacacacccgggcgcgctcgcacgcgcgcgcgcggactcacacacacacacacagacacacagacacacacgcacacacgcacgcgcacacgcacgcacacacacacgcggcttgaaggagagcaaggacgagatggatggagagatagaaaccgagggagggagagagacagcgatcgagagagacaggggagggcgagagggaaggagacagacagagaggctgagaaagagagaggcacagagaaagagagagagagagacagagagacagagggaaaacgacaaaagtagcgcgaggtccagggggaaacccagaagagagaggcggagggagctagagagcgagagcgatagagccttagagaggaagcgcccggctccgttaggcagcgccctcttgagcaggccgggatagggtggagggggcttgggctgcgcccagaacacgggggccaggcggtccgtgcgagaggaccaacggagcgctgaggcgggcgttttcttggatgaattgcttgctttggaggtgggtttcgtaggctcctgcctttcttggcacctccctgtgctctgggtgccttgcggcgggccccgagatttgcagagcgcgcccgcccgtttggcgggagccgtggcaccgggcgggcccggaggcctgggtctctggcgagtcctcgggactggagtcgtcgacacgaagcggggggcattgggaatcccgggtgcacagggcctgttttcccggtggctggcgaagcaatgtccttcccccgggtaaagcagcccatgcgttccggagccgacgtcttggctggcgtctgtggcacccgctgcccctgcccgccccttcccccggtttggaagggtgcgacgacggcgcccgatgggtgaattgaatcgcctgggcgttccgggagcgggaaggcaccgcgaacggcagggaacccagcggctgcgcctttggggtccggccccctgccctcccaggctggagccgggctcctggcggggcggcggcgaggcggaagcggtgggatgctgctgccgggccggcgtgcagtaggggcggacccccagcaggaggaccccggctgcggctgcggcgggggtgtaggtgggcggtaaagggggagcagagtcaggggaggttgggtagcatggcgactgtggggggaagggaggcagcggggaagccacaaaagcctacagcaggccgggcgggcgcggtggctcgcgcctgtaatcccagcactctgggaggccgaggcgggtggatcacgaggtcaggagctccagaccatcccggctaacagggtgaaagcccgtctctaggaaaaatagaacaaagtagccgggcgtggtggcgggcgcctgtaggcccagctactcgggaggctgaggccggggaatgg

SEQ ID NO: 1879913 - DNA, 4001 bp, Homo sapiens
ccctccggtcctccgccctgtcgcggaggcagcgttttggatccctcgccgcacaggggctcctgcgaggccccctcttgccccacccacccagagccgtcagggctggccgaaggcgaacagccggcccagccgcgcggggcctttctctcacaacgcccccaccacggtcgcttgtcccgaccaagacccggccgggggggcaagagggcgtggggtgtagcgggtcggggggtggccctgttttgccccgggctggcactagaggcggcggcctgatctcgggtgagagggcctgagagaaacccagacacaccccaccgccaccaggagcaaatccactcccccacacacagacacacccgggcgcgctcgcacccgcgcgcgcggacacacacacacacacagacacacacgcacacacgcacgcgcacacgcacgcacacacacacgcggcttgaaggagagcaaggacgagatggatggagagatagaaaccgagggagggagagagacagcgatcgagagagacaggggagggcgagagggaaggagacagacagagaggctgagaaagagagaggcacagagaaagagagagagagagacagagagacagagggaaaacgacaaaagtagcgcgaggtccagggggaaacccagaagagagaggcggagggagctagagagcgagagcgatagagccttagagaggaagcgcccggctccgttaggcagcgccctcttgagcaggccgggatagggtggagggggcttgggctgcgcccagaacacgggggccaggcggtccgtgcgagaggaccaacggagcgctgaggcgggcgttttcttggatgaattgcttgctttggaggtgggtttcgtaggctcctgcctttcttggcacctccctgtgctctgggtgccttgcggcgggccccgagatttgcagagcgcgcccgcccgtttggcgggagccgtggcaccgggcgggcccggaggcctgggtctctggcgagtcctcgggactggagtcgtcgacacgaagcggggggcattgggaatcccgggtgcacagggcctgttttcccggtggctggcgaagcaatgtccttcccccgggtaaagcagcccatgcgttccggagccgacgtcttggctggcgtctgtggcacccgctgcccctgcccgccccttcccccggtttggaagggtgcgacgacggcgcccgatgggtgaattgaatcgcctgggcgttccgggagcgggaaggcaccgcgaacggcagggaacccagcggctgcgcctttggggtccggccccctgccctcccaggctggagccgggctcctggcggggcggcggcgaggcggaagcggtgggatgctgctgccgggccggcgtgcagtaggggcggacccccagcaggaggaccccggctgcggctgcggcgggggtgtaggtgggcggtaaagggggagcagagtcaggggaggttgggaagcatggcgactgtggggggaagggaggcagcggggaagccacaaaagcctacagcaggccgggcgggcgcggtggctcgcgcctgtaatcccagcactctgggaggccgaggcgggtggatcacgaggtcaggagctccagaccatcccggctaacagggtgaaagcccgtctctaggaaaaatagaacaaagtagccgggcgtggtggcgggcgcctgtaggcccagctactcgggaggctgaggccggggaatggcgtgaacccgggaggcggagcttgcagtgagccgagatggcgccactgcactccagcctgggcgacagggcgagactccgtctggaagaaaaggaaagaaacagcaaaaagccaaagaaaaagcctacagcacccggtattcccaggcggtctcccatccaagtactaaccaggcccgaccctgcttagcttccgagatcagacgagatcgggcgcgttcagggtggtatggccgtagacgctgaaggaggcgcctggctgccccaagagcccagcccggcccggccgtgcccgccggattgcagccgacaccgccagcccggggccgcggggctcggatcggggacccccgagccgctggcccgcggccttcccccggctcccgcgctcccgagcttccaccacatcgggcccgctcggagcagggagtgctccgaggcgtcagggcccagggcccacgatcctgggacgccctccggtcctccgccctgtcgcggaggcagcgttttggatccctcgccgcacaggggctcctgcgaggccccctcttgccccacccacccagagccgtcagggctggccgaaggcgaacagccggcccagccgcgcggggcctttctctcacaacgcccccaccacggtcgcttgtcccgaccaagacccggccgggggggcaagagggcgtggggtgtagcgggtcggggggtggccctgttttgccccgggctggcactagaggcggcggcctgatctcgggtgagagggcctgagagaaacccagacacaccccaccgccaccaggagcaaatccactcccccacacacagacacacccgttcgttctcgttccggaacccgcacgcgagcacgggtgcgcagacgcacgcacacacacacacggtgaaacacagacacacacggcttgaaggagagcaaggagaagatggatggagagatagaaaccgagggagggagagagacagcgatcgagagagaccggagaggtggagaggtaaagagagagaggctaagagggacagagaaagggagaagtacagaggtacagagggaaggctagagaaataacgcgaggtccagggggaaacccagaagagtgaggaggagggagctagagagcgagaacgtttgagccttagagaggaagcaccctacttcggtaggcagcccccttttgagcagtccggaatagggtggaggggtttgagctgtgcctgagcagggcggccaggcggcccgtgcgagaggaccaacggagcgctgagacgggttttttcttggatgaattgcttgctttggaggtgggtttcgtaggctccattctttcttggcacctcactgtgctcttggtacctcactgtgctcttggtgcggtgcagtgggccccgagatttgcagagtgcgcccgcccttttggcgggagccgtggtaccgggcgcgtccggaggcctgggtctctggcgtgtcctcggtactggagttgacacgaagtgcggggcaataggaatccgggtgcacagggactgttttcctggtggttggcgaagcaatgtccttcctcccgggtaaagcagtccatgcgttctggagcggagatcttggctggcgtctgtggtacccgctgcccctgcccgccccttcccccggtttataaggttgcgactgcgccggatgagtgaattgaattgcctggtggatccgggagcgggaaggcaccgcgaacggcagggaatcctggcctgcaccttagtgatctgaggcgtggtgtttctgctggatccggtttcatcgtgttgcgccgcccatcctgaatagttgtgatgttgttgcctggctgtgctgcaggttagcccacactaagcggtcccgggctgttgtgtgggcttgggcgtgtgaaaagagggagcagatttacggtgcggttgagaagtacggcgaccaaacggtaaagagggaggaacttgaagtctaaacaagcctgcgtctcctggttttctcaagtggcgtttcatctaagtagcggtctggcccagaccctgcttatcttcacgagatcagaggagaccggacgccttcggggtggtatggccttagacgccggtagtgcagcctgtctgccccaaaggcgcggctcagccacgcccgtccgactccatgcgccacctctaatccagtgccatggggatcttatcgggacccgggagccgctcgccggaggtctgg

SEQ ID NO: 1879914 - DNA, 4001 bp, Homo sapiens; identical to SEQ ID NO: 1879904

SEQ ID NO: 1879915 - DNA, 4001 bp, Homo sapiens; identical to SEQ ID NO: 1879905

SEQ ID NO: 1879916 - DNA, 4001 bp, Homo sapiens; identical to SEQ ID NO: 1879906

SEQ ID NO: 1879917 - DNA, 4001 bp, Homo sapiens; identical to SEQ ID NO: 1879907

SEQ ID NO: 1879918 - DNA, 4001 bp, Homo sapiens; identical to SEQ ID NO: 1879908

SEQ ID NO: 1879919 - DNA, 4001 bp, Homo sapiens; identical to SEQ ID NO: 1879909

SEQ ID NO: 1879920 - DNA, 4001 bp, Homo sapiens; identical to SEQ ID NO: 1879910

SEQ ID NO: 1879921 - DNA, 4001 bp, Homo sapiens; identical to SEQ ID NO: 1879911

SEQ ID NO: 1879922 - DNA, 4001 bp, Homo sapiens; identical to SEQ ID NO: 1879912

SEQ ID NO: 1879923 - DNA, 4001 bp, Homo sapiens; identical to SEQ ID NO: 1879913

SEQ ID NO: 1879924 - DNA, 4001 bp, Homo sapiens; identical to SEQ ID NO: 1879904

SEQ ID NO: 1879925 - DNA, 4001 bp, Homo sapiens; identical to SEQ ID NO: 1879905

SEQ ID NO: 1879926 - DNA, 4001 bp, Homo sapiens; identical to SEQ ID NO: 1879906

SEQ ID NO: 1879927 - DNA, 4001 bp, Homo sapiens; identical to SEQ ID NO: 1879907

SEQ ID NO: 1879928 - DNA, 4001 bp, Homo sapiens; identical to SEQ ID NO: 1879908

SEQ ID NO: 1879929 - DNA, 4001 bp, Homo sapiens; identical to SEQ ID NO: 1879909

SEQ ID NO: 1879930 - DNA, 4001 bp, Homo sapiens; identical to SEQ ID NO: 1879910

SEQ ID NO: 1879931 - DNA, 4001 bp, Homo sapiens; identical to SEQ ID NO: 1879911

SEQ ID NO: 1879932 - DNA, 4001 bp, Homo sapiens; identical to SEQ ID NO: 1879912

SEQ ID NO: 1879933 - DNA, 4001 bp, Homo sapiens; identical to SEQ ID NO: 1879913

SEQ ID NO: 1879934 - DNA, 4001 bp, Homo sapiens; identical to SEQ ID NO: 1879904

SEQ ID NO: 1879935 - DNA, 4001 bp, Homo sapiens; identical to SEQ ID NO: 1879905

SEQ ID NO: 1879936 - DNA, 4001 bp, Homo sapiens; identical to SEQ ID NO: 1879906

SEQ ID NO: 1879937 - DNA, 4001 bp, Homo sapiens; identical to SEQ ID NO: 1879907

SEQ ID NO: 1879938 - DNA, 4001 bp, Homo sapiens; identical to SEQ ID NO: 1879908

SEQ ID NO: 1879939 - DNA, 4001 bp, Homo sapiens; identical to SEQ ID NO: 1879909

SEQ ID NO: 1879940 - DNA, 4001 bp, Homo sapiens; identical to SEQ ID NO: 1879910

SEQ ID NO: 1879941 - DNA, 4001 bp, Homo sapiens; identical to SEQ ID NO: 1879911

SEQ ID NO: 1879942 - DNA, 4001 bp, Homo sapiens; identical to SEQ ID NO: 1879912

SEQ ID NO: 1879943 - DNA, 4001 bp, Homo sapiens; identical to SEQ ID NO: 1879913

SEQ ID NO: 1879944 - DNA, 4001 bp, Homo sapiens; identical to SEQ ID NO: 1879904

SEQ ID NO: 1879945 - DNA, 4001 bp, Homo sapiens; identical to SEQ ID NO: 1879905

SEQ ID NO: 1879946 - DNA, 4001 bp, Homo sapiens; identical to SEQ ID NO: 1879906

SEQ ID NO: 1879947 - DNA, 4001 bp, Homo sapiens; identical to SEQ ID NO: 1879907

SEQ ID NO: 1879948 - DNA, 4001 bp, Homo sapiens; identical to SEQ ID NO: 1879908

SEQ ID NO: 1879949 - DNA, 4001 bp, Homo sapiens; identical to SEQ ID NO: 1879909

SEQ ID NO: 1879950 - DNA, 4001 bp, Homo sapiens; identical to SEQ ID NO: 1879910

SEQ ID NO: 1879951 - DNA, 4001 bp, Homo sapiens; identical to SEQ ID NO: 1879911

SEQ ID NO: 1879952 - DNA, 4001 bp, Homo sapiens; identical to SEQ ID NO: 1879912

SEQ ID NO: 1879953 - DNA, 4001 bp, Homo sapiens; identical to SEQ ID NO: 1879913

SEQ ID NO: 1879954 - DNA, 4001 bp, Homo sapiens; identical to SEQ ID NO: 1879904

SEQ ID NO: 1879955 - DNA, 4001 bp, Homo sapiens; identical to SEQ ID NO: 1879905

SEQ ID NO: 1879956 - DNA, 4001 bp, Homo sapiens; identical to SEQ ID NO: 1879906

SEQ ID NO: 1879957 - DNA, 4001 bp, Homo sapiens; identical to SEQ ID NO: 1879907

SEQ ID NO: 1879958 - DNA, 4001 bp, Homo sapiens; identical to SEQ ID NO: 1879908

SEQ ID NO: 1879959 - DNA, 4001 bp, Homo sapiens; identical to SEQ ID NO: 1879909

SEQ ID NO: 1879960 - DNA, 4001 bp, Homo sapiens; identical to SEQ ID NO: 1879910

SEQ ID NO: 1879961 - DNA, 4001 bp, Homo sapiens; identical to SEQ ID NO: 1879911

SEQ ID NO: 1879962 - DNA, 4001 bp, Homo sapiens; identical to SEQ ID NO: 1879912

SEQ ID NO: 1879963 - DNA, 4001 bp, Homo sapiens; identical to SEQ ID NO: 1879913

SEQ ID NO: 1879964 - DNA, 4001 bp, Homo sapiens; identical to SEQ ID NO: 1879904

SEQ ID NO: 1879965 - DNA, 4001 bp, Homo sapiens; identical to SEQ ID NO: 1879905

SEQ ID NO: 1879966 - DNA, 4001 bp, Homo sapiens; identical to SEQ ID NO: 1879906

SEQ ID NO: 1879967 - DNA, 4001 bp, Homo sapiens; identical to SEQ ID NO: 1879907

SEQ ID NO: 1879968 - DNA, 4001 bp, Homo sapiens; identical to SEQ ID NO: 1879908

SEQ ID NO: 1879969 - DNA, 4001 bp, Homo sapiens; identical to SEQ ID NO: 1879909

SEQ ID NO: 1879970 - DNA, 4001 bp, Homo sapiens; identical to SEQ ID NO: 1879910

SEQ ID NO: 1879971 - DNA, 4001 bp, Homo sapiens; identical to SEQ ID NO: 1879911

SEQ ID NO: 1879972 - DNA, 4001 bp, Homo sapiens; identical to SEQ ID NO: 1879912

SEQ ID NO: 1879973 - DNA, 4001 bp, Homo sapiens; identical to SEQ ID NO: 1879913

SEQ ID NO: 1879974 - DNA, 4001 bp, Homo sapiens; identical to SEQ ID NO: 1879904

SEQ ID NO: 1879975 - DNA, 4001 bp, Homo sapiens; identical to SEQ ID NO: 1879905

SEQ ID NO: 1879976 - DNA, 4001 bp, Homo sapiens; identical to SEQ ID NO: 1879906

SEQ ID NO: 1879977 - DNA, 4001 bp, Homo sapiens; identical to SEQ ID NO: 1879907

SEQ ID NO: 1879978 - DNA, 4001 bp, Homo sapiens; identical to SEQ ID NO: 1879908

SEQ ID NO: 1879979 - DNA, 4001 bp, Homo sapiens; identical to SEQ ID NO: 1879909

SEQ ID NO: 1879980 - DNA, 4001 bp, Homo sapiens; identical to SEQ ID NO: 1879910

SEQ ID NO: 1879981 - DNA, 4001 bp, Homo sapiens; identical to SEQ ID NO: 1879911

SEQ ID NO: 1879982 - DNA, 4001 bp, Homo sapiens; identical to SEQ ID NO: 1879912

SEQ ID NO: 1879983 - DNA, 4001 bp, Homo sapiens; identical to SEQ ID NO: 1879913

SEQ ID NO: 1879984 - DNA, 4001 bp, Homo sapiens; identical to SEQ ID NO: 1879904

SEQ ID NO: 1879985 - DNA, 4001 bp, Homo sapiens; identical to SEQ ID NO: 1879905

SEQ ID NO: 1879986 - DNA, 4001 bp, Homo sapiens; identical to SEQ ID NO: 1879906

SEQ ID NO: 1879987 - DNA, 4001 bp, Homo sapiens; identical to SEQ ID NO: 1879907

SEQ ID NO: 1879988 - DNA, 4001 bp, Homo sapiens; identical to SEQ ID NO: 1879908

SEQ ID NO: 1879989 - DNA, 4001 bp, Homo sapiens; identical to SEQ ID NO: 1879909

SEQ ID NO: 1879990 - DNA, 4001 bp, Homo sapiens; identical to SEQ ID NO: 1879910

SEQ ID NO: 1879991 - DNA, 4001 bp, Homo sapiens; identical to SEQ ID NO: 1879911

SEQ ID NO: 1879992 - DNA, 4001 bp, Homo sapiens; identical to SEQ ID NO: 1879912

SEQ ID NO: 1879993 - DNA, 4001 bp, Homo sapiens; identical to SEQ ID NO: 1879913

SEQ ID NO: 1879994 - DNA, 4001 bp, Homo sapiens; identical to SEQ ID NO: 1879904

SEQ ID NO: 1879995 - DNA, 4001 bp, Homo sapiens; identical to SEQ ID NO: 1879905

SEQ ID NO: 1879996 - DNA, 4001 bp, Homo sapiens; identical to SEQ ID NO: 1879906

SEQ ID NO: 1879997 - DNA, 4001 bp, Homo sapiens; identical to SEQ ID NO: 1879907

SEQ ID NO: 1879998 - DNA, 4001 bp, Homo sapiens; identical to SEQ ID NO: 1879908

SEQ ID NO: 1879999 - DNA, 4001 bp, Homo sapiens; identical to SEQ ID NO: 1879909

SEQ ID NO: 1880000 - DNA, 4001 bp, Homo sapiens; identical to SEQ ID NO: 1879910

SEQ ID NO: 1880001 - DNA, 4001 bp, Homo sapiens; identical to SEQ ID NO: 1879911

SEQ ID NO: 1880002 - DNA, 4001 bp, Homo sapiens; identical to SEQ ID NO: 1879912

SEQ ID NO: 1880003 - DNA, 4001 bp, Homo sapiens; identical to SEQ ID NO: 1879913

SEQ ID NO: 1880004 - DNA, 4001 bp, Homo sapiens; identical to SEQ ID NO: 1879904

SEQ ID NO: 1880005 - DNA, 4001 bp, Homo sapiens; identical to SEQ ID NO: 1879905

SEQ ID NO: 1880006 - DNA, 4001 bp, Homo sapiens; identical to SEQ ID NO: 1879906

SEQ ID NO: 1880007 - DNA, 4001 bp, Homo sapiens; identical to SEQ ID NO: 1879907

SEQ ID NO: 1880008 - DNA, 4001 bp, Homo sapiens; identical to SEQ ID NO: 1879908

SEQ ID NO: 1880009 - DNA, 4001 bp, Homo sapiens; identical to SEQ ID NO: 1879909

SEQ ID NO: 1880010 - DNA, 4001 bp, Homo sapiens; identical to SEQ ID NO: 1879910

SEQ ID NO: 1880011 - DNA, 4001 bp, Homo sapiens; identical to SEQ ID NO: 1879911

SEQ ID NO: 1880012 - DNA, 4001 bp, Homo sapiens; identical to SEQ ID NO: 1879912

SEQ ID NO: 1880013 - DNA, 4001 bp, Homo sapiens; identical to SEQ ID NO: 1879913

SEQ ID NO: 1880014 - DNA, 4001 bp, Homo sapiens; identical to SEQ ID NO: 1879904

SEQ ID NO: 1880015 - DNA, 4001 bp, Homo sapiens; identical to SEQ ID NO: 1879905

SEQ ID NO: 1880016 - DNA, 4001 bp, Homo sapiens; identical to SEQ ID NO: 1879906

SEQ ID NO: 1880017 - DNA, 4001 bp, Homo sapiens; identical to SEQ ID NO: 1879907

SEQ ID NO: 1880018 - DNA, 4001 bp, Homo sapiens; identical to SEQ ID NO: 1879908

SEQ ID NO: 1880019 - DNA, 4001 bp, Homo sapiens; identical to SEQ ID NO: 1879909

SEQ ID NO: 1880020 - DNA, 4001 bp, Homo sapiens; identical to SEQ ID NO: 1879910

SEQ ID NO: 1880021 - DNA, 4001 bp, Homo sapiens; identical to SEQ ID NO: 1879911

SEQ ID NO: 1880022 - DNA, 4001 bp, Homo sapiens; identical to SEQ ID NO: 1879912

SEQ ID NO: 1880023 - DNA, 4001 bp, Homo sapiens; identical to SEQ ID NO: 1879913

SEQ ID NO: 1880024 - DNA, 4001 bp, Homo sapiens; identical to SEQ ID NO: 1879904

SEQ ID NO: 1880025 - DNA, 4001 bp, Homo sapiens; identical to SEQ ID NO: 1879905

SEQ ID NO: 1880026 - DNA, 4001 bp, Homo sapiens; identical to SEQ ID NO: 1879906

SEQ ID NO: 1880027 - DNA, 4001 bp, Homo sapiens; identical to SEQ ID NO: 1879907

SEQ ID NO: 1880028 - DNA, 4001 bp, Homo sapiens; identical to SEQ ID NO: 1879908

SEQ ID NO: 1880029 - DNA, 4001 bp, Homo sapiens; identical to SEQ ID NO: 1879909

SEQ ID NO: 1880030 - DNA, 4001 bp, Homo sapiens; identical to SEQ ID NO: 1879910

SEQ ID NO: 1880031 - DNA, 4001 bp, Homo sapiens; identical to SEQ ID NO: 1879911

SEQ ID NO: 1880032 - DNA, 4001 bp, Homo sapiens; identical to SEQ ID NO: 1879912

SEQ ID NO: 1880033 - DNA, 4001 bp, Homo sapiens; identical to SEQ ID NO: 1879913

SEQ ID NO: 1880034 - DNA, 4001 bp, Homo sapiens; identical to SEQ ID NO: 1879904

SEQ ID NO: 1880035 - DNA, 4001 bp, Homo sapiens; identical to SEQ ID NO: 1879905

SEQ ID NO: 1880036 - DNA, 4001 bp, Homo sapiens; identical to SEQ ID NO: 1879906

SEQ ID NO: 1880037 - DNA, 4001 bp, Homo sapiens; identical to SEQ ID NO: 1879907

SEQ ID NO: 1880038 - DNA, 4001 bp, Homo sapiens; identical to SEQ ID NO: 1879908

SEQ ID NO: 1880039 - DNA, 4001 bp, Homo sapiens; identical to SEQ ID NO: 1879909

SEQ ID NO: 1880040 - DNA, 4001 bp, Homo sapiens; identical to SEQ ID NO: 1879910

SEQ ID NO: 1880041 - DNA, 4001 bp, Homo sapiens; identical to SEQ ID NO: 1879911

SEQ ID NO: 1880042 - DNA, 4001 bp, Homo sapiens; identical to SEQ ID NO: 1879912

SEQ ID NO: 1880043 - DNA, 4001 bp, Homo sapiens; identical to SEQ ID NO: 1879913

SEQ ID NO: 1880044 - DNA, 4001 bp, Homo sapiens; identical to SEQ ID NO: 1879904

SEQ ID NO: 1880045 - DNA, 4001 bp, Homo sapiens; identical to SEQ ID NO: 1879905

SEQ ID NO: 1880046 - DNA, 4001 bp, Homo sapiens; identical to SEQ ID NO: 1879906

SEQ ID NO: 1880047 - DNA, 4001 bp, Homo sapiens; identical to SEQ ID NO: 1879907

SEQ ID NO: 1880048 - DNA, 4001 bp, Homo sapiens; identical to SEQ ID NO: 1879908

SEQ ID NO: 1880049 - DNA, 4001 bp, Homo sapiens; identical to SEQ ID NO: 1879909

SEQ ID NO: 1880050 - DNA, 4001 bp, Homo sapiens; identical to SEQ ID NO: 1879910

SEQ ID NO: 1880051 - DNA, 4001 bp, Homo sapiens; identical to SEQ ID NO: 1879911

SEQ ID NO: 1880052 - DNA, 4001 bp, Homo sapiens; identical to SEQ ID NO: 1879912

SEQ ID NO: 1880053 - DNA, 4001 bp, Homo sapiens; identical to SEQ ID NO: 1879913

SEQ ID NO: 1880054 - DNA, 4001 bp, Homo sapiens; identical to SEQ ID NO: 1879904

SEQ ID NO: 1880055 - DNA, 4001 bp, Homo sapiens; identical to SEQ ID NO: 1879905

SEQ ID NO: 1880056 - DNA, 4001 bp, Homo sapiens; identical to SEQ ID NO: 1879906

SEQ ID NO: 1880057 - DNA, 4001 bp, Homo sapiens; identical to SEQ ID NO: 1879907

SEQ ID NO: 1880058 - DNA, 4001 bp, Homo sapiens; identical to SEQ ID NO: 1879908

SEQ ID NO: 1880059 - DNA, 4001 bp, Homo sapiens; identical to SEQ ID NO: 1879909

SEQ ID NO: 1880060 - DNA, 4001 bp, Homo sapiens; identical to SEQ ID NO: 1879910

SEQ ID NO: 1880061 - DNA, 4001 bp, Homo sapiens; identical to SEQ ID NO: 1879911

SEQ ID NO: 1880062 - DNA, 4001 bp, Homo sapiens; identical to SEQ ID NO: 1879912

SEQ ID NO: 1880063 - DNA, 4001 bp, Homo sapiens; identical to SEQ ID NO: 1879913

SEQ ID NO: 1880064 - DNA, 4001 bp, Homo sapiens
tcctccgccctgtcgcggaggcagcgttttggatccctcgccgcacaggggctcctgcgaggccccctcttgccccacccacccagagccgtcagggctggccgaaggcgaacagccggcccagccgcgcggggcctttctctcacaacgcccccaccacggtcgcttgtcccgaccaagacccggccgggggggcaagagggcgtggggtgtagcgggtcggggggtggccctgttttgccccgggctggcactagaggcggcggcctgatctcgggtgagagggcctgagagaaacccagacacaccccaccgccaccaggagcaaatccactcccccacacacagacacacccgggcgcgctcgcacgcgcgcgcgcggactcacacacacacacacagacacacagacacacgcacacacgcacgcgcacacgcacgcacacacacacgcggcttgaaggagagcaaggacgagatggatggagagatagaaaccgagggagggagagagacagcgatcgagagagacaggggagggcgagagggaaggagacagacagagaggctgagaaagagagaggcacagagaaagagagagagagagacagagagacagagggaaaacgacaaaagtagcgcgaggtccagggggaaacccagaagagagaggcggagggagctagagagcgagagcgatagagccttagagaggaagtgcccggctccgttaggcagcgccgtcttgagcaggtcgggatagggtggagggggcttgggctgcgcccagaacacgggggccaggcggtccgtgcgagaggaccaacggagcgctgaggcgggcgttttcttggatgaattgcttgctttggaggtgggtttcgtaggctcctgcctttcttggcagctccctgtgctctgggtgccttgcggcgggccccgagatttgcagagcgcgcccgcccgtttggcgggagccgtggcaccgggcgggcccggaggcctgggtctctggcgagtcctcgggactggagtcgtcgacacgaagcggggggcattgggaatcccgggtgcacagggcctgttttcccggtggctggcgaagcaatgtccttcccccgggtaaagcagcccatgcgttccggagccgacgtcttggctggcgtctgtggcacccgctgcccctgcccgccccttcccccggtttggaagggtgcgacgacggcgcccgatgggtgaattgaatcgcctgggcgttccgggagcgggaaggcaccgcgaacggcagggaacccagcggctgcgcctttggggtccggccccctgccctcccaggctggagccgggctcctggcggggcggcggcgaggcggaagcggtgggatgctgctgccgggccggcgtgcagtaggggcggacccccagcaggaggaccccggctgcggctgcggcgggggtgtaggtgggcggtaaagggggagcagagtcaggggaggttgggtagcatggcgactgtggggggaagggaggcagccgggaagccacaaaagcctacagcaggccgggcgggcgcggtggctcgcgcctgtaatcccagcactctgggaggccgaggcgggtggatcacgaggtcaggagctccagaccatcccggctaacagggtgaaagcccgtctctaggaaaaatagaacaaagtagccgggcgtggtggcgggcgcctgtaggcccagctactcgggaggctgaggccggggaatggcgtgaacccgggaggcggagcttgcagtgagccgagatggcgccactgcactccagcctgggcgacagggcgagactccgtctggaagaaaaggaaagaaacagcaaaaagccaaagaaaaagcctacagcacccggtattcccaggcggtctcccgtccaagtactaaccaggcccgaccctgcttagcttccgagatcagacgagatcgggcgcgttcagggtggtatggccgtagacgctgaaggaggcgcctggctgccccaagagcccagcccggcccggccgtgcccgccggattgcagccgacaccgccagcccggggccgcggggctcggatcggggacccccgagccgctggcccgcggccttcccccggctcccgcgctcccgagcttccaccacatcgggcccgctcggagcagggagtgctccgaggcgtcagggcccagggcccacgatcctgggacgccctccggtcctccgccctgtcgcggaggcagcgttttggatccctcgccgcacaggggctcctgcgaggccccctcttgccccacccacccagagccgtcagggctggccgaaggcgaacagccggcccagccgcgcggggcctttctctcacaacgcccccaccacggtcgcttgtcccgaccaagacccggccgggggggcaagagggcgtggggtgtagcgggtcggggggtggccctgttttgccccgggctggcactagaggcggcggcctgatctcgggtgagagggcctgagagaaacccagacacaccccaccgccaccaggagcaaatccactcccccacacacagacacacccgggcgcgctcgcacgcgcgcgcgcggactcacacacacacacacagacacacagacacacacgcacacacgcacgcgcacacgcacgcacacacacacgcggcttgaaggagagcaaggacgagatggatggagagatagaaaccgagggagggagagagacagcgatcgagagagacaggggagggcgagagggaaggagacagacagagaggctgagaaagagagaggcacagagaaagagagagagagagacagagagacagagggaaaacgacaaaagtagcgcgaggtccagggggaaacccagaagagagaggcggagggagctagagagcgagagcgatagagccttagagaggaagcgcccggctccgttaggcagcgccctcttgagcaggccgggatagggtggagggggcttgggctgcgcccagaacacggggtccaggcggtccgtgcgagaggaccaacggagcgctgaggcgggcgttttcttggatgaattgcttgctttggaggtgggtttcgtaggctcctgcctttcttggcacctccctgtgctctgggtgccttgcggcgggccccgagatttgcagagcgcgcccgcccgtttggcgggagccgtggcaccgggcgggcccggaggcctgggtctctggcgagtcctcgggactggagtcgtcgacacgcagcgggagggcattgggaatcccgggtgcacagggcctgttttcccggtggctggcgaagcaatgtccttcccccgggtaaagcagcccatgcgttccggagccgacgtcttggctggcgtctgtggcacccgctgcccctgcccgccccttcccccggtttggaagggtgcgacgacggcgcccgatgggtgaattgaatcgcctgggcgttccgggagcgggaaggcaccgcgaacggcagggaacccagcggctgcgcctttggggtccggccccctgccctcccaggctggagccgggctcctggcggggcggcggcgaggcggaagcggtgggatgctgctgccgggccggcgtgcagtaggggcggacccccagcaggaggaccccggctgcggctgcggcgggggtgtaggtgggcggtaaagggggagcagagtcaggggaggttgggaagcatggcgactgtggggggaagggaggcagcggggaagccacaaaagcctacagcaggccgggcgggcgcggtggctcgcgcctgtaatcccagcactctgggaggccgaggcgggtggatcacgaggtcaggagctccagaccatcccggctaacagggtgaaagcccgtctctaggaaaaatagaacaaagtagccgggcgtggtggcgggcgcctgtaggcccagctactcgggaggctgaggccggggaatg

SEQ ID NO: 1880065 - DNA, 4001 bp, Homo sapiens
tgttgagttatgagttccttatgtattatggatattaatcccttatcagatatattatttacaaatatgttctctgattctgtggattgtctttccactctgttgatagtgtcctttgatgtacaagggttttctttctttcttttttttttttttctgagacggagtttcgctcttgtccaggctggagtgcaatgacgctatctcggctcactgcaacctctgcctcctggatgcaagcgattctcctgcctcagcctcccgagtagctgggattacaggcatgcaccaccatgcccggctaaattttttgtatttttagtagagacagggtttcaccatattgtccaggttggtcctgaccttctgacctcatgatctgcccacctcagcctcccaaagtgctgggagccaccatgcccggctatttttttttttttttttttgagacagagtctcactctgttgcccaggctggagtgcagtagcacgatctcggctcacagcaacaccgcctcccggtgcaagcaattctcctgcctcagcctcccaagtagctgggattacaagcgcctgacaccaggcctggctaatttttgtatttttaggagcgacggggtttcaccatgttggctaggctggtctccaacccctgacctcaggtgatccgcccacctcggcctcccaaagtgctgggattacaggcgtgagccaccgcacgcggccgggtttttcattttaattttaaaattaatgttaacattttaaaatttgatgaggaccaatttattttttgttgcttgtaaaccattgtttatatccaagaaatcactgacaaattcgatgtcattttcccctgtgttttctctaagagttttatagtttaaggtcttacatttaggtctttaatcttttttttttttttttttttgagacggagttttgctcttgttgcccaggctggagtgcaatggtgcggtctcggctcactgcaacctccgcctcctgggttcaagcaattctcctgcctcagcctcctgagtaactgggattacaggcatactccaccacgcctggctaattttgtatttttagttagagaaggggtttctccatgttggtcaggctggtcttgaaatcccgacttcaggtgatccgcccacctcggcctctaggagtgctgggattacaggcgtgagccactgcgcccggccttgaattaatcttttgtgtatggtataaggtatagaaaaagtttgctaaggcctggtgaaggtaatttcaatttcctctgcttcataaaataacattgcaggccgggcgcgatggccacgcctgtaatcctagcactcctagaggccgaggtgggcggatcaccagatgaagagatggagaccatcctggccaacatggtgaacccgtctctaccaaaaatgcaaaaattagctgggcgcggaggcgcacgcctgtagtcccagccattcggggggctgaggcaggtctcctaaagtcagggactaggtctattccatttgctgctatactgtaacacagttgccaaataatttcctcatacgcgcgccaccacgcacgtataatttttaaattcttttgttggtggggccttcctgctttgttgcttaagctagcctcccacacgagaacacgcagggttatcccacttccacttcttaagtgctaggatacaggtctgaattaccttgctaattaggtcacctgcggttcatacaaataactatgcagcctctaaaaaaaaaaaaaaacacacacagaatctcttttcagttacaaaaagcaccacttactccaaacgcgtaatatttcgcctaacatataacagtaaagaaagggcgccgggaccaacgatcaccagctgcccaaataccaaaaaattatgcttccgaaatctcttgatgtcgattccgcacgcagagcaatcgagttgccctacgtgtgccactcacgacagaagccctttttgctttctctgtcaccaaagcagggtggcagtgttaccaaatccattttttggtaaaggtgaacacaaaatccaagcaactctttatttcaacttcctgaagttgaagagcgaattccatttcttctgaactgaaaggaagacttcacaaggagaatctggaatttgtcctttcgattttttagttagaagaaaaaaatgtagtgagttgatatgcaaatatactcagggcttgctgggaatgtgctggcgggcaccgagggagtggcggggaagagcggctgcgcgagcgagggaggaaccgctccttccggttgcagtaagtgctgggtctttcttgtcaactgctcacgacagaaggcgtctcatggcgttggaataccggctctcagcggctgtaggtatctgactggggaagacaagaatcacaacctatccaaattgaaaatgtgtaacttgtgccacccctagccaccaccttggagcagcccaggcaggcgtgcagtggaagcacaaggtcacaaggtcacgcataagctgattgtcatggtgtgttcatattgtggcatgctatatgctgcacttcgaaggagtattagaattttttttttttaaatcgagtgaaaagagttgtagaataaggtacagcatagcattaatgtgaaaaatgaaatactgtacctcagatgactgaagtagatctttatcaacacaatttttttttttttgagacggagtctcgctctgtcgcccaggctgcagtgcagtggcgcgatatcggctcaccgcaagctccacctcctgggttcacgccattctcctgcctcagcctcccaagtagctaggactacaggcccctgccaccatgcccggctaattttttgtatttttagtagagacgggggtttcaccatgttagccaggatggtctcgatctcctgactttgtgatccgcccgcctcagcctcccagagtgctgggattataggcgtgagccaccgtgcccggcctgttcccattttttttatggataatgatggacgggtgctgtgggtcatgcctgtaatcccaacactttgagagcccaggagtttgagaccacaatgggcaacatatagagacctcgtccctaccccaaaataaaatattaactgggcatcgtggcatgggcctgtggtcccagctaccccaaaggctgaggcagaaggattgcttgagccagggaagtcaaggctacagtgagccataatcatgccactgcactccagcctaggtgacagatgaagatcttgtctcaagaaaataaaaaaaaaacaatatgtgacaattgtaaagaaattgaaacagcacagagatgttataaaatgtgaaaatgcttcctccaaactgtgaacagtttagtgtttatcttgccagactgctttctatgtatgtacacatcgtatatatataaaaataaatgttttcaggccaggcatggtggctcatgcctgtaatcccagcactttgggaagctgaggtgggtggatcacctaagatcaggagtttgagaccagcctggccaacatggtgaaaccctgtctctattaaaaatacaaaaaattggccgggtgcggtggctcacgcctgtaatcccagcactttgagaggccgaggtgggcagatcactaggtcagaagatcgagaccatcctggctaacacggtgaaaccccgtctctactaaaaatacaaaaaattagccgggtgtggtggcgggtgcctgtagtcccagctactcgggaggctgaggcaggagaatggcgtgaacccaggaggtggagcttgcggtgagccgagattgcaccactgcactccagcctgggcgacagagtgagactctgtctcaaaaaaaaaaaaaaaaaaaattggccgagtgtggtggcaggtgcctgtaatcctagctactagggagctgaggcaggagaatcacttgaacctgggaggcagaggttgcagcgagcc

SEQ ID NO: 1880066 - DNA, 4001 bp, Homo sapiens
gagggaacatgagccaatagctcagtgggttcagatacgcaccaagtgcctgttggatacaggattctactgtctccaataatatgtctcagatggactagtttttttgttttttgtctgttttgtttttgttttttattttttgtttttgagagagagtctccctctgtcgcccaggctggggtgcaacggcacgatctcggctcacggcaacctccgcctcccgggttcaagcgattctcctgcctcagcctcccaagtagttgggactacagacgcacaccaccacgtctggctattttttttgttttgttttgttttgttttgtatttttaacagagacagagtttcgccatgttggtcaggctggtctcgaactcctgacctcagttgatcagaagtaggtgaggtcagaaaacataccctgggagaggctggcacaatgcccagatccgccatcgctaggcctggggttttcttctgtagtattcatgtagtgcagggacaaaaccaattagatacttctgggagttaaaaagagattaatttgccgggcgcggtgtctcacgcctgtaaccccagcactttgggagggttcacgaggtcaggagatcgagaccatcctggctaacgcggtgaaaccccgtctctactaaaaatacaaaaaattagccgggcgtggtggccggcgcctgtagtcccagctactggtaggaggctgaggcaggagaatggcgtgaacccgggagactgagcttgcagagagtcgagatcgtgccactgcactccagcctgagcgacagagcgagactccgtcaaaaaaaaaaaaaaaaaaaaaaaagatgaatttacagtgtcatttgagaaggggtattaaggaatttgccagggtactgacgcgtgtcaggtgcaaactgcaggttgagagagagctaagtattttctgtccatgaaggtgataagcgagggcctgaagaaagaggaaggggggaggacactggcgccagaaataggaaagggctgcttgggggtgggaaggatgggtcggggtgctatctagaaagctgcctggcaatggctgtgggatgcggaagcgagacatcaaacaagaagctgtcgcttaaataaagtctgaagaaagactagatatgtaaacggcaggagatagtagggaaactggacccgtctcctcataaaacttcccgccttatatttcagggaggatcgcagcgcatttcggccaagacaggtgagactgcggttttgacctgcgggcctcgatgaattgcgttaggacacctgggctccgggagagccgttccactccgcaaagtaagcgtgttatgtctacaacccaacggggacgcgctaagagccctaaaggccctgctttcatcccaaagaacagcccccgcctgcgtagtttgtagccggctctatgaggtgagaacacattccccgctagcacagaaatcctacagactcctgagggggctgcagctagaagcagaggctgtgtgaaatgtgactgggggctagggaaaaacacgtagattttcacagaccctgagaacccaagagactgcagaccatgggcagacaaatctctgcaaaaagcagccccgcctagataaaggaagagctgtgcggccttcgcgctagctagcttgtgtaaaggtcgacgattcttatttctcccggggcggggagaaagcgacatattactactatttctcagccttcgactgtgagagtaacgattaagactaaaacacaagccagtaaaaaaaacaagtaacccttgctgtgtagactattctttaaactacaaaaaatcaggggaaagcgcgaacgcagtcccccactaccacaaattatgcagtcgagtttcccacatttggggaaatcgcaggggtcagcacatccggagtgcaatggataagcctcgccctgggaaaaccaccttcgtgatcatggtatctcccctgccaggtaagtatgagatcttgcacctccgccccgccacagcctcacacgcttcaccctttacacgcacggtcacttgccccgcgcagccccccccccccccccccccacccccagccctcctagccctgacacacagctgggactctcaggtccgaccagcggtcctgaacccgctcccacggcacgggaaatccttcgtggcgcagcagcaggtggggaagcagcagcccctgcgctgcctcatctacatagaagtcgccctatccgtgatgtcaccgacagtgcctttcccagtccccgtctgcctttctgccgctcagcctaccaacccgctgccggagccggcagggggaagtgacgtctgtctctcccttttttccctcccgccccggcatctgttctcgcccgaagaagctggtccttagcctgcgctgcggagcaacctttcagtggccagctggagcctgggcaccgttcttcaaataatggcttttaattctcagacgagaacgtttaggattacaaaagaaaccggttctcttcacatccttatccttgtcatgtagcattccgcttgaaattggaagccgttcaatgtcagagagaaaccatatttatgaaatgaaagaggcttctcagatgactgcaaaccagccttccttactggttttatcactggtaatgttataaagacagttgtccagtttcatgaatcttgtaggtttttgtttgtttatttgtttgcttttgatgttgttgttgttgctgttgttttccaacttcagtattgtagaaaaatatgctgccccagaagagatgattggacactctccagcgtggtgttggactttgtcatctcttgcacagccatctccagaccttagtgtttacctcacgttagttttttatattctgcaaagacaaaaccaaaataatccaaatttgacacaaatacctgggatacatcttatttgagatgtttaacaaatgtctggatcatcttttcttacattggattataacgcaggaaacactgtgaagtaagtaaagttggaattcccaagtcaaagaccatttgaatatttacaagtagatttgaggcaggaataatacagggtggccgcagggtaacaaattctaggcagcagatttacatgacttgaggctatgggctgataagacgctgaaaaaccagggtgtggaccaagctggctaagactgactggacccaatgtggtgctggatttgatgtaggttttaccgaggccctcattatatgctcattaacatactaaatcacacacccaccagtgccatgacagttctgagaccaatatgtgatgtaaaaatggatggcaccacagttccgagaaatctccacctttacccaggaattttcatgactattccactccttggttagagaaaccaatcaagatgaaaccccagaacccattgttctctgtcgggtatgcccgaactcccctttcttgagtgtgtactttttgctttgcaataaatctcttctttcactgtttgctgactcatccttgactttgttcttgagatggtgtcaagagcctggacaccacagctggggtcgagatcccactagtgtccggggactttccccaggccaccagtatcagattctattccattgctcaaatcacaaaacatcgagtggagagttctccttggagaccataaagtaaagattctgtggcatggtggccagttaggccactggaaggcatggcaaaatattgaaaatgagagattaggtgacagtgtagtaataactgctgaatactaaatatttgagccaggccccattccctggatactgacagggagacacattgtccaggtagtagtggagaaatactttctgggtatctgaccagcctttgtggaaagaactggcaccatcctgcagatgtaaccgcctgatgggttcttcctgcccactgtacatacaaaatcaattcatggagaccatggcattgagg

SEQ ID NO: 1880067 - DNA, 4001 bp, Homo sapiens
agggaacatgagccaatagctcaatgggttcagatctgcaccaagtgcctgttggatgcaggattctactgtctccaataatatgtctcagatggactagtttttttgttttttgtttgttttgtttttgttttttattttttattttttagagaaagtctccctctgtcgcccaggctggggtgcaacggcacgatctcggctcaccgcaacctccgcctcccgggttcaagcgattctcctgcctcagcctcccaagtagttgggactacagacgcacaccaccacgtctggctatttttttgtgttgttttgttttgttttgtatttttaacagagacagagtttcaccatgttggtcaggctggtctcgaactcctgacctcagttgatcagaagtaggtgaggtcagaaaacataccctgggagaggctggcacaatgcccagatccgccatcgctaggcctggggttttcttctgtagtattcatgtagtgcagggacaaaaccaattagatacttctgggagttaaaaagagattaatttgccgggcgcggtggctcacgcctgtaaccccagcactttgggagggttcacgaggtcaggagatcgagaccatcctggctaacgcggtgaaaccccgtctctactaaaaatacaaaaaactagccgggcgtggtggccagcgcctgtagtcccagctcctggtaggaggctgaggcaggagaatggcgtgaacccgggaggcggagcttgcagagagccgagatcgtgccactgcactccagcctgagcgacagagcgagactccgtgaaaacaaaaaaaaaaaaaaaaaaaaagagatgaatttacagtgtcatttgagaagcggtattaaggaatttgccagggtactgacgcgtgtcaggtgcaaactgcaggttgagagagagctaagtattttctgtccatgaaggtgataagcgagggcctgaagaaagaggaagaggggaggacactggcgccagaaataggaaagggctgcttgggggtgggaaggatgggtcggggtgctatctagaaagctgcctggcaatggctgtgggatgcggaagcgagacatcaaacaagaagctgtcgcttaaataaagtctgaagaaagactagatatgtaaacggcaggagatagtagggaaactggacccgtctcctcataaaacttcccgccttatatttcagggaggatcgcagcgcatttcggccaagacaggtgagactgcggttctgacctgcgggcctcgatgaattgcgttaggacacctgggctccgggagagccgttccactccgcaaagtaagcgtgttatgtctacaacccaacggggacgcgctaagagccccaaaggccctgctttcatcccaaagaacagcccccgcctgcgtagtttgtacccggctctatgaggtgagaacacattccccgatagcacagaaatcctacaaactcctgagggggctgcggctagaagcagacgctgtgtgaaatgtgactggaggttagggaaaaacacgtagattttcacagaccctgagaacccaagagactgcagaccatggacagacaaatctctgcaaaaagcagccccgcgtagataaaggaagagctgtgcggccttcgcgctagctagcttgtgtaaaggtcgacgcttcttatttctcccgaggcggggagaaagcgacatattactactattcctcaacctccgactgtgagagaaacgattaagagtaaagcacaagccagtaaaaaaaacaagtaaccctcgccgtgcagactgttctttaaactacaaaaatcaggggaaagcgcgaacgcagtcccccactaccacaaattatgcagtcgagtttcccacatttggggaaatcgcaggggtcagcacatccggagtgcaatggataagcctcgccctgggaaaaccaccttcgtgatcatggtatctcccctgccaggtaagtatgagcttttgcacctccgccccgccacagcctcacacgcttcaccctttacacgcacggtcacttgccccgcgcaccccccccccccacccccccccacccccagccctcctagccctcacacacagctgggactctcaggtccgaccagcggtcctgaacccgctcccacggcacgggaaatccttcgtggcgaagcagcagcccctgcgctgcctcatttacatagaagtcgccctatccgtgatgtcaccgacagtgcctttcccagtccccgtctgcctttctgccgctcagcctaccaacccgctgccggagccggcagggggaagtgacgtctgtctctccctttttccctcccgccccggcatctgttctcgcccgaagaagctggtccttagcctgcgctgcggagcaacctttcggtggccagctggagcctgggcaccgttcttcaaataatggcttttaattctcagacgagaacgtttaggattacaaaagaaaccggttctcttcacatccttatccttgtcatgtagcattccgcttgaaattggaagccgttcaatgtcagagagaaaccatatttatgaaatgaaagaggcttctcagatgactgcaaaccagccttccttactggttttatcactggtaatgttataaagacagttgtccagtttcatgaatcttgtaggtttttgtttgtttatttgtttgcttttgatgttgttgttgttgctgttgttttccaaattcagtattgtagaaaaatatgctgccccagaagagatgattggacactctccagcgtggtgttggactttgtcatctcttgcacagccatctccagaccttagtgcttacctcacgttagttttttatattctgcaaagacaaaaccaaaataatccaaatttgacacaaatacctgggatacatcttatttgagatgtttaacaaatgtctggatcatcttttcttacattggattataacgcaggaaacactgtgaagtaagtaaagttggaatccaagtcaaagaccatttgaatatttacaagtagatttgaggcaggaataatacagggtggccgcagggtaacaaattctaggcagcagatttacatgacttgaggctatgggctgataagacgctgaaaaaccagggtgtggaccaagctggctaagactgactggacccaatgtggtgctagatttgaggtaggttttacctaggccctcattatacgcttattaacatactaaatcacacacccaccagtgccatgacagttctgagaccaatatgtgatgtaaaaatggatggcaccacagttccgagaaatctccacctttacccaggaattttcacgaatattccactccttggttaaagaaacccatcgagatgaaaccccagaacccattgttctctctcgggtatgcccgaactcccctttcttgagtgtgtactttctgctttgcaatacatctcttctttcactatttgctgactcatccttgacttggttctccagatggtgtcaagagcctggacaccacagctggggtcgagatcccaccagtgtctggggaccttccccaggccaccagtatcagattctattccattgctcaaatcacaaaacattgaatggagaggtctcctctggagagcataaagtaaagattctgtggcatggtggccagttaggccactggaaggcatggcaaaatattgaaaatgagggattaggtgacggtatagtaactgctgaatactaaatacttgatccaggccccattccctggagactgacagagagacacatcgtccaggtagtagtggagaaatactttctgggtatctgaccagccttcgtggaaagaactggcaccatcctgcaggtgcaactgcctgatgggttcttcctgcccattgtacatacaaaatcaattcatggagaccatggcattgcagtaaagagtttaattgaca

SEQ ID NO: 1880068 - DNA, 4001 bp, Homo sapiens
ggaaatatcattattctcaggacaataaatagacaataaagaagactcacagaccagattagctgccatgtatcaccaaacagggactggatccttgtcaacacgacccaacagagattgtccccagaaattcacttcataacctcaaaaccaaaaacccacactgatggcaaaaaacaatgatgcaaagaatgagagagagagagagagagagagagagagggagagtgagagacctgtcctatagccatactcagtgggtaaaagccaaagagctcaatttctgctcatgatacttaatagaacatagggaacatgagccaatagctcaatgggttcagatctgcaccaagtgcctgttggacgcaggattctactgtctccaataatatgtctcagatgcactatttttttttctttttttgagacagagtcttactctgttgcccaggctgcggtgcaatggcgcgatctcggctcacagtaacctccacctcccgggttcaagtgattctcctgcctcagcctcccgagtagttgggattacagacagacaccactgcaccaggcaattattattattatcattattattattattgtgcgtgtgtatgtgtttttagtagagatggagttttgccatgttggacaggctggtcttgaactcctgacctcagctgatcaaaagtaggtgaggtcagaaaacataccctgggagaggctggcacaatgcccagaaccgccatcgctaggcctggggttttcctctgtagtggaatactagtattcatgtagtgcagggacaaaaccaattagatagttctgggagttaaaaagaggtgatttacagtgctatttgagaaggggtattaaggaatttgccagggcactgacgcgtgtcaggtgtaaacctcaggttgagagagagctaagtattttctgtccatgaaggtgataagcgagggcctgaagaaagagggactggggaggacactggcaccagaaataggaaagggcttcttgggggtgggaaggatgggtcacggtgctatctataaagttggctggcagtggatgtaggatgtgggagtgagacatcaaacatgaagcagtcgcttaaagtctgaagaaagactagatatataaacggcaggagatagtagggaaactggaccggctcctcataaaacttcccgccttctatctccgggaggatcgcagggcatttccgccaagacaggtgagactgcggttctgacctgcgggcctccgtgcatatgcgctagggcacctgggggccggcagagccgttcccctacgcaaagtaagcgtgttatgtctacaacccaacggggacactgagagccccaaaggccctgctttcttcccagagaactgcccatctgcataatttctacctggctctatgaggtgagaacacattccccgctagcacagaaatcctacaaactcctgtgggggctgcgcttggaagcagaggctgtgtaagaggtgactggggggtagggaaaaacacgaagattttcacacagggtgagaacccaagagactggagaccacggaccaatccctgcaaaaagcagccagggtagaaagggaagagctgagcggacttcacgatagctaatttgtgttacaaagccgatacggctgatgctcgctttttctcctatgacatgcaggcgacatgttacttcctattcccataaaccctccactgtaggattaacacctaagacaccaaccaagacacaaaccaatacaaaaaaagatatgacccttggcgtacagtctgtttttgaaactccagaaagtcaggggaaagcgcgaacgcagtcccccactaccacaaattatgcagtcgagtttcccacatttggggaaatcgcaggggtcagcacatccggagtgcaatggataagcctcgccctgggaaaaccaccttcgtgatcatggtatctcccctgccaggtaagtatgaaacgttgtgcctctgccccgacacagcctcatacgcctcactctttacacacacggtcacttgccccgcgcactcccgagccctttccagccctgacacacagctgggattctcacttccgatcagcggtcctgaacccgctcccagggcacgggaactcccttcgtggcgaagcagcaagtggcgaagcagcagcctctgcgctgcctcatctacatagaagtcgccctgtccgtgatgtcaccgacagtgccttgcccagtccccgtctgcctttctgccactcaaccgaccaatctgctgccagagtcgccaagaggaagtgacgtctgcctctccctttttccctcccgcccctgcgtctgttctctcccaaagaagctggtccttagcctgtgttaaggagcaatctttcggtggccagatggagccggggcatccttcttcaaataatggcttttaattcgcagactagaatgtttcggattacaaaagaaaccggttctcttcacatccttatccttgtgatgcagcattccgcttgcatttggaagccgtttaatatcagagagaagccatatttatgaaagtaaagaggctgctcagatgactgcaaaccagccttccttactggttttatcactggtaatgttataaagacagttgtccagtttcatgaatcttgtaggttttttttttttgatgttgtttttttttcaaaaatccgtattgtagaaaaatatgctgtcccagaagagatgattggacactctcaagcgtggtgctggactttgtcatctcttgcacagccatctccacaccttagtgcttacctcatgttagttttttatattctgcaaagacgaaaccaaaataatccaaatttgacacaaatacctgggctacatcttatttgagatgtttaacaaatgtctggatcatcttttcttatatattacgcaggaaacactgtgaagtaagcaaagttggaatgcccaagtgaaagaccatttgaatatttacaagtagatttcagacaggaatactacagggtggtcacaggataacaaattctaggcagcagatttacatgacttgaggctgtgggctgttaagacgctgaaaaaccagggtgtggaccaagctggctaaggctgagtggacccaacgtggtgctggattggatggaggttttacctaggccctcattatatgctcattaacatactaaatcacacacccgccagtgccatgacagttctgagaccagtgtttgatgtaaaaatggcaccacagttccaagaaatctccacctttacccaggaattttcgtgaacattccactccttggttaaagaaacccatcaagatgaaaccccagaacccattattctctcttgggtatgcccaagctcccctttcttgagagtgtactttttgctttgcaataaatctcttctttcactatctgctgactcatctttgactttgttctcgcgatggtgtcaagagcctggacaccacggctggggtcgagatcccaccagtgtccagggacctcccccagcccaccagtatcagattctattccattgctcaaatcacaaaacatcgagtggagagttctctttggagaccgtaaagtaaagattctgtggcatggtggccagttaggccactggaagcatggcaaaatattgaaaatgagggattgggtgacagtgtagtaactgctgaatactaaatacttgatccaggccccattccctggagattgacagggagacacattgtccaggtagtagtggagaaatgctttctgggtatctgaccagcctttgtggaaagaactggcaccatcctgcagatgtaaccacctgatgggttcttcctgaccaatgtacacaaaaattcaattcatggagaccatggcactgcaggaaagagtttcattgacacaggccagccacgacatgtgggagacagagttattactcaa

SEQ ID NO: 1880069 - DNA, 4001 bp, Homo sapiens
aatatcaggaaatgccattattctcaggacaataaatagacaataaagaagactcacagaccagattagctgtcatgtatcaccaaacagggactggatccttgttaacacgacccaacagagattgtccccagaaattcacttcataacctcaaaaccaaaaacccacactgatggcaaaaaataatgatgcaaagaatgagagagaaagagagagagagagagagagagagagagagagagagacctgtcctatagccatactcagtgggtaaaagccaaagagctcaatttctgctcatgatacttaatagaacatagggaacatgagccaatagctcaatgggttcagatctgcaccaagtgcctgttggacgcaggattctactgtctccaataatatgtctcagatgcactaattttttttctctttttgagacagagtcttactctgttgcccaggctgcggtgcaatggcgcgatctcggctcacagtaacctccacctcccgggttcaagcgattctcctgcctcagcctcccgagtagttgggattacagacacacaccactgcgcccggcaattattattattatcattattattattattgtgcgtgtgtatgtgtttttagtagagacggagttttgccatgttggtcaggctggtcttgaactcctgacctcagctgatcaaaagtaggtgaggtcagaaaacataccctgggagaggctggcacaatgcccagaaccgctatcgctaggcctggggttttcctctgtagtggaatactagtgttcatgtagtgcagggacaaaaccaattagatagttctgggagttaaaaagagatgatttacagtgccatttgagaaggggtattaaggaatttgccagggcactgatgcgtgtcaggtgtaaacctcaggttgagagagagctaagtattttctgtccatgaaggtgataagcgagggcctgaagaaagagggactggggaggacactggcaccagaaataggaaagggcttcttgggggtgggaaggatgggtcacggtgctatctataaagttggctggcagtggatgtaggatgtgggagtgagacatcaaacatgaagcagtcgcttaaagtctaaagaaacactagatatatgaactgcaggagatagtagggaaactggaccggctcctcataaaacttcccgccttctatctccgggaggatcgcagggcatttccgccaagacaggtgagactgcggttctgacctgcgggcctccatgcatatgcgctagggcacctgggggccggcagagccgttcccctacgcaaagtaagagtgttatgtctacaacccaacggggacactgagagccccaaaggccctgctttcttcccagagaacagcgcccatctgcataatttctacctggctctatgaggtgagaacacactccccgctagcacagaaatcctacaaactcctgtgggggctgcgcttggaagcagaggctgtgtaagaggtgacttggggggtagggaaaaacacgaagattttcacacagggtgagaacccaagagactggagaccacggaccaatccctgcaaaaagcagccagggtagaaatggaagagctgagcggacttcacgatagctaatttgtgttacaaagccgatacggctgatgctcgctttttctcctatggcgtgcaggccacatgttacttcttattccccaggcctccactgtaggattaacaactaagacacaaaccaatacgaaaaaagacatgacccttggcgtacggtctgtttttgaaactccagaaagtcaggggaaagcgcgaacgcagtcccccactaccacaaattatgcagtcgagtttcccacatttggggaaatcgcaggggtcagcacatccggagtgcaatggataagcctcgccctgggaaaaccaccttcgtgatcatggtatctcccctgccaggtaagtatgagatcttcgggctctgccccgacacagcctcatacgcctcactctttacacacacggtcacttgccccgcgcactcccgagccctttccagccctgacacacagctgggattctcacttccgatccgcggtcctgaacccgctcccagggcacgggaactccttcgtggcgaagcagcaagtggcgaagcagcagcctctgcgctgcctcatctacatagaagtcgccctgtccgtgatgtcaccgacagtgccttgcccagtccccgtctgcctttctgccactcaaccgaccaatctgctgccagagccgccaaggggaagtgacgtctgcctctccctttttccctcccgcccctgcgtctgttctctcccaaagaagctggtccttagcctgtgttaaggagcaacctttcggtggccagatggagccggggcatccttcttcaaataatggcttttaattcgcagactagaatgtttcggattacaaaagaaaccggttctcttcacatccttatccttgtgatgcagcattccgcttgcaattggaagccgtttaatatcagagagaaaccatatttatgaaagtaaagaggctgcttagatgactgcaaaccagccgtccttactggttttatcactggtaatgttataaagacagttgtccagtttcatgaatcttgtaggtttttttttttttgatgttgttttttttttcaaaaatccgtattgtagaaaaatatgctgtcccagaagagatgattggacactctcaagcgtggtgctggactttgtcatctcttgcacagccatctccacaccttagtgcttacctcatgttagttttttatattctgcaaagacgaaaccaaaataatccaaatttgacacaaatacctgggctacatcttatttgagatgtttaacaaatgtctggatcatcttttcttatatattacgcaggaaacactgtgaagtaagcaaagttggaatgcccaagtgaaagaccatttgaatatttacaagtagatttcagacaggaatactacagggtggtcacaggataacaaattctaggcagcagatttacatgacttgaggctgtgggctgttaagacgctgaaaaaccagggtgtggaccaagctggctaaggctgagtggacccaacgtggtgctggattggatggaggttttacctaggccctcattatatgctcattaacatactaaatcacacacccgccagtgccatgacagttctgagaccagtgtttgatgtaaaaatggcaccacagttccaagaaatctccacctttacccaggaattttcgtgaatattccaattcttggttaaagaaacccatcaagatgaaaccccagaacccattattctctcttgggtatgcccaagctcccctttcttgagtgtgtactttttgctttgcaataaatctcttctttcactatctgctgactcatctttgactttgttctcacgatggtgtcaagagcctggacaccacggctggggtcgagatcccaccagtgtccagggacctcccccagcccaccagtatcagattctattccattgctcaaatcacaaaacatcgagtggagagttctccttggagatcataaagtaaagattctgtggcatggtggccagttaggccactggaagcatggcaaaatattgaaaatgagggattaggtgacagtgtagtaactgctgaatactaaatacttgatccaggccccattccctggagattgacagggagacacattgtccaggtagtagtggagaaatgttttctgggtatctgaccagcctttgtggaaagaactggcaccatcctgcagatgtaaccgcctgatgggttcttcctgaccaatgtacacaaaaactcaattcatggagaccatggcactgcaggaaacggtttcattgacacaggccagccacgacatgtgggagacagagttattactca

SEQ ID NO: 1880070 - DNA, 4001 bp, Homo sapiens
aaatatcaggaaatgccattattctcaggacaataaatagacaataaagaagactcacagaccagattagctgtcatgtatcaccaaacagggactggatccttgttaacacgacccaacagagattgtccccagaaattcacttcataacctcaaaaccaaaaacccacactgatggcaaaaaataatgatgcaaagaatgagagagaaagagagagagagagagagagagagagagagagagagacctgtcctatagccatactcagtgggtaaaagccaaagagctcaatttctgctcatgatacttaatagaacatagggaacatgagccaatagctcaatgggttcagatctgcaccaagtgcctgttggacgcaggattctactgtctccaataatatgtctcagatgcactaattttttttctctttttgagacagagtcttactctgttgcccaggctgcggtgcaatggcgcgatctcggctcacagtaacctccacctcccgggttcaagcgattctcctgcctcagcctcccgagtagttgggattacagacacacaccactgcgcccggcaattattattattatcattattattattattgtgcgtgtgtatgtgtttttagtagagacggagttttgccatgttggtcaggctggtcttgaactcctgacctcagctgatcaaaagtaggtgaggtcagaaaacataccctgggagaggctggcacaatgcccagaaccgctatcgctaggcctggggttttcctctgtagtggaatactagtgttcatgtagtgcagggacaaaaccaattagatagttctgggagttaaaaagagatgatttacagtgccatttgagaaggggtattaaggaatttgccagggcactgatgcgtgtcaggtgtaaacctcaggttgagagagagctaagtattttctgtccatgaaggtgataagcgagggcctgaagaaagagggactggggaggacactggcaccagaaataggaaagggcttcttgggggtgggaaggatgggtcacggtgctatctataaagttggctggcagtggatgtaggatgtgggagtgagacatcaaacatgaagcagtcgcttaaagtctaaagaaacactagatatatgaactgcaggagatagtagggaaactggaccggctcctcataaaacttcccgccttctatctccgggaggatcgcagggcatttccgccaagacaggtgagactgcggttctgacctgcgggcctccatgcatatgcgctagggcacctgggggccggcagagccgttcccctacgcaaagtaagagtgttatgtctacaacccaacggggacactgagagccccaaaggccctgctttcttcccagagaacagcgcccatctgcataatttctacctggctctatgaggtgagaacacactccccgctagcacagaaatcctacaaactcctgtgggggctgcgcttggaagcagaggctgtgtaagaggtgacttggggggtagggaaaaacacgaagattttcacacagggtgagaacccaagagactggagaccacggaccaatccctgcaaaaagcagccagggtagaaatggaagagctgagcggacttcacgatagctaatttgtgttacaaagccgatacggctgatgctcgctttttctcctatggcgtgcaggccacatgttacttcttattccccaggcctccactgtaggattaacaactaagacacaaaccaatacgaaaaaagacatgacccttggcgtacggtctgtttttgaaactccagaaagtcaggggaaagcgcgaacgcagtcccccactaccacaaattatgcagtcgagtttcccacatttggggaaatcgcaggggtcagcacatccggagtgcaatggataagcctcgccctgggaaaaccaccttcgtgatcatggtatctcccctgccaggtaagtatgagatcttcgggctctgccccgacacagcctcatacgcctcactctttacacacacggtcacttgccccgcgcactcccgagccctttccagccctgacacacagctgggattctcacttccgatccgcggtcctgaacccgctcccagggcacgggaactccttcgtggcgaagcagcaagtggcgaagcagcagcctctgcgctgcctcatctacatagaagtcgccctgtccgtgatgtcaccgacagtgccttgcccagtccccgtctgcctttctgccactcaaccgaccaatctgctgccagagccgccaaggggaagtgacgtctgcctctccctttttccctcccgcccctgcgtctgttctctcccaaagaagctggtccttagcctgtgttaaggagcaacctttcggtggccagatggagccggggcatccttcttcaaataatggcttttaattcgcagactagaatgtttcggattacaaaagaaaccggttctcttcacatccttatccttgtgatgcagcattccgcttgcaattggaagccgtttaatatcagagagaaaccatatttatgaaagtaaagaggctgcttagatgactgcaaaccagccgtccttactggttttatcactggtaatgttataaagacagttgtccagtttcatgaatcttgtaggtttttttttttttgatgttgttttttttttcaaaaatccgtattgtagaaaaatatgctgtcccagaagagatgattggacactctcaagcgtggtgctggactttgtcatctcttgcacagccatctccacaccttagtgcttacctcatgttagttttttatattctgcaaagacgaaaccaaaataatccaaatttgacacaaatacctgggctacatcttatttgagatgtttaacaaatgtctggatcatcttttcttatatattacgcaggaaacactgtgaagtaagcaaagttggaatgcccaagtgaaagaccatttgaatatttacaagtagatttcagacaggaatactacagggtggtcacaggataacaaattctaggcagcagatttacatgacttgaggctgtgggctgttaagacgctgaaaaaccagggtgtggaccaagctggctaaggctgagtggacccaacgtggtgctggattggatggaggttttacctaggccctcattatatgctcattaacatactaaatcacacacccgccagtgccatgacagttctgagaccagtgtttgatgtaaaaatggcaccacagttccaagaaatctccacctttacccaggaattttcgtgaatattccaattcttggttaaagaaacccatcaagatgaaaccccagaacccattattctctcttgggtatgcccaagctcccctttcttgagtgtgtactttttgctttgcaataaatctcttctttcactatctgctgactcatctttgactttgttctcacgatggtgtcaagagcctggacaccacggctggggtcgagatcccaccagtgtccagggacctcccccagcccaccagtatcagattctattccattgctcaaatcacaaaacatcgagtggagagttctccttggagatcataaagtaaagattctgtggcatggtggccagttaggccactggaagcatggcaaaatattgaaaatgagggattaggtgacagtgtagtaactgctgaatactaaatacttgatccaggccccattccctggagattgacagggagacacattgtccaggtagtagtggagaaatgttttctgggtatctgaccagcctttgtggaaagaactggcaccatcctgcagatgtaaccgcctgatgggttcttcctgaccaatgtacacaaaaactcaattcatggagaccatggcactgcaggaaacggtttcattgacacaggccagccacgacatgtgggagacagagttattactc

SEQ ID NO: 1880071 - DNA, 4001 bp, Homo sapiens
gctgcagtctcaaatttcaggaaataccattattctcaggacaataaatagacaataaagaagactcacagaccagattagctgtcatgtatcaccaaacagggactggatccttgtcaacacgacccaacagagattgtccccagaaattcacttcatagcctcaaaaccaaaaacccacactgatggcaaaaaataatgatgcaaataatgagaaagagagagagagagagagagagagagagagagagacctgtcctatagccatactcagtgggtaaaagccaaagagctcaatttctgctcatgatacttaatagaacatagggaacatgagccaatagctcaatgggttcagatctgcaccaagtgcctgttggatgcaggattctactgtctccaacaacaatgtctcagatggactaatttttttttttttttttttgagacagagtctcactctattgcccaggctggggtgcaatggcacgatctcggctcactgtaacctccgcctgccgggttcaagcgattctcctgcctcagcctcccgagtagttgggattacagacccacaccaccatgcccggcaatttatttttatttttatttttagtagagacggagtttcgccatgttggtcagggtggtctcgaactcctgacctcagttgatcaaaagtaggtgatgtcagaaaacataccctgggagaggctggcacaatgcccagaaccgccatcgctaggcctggggttttcctctgtagtggaatactagtattcatgtagttcagggacaaaaccaattagatacttctgggagttaaaaagaaatgcattttcagtgccatttgagaaagggtattaaggaatttgtcagggtactgacgcgtgtcaggtataaaccgcaggttgagagagagctaagtattttctgtccatgaaggtgataagcgagggcctgaagaaagagggactggggaggacactggcaccagaaataggaaacggctgcttgggggtgggaaggatgggtctgggtgctatctagaaagttgcctggcaatggatgtaggatgtgggagcgagacatcaaacaagaagctgtcgcttaaataaagtctgaagaaacactagatatatgaactgccggagatagtagggaaactgtacctggctcctcataaaacttcccgccttctatctccgggaggatcgcagggcatttccgccaagacaggtgagactgcggttctgacctacgggcctccatgaatatgcgcgagggcacctgggggccggcagagccgttcccctacgcaaagtaagcgtgttatgtctacaacccaacggggacactgagagccccaaaggccctgctttcttcctggagaacagcacccatctgcgtagtttctacctggctctatgaggtgagaacacactccccgctagcacagaaatcctacaaactcctgtgggggctgcgcttggaagcagaggctgtgtaagaggtgacttggggggtagggaaaaacaggaagattttcacacagggtgagaacccaagagactggagaccacggaccaatccctgcaaaaagcagccagggtagaaagggaagagctgagcggacttcacgatagctaatttgtgttacaaagccgatacggctgatgctcgctttttctcctatggcgtgcaggcgacatgttacttcctattcgccagccctccactgtaggattaacatttaagacgccaaccaagacacaaaccaaaacaaaaaaagatatgacccttagcgtacagtctacttttagaaactccagaaagtcaggggaaagcgcgaacgcagtcccccactaccacaaattatgcagtcgagtttcccacatttggggaaatcgcaggggtcagcacatccggagtgcaatggataagcctcgccctgggaaaaccaccttcgtgatcatggtatctcccctgccaggtaagtatgagatcttcgggctctgccccgacacagcctcatacgcctcactctttacacacacggtcacttgccccgcgcactcccgagccctttccagccctgacacacagctgggattctctcttccgatccgcggtcctgaacccgctcccagggcaggggaactccttcgtggcgaagcagcaagtggcgaagcagcagcctctgcgctgcctcatctacatagaagtcgccctgtccgtgatgtcaccgacagtgccttgcccagtccccgtctgcttttctgccactcaactgaccaatctgctgccagagccgccaagaggaagtgacgtctgcctctccctttttccctcccgcccctgcgtctgttctctcccaaaaaagctggtccttagcctgtgttaaggagcaacctttcggtggccagatggagccggggcatccttcttcaaataatggcttttaattcgcagactagaatgtttcggattacagaagaaaccggttctcttcacatctttatccctgtgatgcagcattccacttgcaattggaagccgagagaaaccatgtttatgaaagtaaagaggctgctcagatgactgcaaaccagccttccttactggttttatcactggtaatgttataaagacagttgtccagtttcatgaatcttgtaggttttttttttttgattttttttccaaaatcagtattgtagaaaactatgctgccccagaagagatgattggacactctcaagcgtggtgctggactttgtcatctcttgcacagccatctccacaccttagtgcttacctcatgttagttttttatattctgcaaagacgaaatcaaaataatccaaatttgacacaaatacctgggctacatcttatttgagatgtttaacaatgtctggatcatcttttcttatatattacgcaggaaacactgtgaagtaagcaaagttggaatgcccaagtgaaagaccatttgaatatttacaagtagatttcagacaggaatactacagggtggtcacaggataacaaattctaggcagcagatttacatgacttgaggctgtgggctgttaagacgctgaaaaaccagggtgtggaccaagctggctaaggctgagtggacccaatgtggtgctggatttgacggaggttttacctaggccctcattatatgctcattaacatactaaatcacacacccgccagtgccatgacagttctgagaccaatatttgatgtaaaaatggatggcaccacagttccgagaaatctccacctttacccaggaattttcatgaacattccactccttggttaaagaaacccatcaagatgaaaccccagaatccattgttctctcttgggtatgcctgaactcccctttcttgagtgtgtactttttgctttgcaataaatctcttctttcactatctgctgactcatctttgactttgttctcgcgatggtgtcaagagcctggacaccacggctggggtcgagatcccaccagtgtccgggtacctcccccagcccaccagtatcagattctattccattgctcaaatcacaaaacatcaagtagagagttctccttggagaccataaagattctgtggcatggtggccagttaggccactggaaggcatggcaagatattgaaaatgagggattaggtgacagtgtagtaactgctgaatactaaatacttgatccaggccccattccctggagattgacagggagacacattgtccaggtagtagtggagaaatgttttctgggtatctgaccagcctttgtggaaagaactggcaccatcctgcagatgtaactacctgatgggttcttcctgcccaatgtacacacaaaatcaattcatggagaccatggcactgcaggaaagagtttcactgacacaggccagccacgacatgtgggagacaagagttattactcaaagcaatctcactgaagg

SEQ ID NO: 1880072 - DNA, 4001 bp, Homo sapiens
tgctgcagtctcaaatatcaggaaataccattattctcaggacaataaatagacaataaaaaaagtctcacagagcagattagctgtcatgtattaccaaacagggattggatccttgtcaacaccacccaacagaaattgtccatacaaattcacttcataacatcaaaaccaaaagcccacactgatggcaaaaaataatgacacaataatgagagagagagagagagagagacctgtcctatagccatacttagtgtgtaaaagccaaagagctcaatttctgctcatgatacttaataaaacagacggaacatgagccaataattcagtgggttcagatctgcaccaagtgcctgttggatgcaggattctactgtctccaataatatgtctcagatggcctagtttttttttgttgttttgttttgttttgttttgagacagagtctcgctctgtcgctcaggctgaggtgcaatggcatgatctcagctcactgcaacctctgcctcctgggttcaagcgattttcctgcctcagcctccccagtagttaggattacagacacacaccaccacatccagctttttttgctttttttgctttttttttttttttttttttttttgtatttttagtagagacggagtttcgtcatgttggtcaggctggtctcgaactcctgacctcagttgatcagaagtaggtgaggtcagaaaacataccctgggaaatgctggcacaatgcccagaaccgccatctctaggcctggggttttcttttgtagtggaatactagtattcatgcaatgcagggacaagaccaattagatacttctgggagttaaaaagagatgaatttacagtgccatttgagaaggggtattaaggaatttgccagggtactgacgcgtgtcaggtgcaaactgcaggttgaaagagagctaagtattttctgtccatgaaggtgataagggagggcctgaagaaagacggaccgggaaggacactggcgccagaagtaggaaagggctgcttgggggtgggaaggatgggtcggggtgctatctaaaaagttgcctggcaatggatgtaggatatggaagcgagacatcaaacaagaagttgtcatttaaataaagtctgaagaaagactagatatgtaaacagcaggagataatagggaaactggaccccgctgctcataaaacttcctgccttatatttcagggaggatcgcagcgcatttcagccaagacaagtaagactgcggttctgacctgcgggcctccacgaattgcattagggcacctgggctccgggaaagccattcccctacacaaagtaagcgtgttatgtctgcaaatgaacggggacactaagagccccaaaggccctgctttcatcccaaagaacagcgcctgtctgcgtagtttgtacctggctctatgaggtgagaacacattccccgctagcacagaaatcctacaaactcctgagggggctgcggttagaagcaggggctgtgtaaaaggtgactctgggggctagagaaaaccacgaagattttcacagagcgtgagaacccaagacactggagaccatggaccaatctctgcaaaaagcagccctgcgtagaaagggaagagctgtacggccttcgcgctagtttgtttgtgttaaggctgacgctccctatttctcctcagtgggagaagcgacatcttaattcctatttcccagccttccactgtaagaataacacgtccaagacacaaatcaatgaaagaaaaaagtagcccttagagtacagcgtattcttgaaactacaaaaaatcaggggaaagcgcgaacgcagtaccactaccacaaattatgcaatcgagtttcccacatttggggaaatcgcaggggtcaacacatctggagtgcaatggataagcctcgccctgggaaaaccaccttcgtgatcatgttatctcccctgccaagtaaatatgagctcctgcacctccgccccgtacgcctcaccctttacacgcacggtcgcttgccccgcgcaccccccagccctcctagccctgacacacagctgggactctccggccggaccagcggtcctgagcccgctcccaaggctcgggaactccttcgaggcgaagcagcaggtggggaagcagcagctcctgcgctgcctcatctacatagaagtcgccctatccgtgatgtcaccgacagtgcctttcccaggccccatctgcctttctgccagtcagccgaccaacccgctgcctgaaccagcaagaggaagtgacgtctgcctctccctttttccctcccgccccggcatctgttttcgcccaaagaagctggtccttagcctatcttgtgaagcaaactttcggtggccagatggagcctgggtactcttcttcacataatgacttttatttcgcagactagaacgtttaggactacaaaagaaaccggttttcttcacatacttatccttgtaatgtagcattccgcttgaaattggaagccgttcaatgtcacagagaaaccatatttatgaaagtaaagaggcttctcagatgactgcaaaccagccttccttactgattttatcactggtaatgttataaaaacagttgtcaagtttaatgaatcttgtagttttttttatttttatttttatttttttccaaattcagtattgtggaaaaatatgctgccacagaagaaatgattggacactctcaaatgtggtgttgcactttgtcatcttttgcacagccatctccagaccttattgcttacctcgtgttagttttttatattctgcaaagacaaaaccaaaataatccaaatttgacaaaaatacctgggatacatcttatttgtgatgcttaacaaatgtctggatcatcttttcttatatgggattataatgcaggaaacactgtgaagtaagcaaagttggaattcccaagtcaaagaccatttgaatatttacaagtagatttgagacaggaataatacagggtggtcacaggataacaaattctaggcagcagatttacatgacttgaggctatgggctgataagatgctgaaaaaccagggtgtggaccaagctggctaagactgactggacccaatgtggtgctggatttgacgtaggttttacctaggccctcattatacgcttattaacatactaaatcacacacccaccagtgccatgacagttctgagaccaatatttgatgtaaaaatggatggcaccacagttctgagaaatctccacctttacccaggaattttcatcaatattccactccttggttaaagaaacccattgagatgaaaccccagaacccattgttctctctcaggtatgcccaaactcccctttcttgagtgtgtactttctgctttgcaataaatctcttctttcactatttgctaactcatccttgacctcattcttgagatggtgtcaagagcctggacaccacagctggggtcgagatcctaccagtgtccggggacctcccccagcccaccagtatcagattctattccattgctcaaatcacaaaacatcaaatggagaattcttctttggagaccacaaagtaaagattctgtggcatggtggccagttaggccactggaagacatggcaaaatattgaaaatgagggattaggtgacagcgtagtaactgctgaatgtgaaatacttgatccagaccccattccctgtagactgactgggagacacattgtccaggtagtagtggagaaatactttctgggtatctgaccagcctttgtggaaagaactggcaccatcctgcagatgtaaccacctgatgggttcttcctgcccactgtacacacaaaatcaattcacggagaccatggcattgcagtaaagagtttaactgacacaggctagccatgacatgtaggggacagagttattactcaaat

SEQ ID NO: 1880073 - DNA, 4001 bp, Homo sapiens; identical to SEQ ID NO: 1880066

SEQ ID NO: 1880074 - DNA, 4001 bp, Homo sapiens; identical to SEQ ID NO: 1880067

SEQ ID NO: 1880075 - DNA, 4001 bp, Homo sapiens; identical to SEQ ID NO: 1880068

SEQ ID NO: 1880076 - DNA, 4001 bp, Homo sapiens; identical to SEQ ID NO: 1880069

SEQ ID NO: 1880077 - DNA, 4001 bp, Homo sapiens; identical to SEQ ID NO: 1880070

SEQ ID NO: 1880078 - DNA, 4001 bp, Homo sapiens; identical to SEQ ID NO: 1880071

SEQ ID NO: 1880079 - DNA, 4001 bp, Homo sapiens; identical to SEQ ID NO: 1880066

SEQ ID NO: 1880080 - DNA, 4001 bp, Homo sapiens; identical to SEQ ID NO: 1880067

SEQ ID NO: 1880081 - DNA, 4001 bp, Homo sapiens; identical to SEQ ID NO: 1880068

SEQ ID NO: 1880082 - DNA, 4001 bp, Homo sapiens; identical to SEQ ID NO: 1880069

SEQ ID NO: 1880083 - DNA, 4001 bp, Homo sapiens; identical to SEQ ID NO: 1880070

SEQ ID NO: 1880084 - DNA, 4001 bp, Homo sapiens; identical to SEQ ID NO: 1880071

SEQ ID NO: 1880085 - DNA, 4001 bp, Homo sapiens; identical to SEQ ID NO: 1880066

SEQ ID NO: 1880086 - DNA, 4001 bp, Homo sapiens; identical to SEQ ID NO: 1880067

SEQ ID NO: 1880087 - DNA, 4001 bp, Homo sapiens; identical to SEQ ID NO: 1880068

SEQ ID NO: 1880088 - DNA, 4001 bp, Homo sapiens; identical to SEQ ID NO: 1880069

SEQ ID NO: 1880089 - DNA, 4001 bp, Homo sapiens; identical to SEQ ID NO: 1880070

SEQ ID NO: 1880090 - DNA, 4001 bp, Homo sapiens; identical to SEQ ID NO: 1880071

SEQ ID NO: 1880091 - DNA, 4001 bp, Homo sapiens; identical to SEQ ID NO: 1880066

SEQ ID NO: 1880092 - DNA, 4001 bp, Homo sapiens; identical to SEQ ID NO: 1880067

SEQ ID NO: 1880093 - DNA, 4001 bp, Homo sapiens; identical to SEQ ID NO: 1880068

SEQ ID NO: 1880094 - DNA, 4001 bp, Homo sapiens; identical to SEQ ID NO: 1880069

SEQ ID NO: 1880095 - DNA, 4001 bp, Homo sapiens; identical to SEQ ID NO: 1880070

SEQ ID NO: 1880096 - DNA, 4001 bp, Homo sapiens; identical to SEQ ID NO: 1880071

SEQ ID NO: 1880097 - DNA, 4001 bp, Homo sapiens; identical to SEQ ID NO: 1880066

SEQ ID NO: 1880098 - DNA, 4001 bp, Homo sapiens; identical to SEQ ID NO: 1880067

SEQ ID NO: 1880099 - DNA, 4001 bp, Homo sapiens; identical to SEQ ID NO: 1880068

SEQ ID NO: 1880100 - DNA, 4001 bp, Homo sapiens; identical to SEQ ID NO: 1880069

SEQ ID NO: 1880101 - DNA, 4001 bp, Homo sapiens; identical to SEQ ID NO: 1880070

SEQ ID NO: 1880102 - DNA, 4001 bp, Homo sapiens; identical to SEQ ID NO: 1880071

SEQ ID NO: 1880103 - DNA, 4001 bp, Homo sapiens
caagaaggcctactctttttaaaattgcaatgcacactaccattctctatactcaccacctcccctcccaccttactctgctatttttttccatagcattaccttattatgtttattaatagtatgtcctccatctgactgtaaactccacgaggacagggatactgttaggacaatacctggcatgcatgaatcagtgactgaggtattgtgagggaatagtccctccaagtcggaggaaatgaagtcagatggcagtaattctccaggatgccacaagagggcatcaccagccctgacattgttggtctaaggcagttctgctttccccacttattttgagcctcagctttcctctttttgtacctacaaaggagagaaaagttaacaaaatatatttatgttttgttgttatgttttctttaaagctaaatggatttcctattttatttttgctgattttatttatttatttatttatttatttatttttgagacggagtctcgctcttttgccaggctggagtgcagtgacgcagtctcggctcactgcaacctccgcctcccgggttcaagagattctcctgcctcagcctcccaagtagctgggattacaggcatgcgctaccacgcccggctaatttttgtatttttagtagagatggggtttcaccatgttggccaggctggtcttgaactcctgaccttgtgatccacccgcatcggcctcccaaagtgctgggattacaggcgtgagccaccacgcctggccttatttttttattttattttattttattttattttatttattttattttatttttggggacggagtctcactctgtctcccaggctggagtgcagtggcgcaatctcggctcactgcaacctccgcctcctgggttcaagcgattctctgcctcagcctcccaagtagctgggattacaggcgcctgccgccatgcccacgcccagctaatttttgtgtttttagtaaagacgggatatcatcatgttggccaggctagtcttgaactcctaacctcaagtgatccacccgccttggcctcccaaagtgctgggattacaggtgtgagccaccgcgtccaccgcgtcaggctgagagatcaagtcatttttagtttttagtcttttttttctttttatttttggtcattgtttggttttagtttttagtcttgaaatgttttcttttgtataatggtaaaaaaatagtaccccagaactttttcggaaattttaataattgggaaatccaaaaatctaggaaccactgggctaaagtgatcataatttaaaaaaaaaaaaaaccctttaaaaactaaactggccaagcgggaagcggtggctcacgggaggttgaggtgggtggatcacttgaggccaggagtttaaggccgcagtgagctataatcgtgccactgcactccagactgagtgacacagtgagaccgtttctagaataaattaattaaaaacaaaacaaaacaaaaccacaaaacaaaaccaaattttcgcacggtggctcatgcttgtaatcccagcactttgggaggccaaggcgggcagatcagcctggccaatgtgggaaatccccatctctattaaaatacaaaaactaacagggaatggtgttgccacctgtagccccagctacttgagagactgaagcaggaaaatcccttgaagccggcaggcaaagattgctcactacagtctagtctaaaaccccacttccaaaaaaataaaaaacgcacactcacaccattacaacagcccaaaataaatgttcaaacaaaatgttgtctcacacctcgcaacaaacacacaactttctatctgatttttaaacaccgttgatgaaccccaccaacatagggcttcaaaaaatttgcttgaaactcaaaacggtttctctccacggaaatctttagtaaaaggcgaaagatttatacgatttgaagagaaaccagagcatgtgttggaatggttgcacacagtcctcgggggacggtcactactagattagcaatggttactattaacccaaaagagtgacttctgtttttgtctcagacgattgtgtgaaaggagcttcgttattatggtaaaggaaaagagggggaaaaaagggagaatctccttttaaagtaggacgtggtctgtgtgcagtgcattgtgggtatgtaaatgacgctgagtcaccaccccctcggtttccagaaataccttaaatagttcgttactttttctaggcgttaggccaccaccagggggcagagcggaagccagatttacagaactgtagatgcctggtccaactagacagtgactttattttataattggcacttaaagtaaaaaaaaaaaaaattaaaagctttaaaataattgtattcataggcctggcgcggtggctcacgcctgtaatcccagcactttgggaggccgaggcgggcggatcacgaggtcaggagatcgagaccatcctggccaacatggtgaaaccccgtctctactaaaaatacaaaaattagctgggcgttgtggcgttcgcatgtagtcacagctacttgggaggctgagacaggagaattgcttgaacccaggaggcggaggctgcaatgagccgagactgcaccactgcactccagcctgggcaacaggagactccacctcaaaagaaaagaaaagaaaaccacatcatagcaaatactgaattttgtatcatccctctgccttccacagtatgtaacaaagactccaaaaagagtagcttgaacaagcaagaagtttattttcaccttacctgaaggaagcccggagaagaaattctgagttgttacagaggtgtcagggcttagaacatgataccccaacatatggcaccttggcatactgagtattttaagccatcaaagaaactgagaaaactatataagcaggaagttatttttgaccttttccttctcttctcccatgaagaccttcgtgtgaccagtgtcctgccttatgcccacagggaatgaatgtcacacagaggccaagaataatctgaacaaacaggctttgccaagtaccccccccacccatccagtttattaccattcgatcatacactttttttttttttaaagagtctcgctctgtcccccaggctggagtccagtggcgcgatctctgctcactgcaagctccgcctcccgggttcatgccattctcctgcctcagcctcctgagtagctgggactcaggcgcctaccaccacgcctggctaattttttgtatttttagtagagatgggagtttcactctgtcagccaggatggtctcaatctcctgacctcgtgatctgcccgccttggcctctcagagtgctgggattacaggcgtgagccactgcgcctggcatttttttttttttttttttttgagacagtgtcttgctctgtgtcccaggctggagtgcagtggtgcaatcgagggccactgaagtcttgaactcctgggatcaagcagtcctcctgcctcagcctcccaagtagctaggactacagaagcatactaccacagctggctaatttttaaattttttgtagagatgacatcttgctatgctgcccaggctggtcttgaacttctgacctcaagcaatcctcctgccttggcctcccaaagtgctggggttacaggcatgagccactgcacctggccagaaaatttttgatcattcctttattagctattaaagcaaatggaatgataaaacatttactaaatattctaaaatttactaaaaattttactaaaaatgtactaaattttcttgtgccagttttgacatttttgactttttttttctagaaatgtagaaacttattcacacaacaagaagtatggagacaggtggatcaggaggtcaggagatcaagaccatcctggctaacatggtgaaaccccatctctactaaaaatat

SEQ ID NO: 1880104 - DNA, 4001 bp, Homo sapiens
actttatttgcatacccacaatgcattgtgcaccaaataattttcgtctttaaaattactagtcccctttttccttcaatctatctttcctgaaactgagattgctgttccagaattgtctgaagaaaaaggcagaagtcaatagctcttttgggcagaaagaaatttaccattagcctgttgggagtagccattacctgagaactgagtgccactcatcgaagttcttactctagtttctcttcatatcgcataaatctttcgccttttactaaagatttccgtggagaggaataattctgagttttaaaccaattttttagaggtcttgcattttttagcaaggcttatttgagcgttttaaaagtagatgcccttagccattacgacggttcgtatttactctgaaacaagaaacacactcaaaactcagagaaaacattgttccctagtatttgagtctgaaggaccagagctggcttctggaggagcagctggccttgggggaaaaggacaatttaccctcctacgtagcttgaatggggctttgagtcgcatggcggggcacggcggggcacggcggggcacggcggggcacggcggggctgggctgtgggcggctgcttcagggcctgagcccggggtagatttttttttttttttttttttttttttgagacagagtctcgctctgtcgctcaggatcgagtgcagtggcgcgatctcggttcactgcaacctccgccttccaggttcaagcgattctcctgcctcagcctcccgagtggctgtgattacaggcatgcgccctcctgcccggctaatttttgtatttttagtagagacggggtttctccatgttggccaggccagtctcgaactcctgacctcaggtgatccgcaggtgatccgcccgcctcggcctcccaaagtgctgggattacaggcgtgagccaccgcgcccggcctgggggtcaggattttttgcgatggatttcctccctcctttactgggacagaccctgctagtttttcctccccagtactcaacctctctctagaatctcctatcgctagcagggctcacggctacctgaaggcatgactgcacttcccagcctcccttgcggctgagacgaattctggccaatgggagtggctggaaaattcactttctcttgcgtttcatcaaaccggttgggtcgggggaggactagctgcgcgcctggcacgctcctcaggcggggatacggggcagaagagcccttgggactgccttcttcgattctacacggagaagccggcgggagcagcgggggagctcgccccgagtccctgcttcatttgatcggatagtccagcggtccccaacctttctggcacaagggacccagttcatggaaggcagtttttccaagggcgggggaaggtgggtagggggtgtggacagttccaggttgaaactgtgcccctcgtcatcagccattagattcttaaaaggagcacgcacctagatacctcgtatacgcagttcacaatagggttcccgctcctaggagaatctgatgccttgctgccctgacagcaggcggacctcaggcgttaatgctcgcttgtgagtcggtaaccctccatcactcagtggctggggttaaaaaccactggtgtaatcaaccaacaaaccctacttcttggtcaaaagcagtaagccaccccaacatcttaatattataactgctcagaaatgcaatacaattgatatcacataccttaacaaagcgaaaagctgaaaaaccgtaactcgcatttgttctataatacactttacatagctccacacgcgatttaacggaatcgcatctgtttttaaaacacttaaaataagccctgctaagaaacgcaaggcctcaaaaaattggtttcagactcacactcgtttctctccacggaaatctttagtaaaaggcgaaagatttatacgatttgaagagaaaccagagtataacatcagtcgtcgacactacagttctcaggtaacggctactcctaaacgggtaatggtaactttccttcggcccaaaagagctattgacttcagcctttttcttcagacaattctgggacagcaatctcggttccgagaaagatatgttgaaggaaaaaggggaaataattttaaagacgaacattatttagtgcgcaatgcattgtgggtatgcaaataaagtctcaccaatcacgctccagtttcaggaaataccttaaatggttcatgcgttttagcgctgcgcctgaggccaccaccgcggggcagagcagagtctggtcccagaagaaaaaggctgactttacctgctttacttacagtgggcgagctattagatcggtgcaaaagtaattgcggtttttgcaatttttttttttttttaattgcacaattagcctaataagtaaagaatttttttgaacttaaaaaaaaaagtaaaaaaaaaattatcttggctggactccgtggctcacccttgtaatcccagcactttgggtggctgaggcaggctgatcgcctgaactaggggttcaagaccagcctgggcaacataacgagagcgtgtctccaaaaaaaaattcttacacttctagccactccagacctactgcaggcctggggattgggcccagccccctgagtctgaactcatcctccgtgtgattctgatggaggccacattgagaacctctgttggcaactgttgtgcctgaaatatggagagtgaggagtttgggagacagattactggctgagcaggggaaggcctgggaaaggctgtgaaatgaggagagaaaaggccaaggaaggtccctgggggatggtggcataaaaggaggggacagtgcaggagcctatgaaagagattagagaaattgagggaggcaggaggaaaacctggactgggagcctcacagaaaccgagggcagagaggaggtttcctggccgggcgcggtggctcacgcctgtaatcccaacactttgggagagaggaaggaaacagtaggtgaggaggggcaggagatggggagggggcggtagctggctcctggttgcagatgggaaggagaagcggtgcaggtgcctccccgcagtgatcgtggtccatggagcctgggcccccccactacccctgttctctcactcccctgcagcccctcctttgctggcccctctttccttccgtcttctcacctgggaagatcccagggccatctttccagcctctgccctgtagcagctgaactgctggaaaaattccacagcaggggaacctcccatacaggcctccacttcacctgtttctctgattggctccatttcccacctcaagatgtcctttttaggccgagtgcggtggctcacgcctgtaatcccagcactttgggaggtggaggcaggcggatcacctgaggtcaggagttcgagaccagcctggccaacatggggaaaccccgtctctactaaaaatacaaaaattatcttggtgtgtcgacgcgtgcctgtaatcccagctacttgggaggctgaggcacgagaaccacttgaacccaggaggcggaggttgcagtgagccgagatcgcaccattgcactcaagcctgggtgaaagagcaaaactccgtctcaaaaaacaaacaaacacacaaacaccccttttaatccttctctcccttcagcttccccctctgcaactcaccgtgtcagcccacgacatcccaggggcttccttgagaggccagacgccctcatcttcccagcccgcctgcaaccgcatctggctcatcttctgcctcctcccatgaacggccctcctcctgggctttgaaccccaactccacaaagatggctcccctcccatgcaatcccccagcagcaccctccgtgtccctcccgctgtggtctgaatgtcgtggccactcacacatccacaggctgaaatgtaatctccaag

SEQ ID NO: 1880105 - DNA, 4001 bp, Homo sapiens
gttggccatggggccaggtgcagtggctcacgcctgtaatcccaacactttgggaggccaaggtgggtggatcacctgaggacaggagttagagaccagcctggccaacatggtgaaaccccgtctctactaaaaatacaaaaaaattaggcaggtgtggtggcgggcgcctataatcctagctacttgggaggctgaggcaggagaattgcttgaatccatgaggcagaggttgcagtgagccaagatcgtgccattgcactccagcctgggcaacaagagcaaaactctgtctcaaaaaaaaaaaaaaaaaaaaaaagttggccatggggtatacggggagacagctgccacagttctggctctccagcctgtccaagattcaagctaggaaagttctgtagctgtgtgaatgaggaccacagtggccactgcagagcctcctctggggtcatccaccaccaggctggtggtttctaagcgtggtcctaggctgccatgacccaagcctcgcctgttggaatgcagaatccaatgaggtcttttcaacaagatgtatggagcatgcattgtgtacatggaatggtttcaggctctaggtaaacagaagtgagatgtgtcagatatgttcattggagttcacacactagtgaggagaccatttagtggatagtactagaattctatagcaagaattctatacggtgctacgggttcagagacataggacatctactcctgagtgaagagtgaaggcagaggagagcaggccaggggcagcttcctgaaagttgatttctcagctgagcctagaagaatgagtagcaatagccagataaagaagacttctcaggccgggcgtggtggctcacacctgtaatcccagcactttcggaggccaaggcaggtggatcacttgaggtcaggagttcaagaccagcctggccaacatagtgaaaccctgtctctactaaaaaatacaaaaattagccaggcgtggtggtgcgcacctgtaatcccagctactcgggaggctgaggcaggagaatcccttgaacccaggaggtggaagctgcagtgagccgagatcgtaccactgtactccagcctgggtgacagagtgaaactccatctcaaaacaaaacaaaacaaaaaaagggcaaaagaaagagaaggcactgagattctgctctcggtgggaagtctgatacctctagcatacatactttaagttggaccccagaagacagtaccctcaaggtcaaggtgggccaaaagtaagccggccctcaggtggtcttgtatggattatataactaccaggtggtccagagaacctcaagtgttgaatgtggacaaaggtagtccagaattgtttgtgtccccaggtacctgataaaaacaaaagaaaactatctctggaagaaagtatcatcatcctaactcttaagtttttcctacacttaatttttcaaatatgagaccagtccaaagtataagataatcatgcacacaaagtcatcactataaattggaactagcacactagaaagactcacaagacttcagccaaattattagatacagactgtcaaaaactaggttttcttttaaaaaaaaaaatcttataaacatttagcttcctaaatgtttacaagaagctaaaaaaacatgacagtaggccgggcactacaaaaagtacacaaaattagacaggcttatgaggctgaggtgggaggattgcttgagcatgggagatggaggttgtagtgagccgcgaccacaccactccgctacaacctgggtgacatttgtggagctaccccaacctcccaaagcatgaaacaccccacccacacgtctctctttagtaacagaacattcagccttgcctaggcaagacttcaaaaaatttaaccataaactcatagttgtttttctccacggaaatctttagtaaaaggcgaaagatttattcgttatgaagagaaaccagagatctgcctgttagccttttgcctggcttcccagctattgactggtctccctctacttacggtgcctttggacctgcagacagaagcttttcttccactgtagaaaagtgtcctaaacatgttctcactgggtaaaatctcctgacaaagaaaaaaagtttaaatattattattcaaacagataaccctggtaataattctcgtatctacaatgcattctgggatgcaaatgagctgagcgccggaacaagagttcctctaaaccctctctctcttaccagtaaatggagagaggcacttgactactgagctggggagagcacatggccaagtcctgtcttccatgtagccacatgtgttcagagtagcagtgcccggtgcacagtgactcacacctgtaatccctgcacttaaggaggcagaggtaggaggatcgcttgagcccaggagttcaagaccagcctggacgacagagtaagaccttgtctcagaaaaaaaataaaatttaaatttaaaaaaaagtccaggcgtggtggctcatgcctgtaatcccagcactttgggaggccgaggcaggagttctcggtcactttgggagcactttgggaggcctgagcactttgggaggcctgaggtcaggagttcaagaccagccttgccaacatggtgaaaccctgtctctactaaatacaaaaatcagccgggcgtggtggcagacgcctgtaatcccagcttcccaggaggctgaggcaggagtatcgcttgaacccgggaggcagaggttgcagtgagcgattgcactccagcctgagtgatgacagtgaaactccgtctcaaaaaaacaaacaaacaaaaatactagcatttactggctgggcccaccgggcccagtggctcatgcctgctatcccagcactttgggaggccgaggcgcgtggatcacgaggtcagaagttcaagaccagcctggccaagatggtgaaaccccatctctactaaaaatacaaaaaaaaaaaaaaaaaaaaattagccgggtgtggtggcgggcgcctgtaatcccagcctactcgggaggctgaggcaggagaattgcttgaacccaggaggcggaggttgcagtgagccgagatcgcgccactgcactccagcctgggcgacagagtgaggctctgtctcaaaaaaaaaaaaaaggtagcatttatgctggtgtgccatcatcttagcatctccttctcctcctgccccctctagctctgtggttcctttctcttctttacaaaaacattcaatccttgccgattttctcttgtgctcccacagcccaatcactgactccttccacagcacctgtcaccatatcatcgctgcctgtttgtgcacgcttaaggagggttggtcgaatgaatgaattcagtctgtatcctcaacacccaatgccgcgcctggcaccataggcgttcacatgcagccgtgccgaaagactgagtgaatgctggactgaatgaatgactgcctgtaaaatatctacaggaaagccctgcaggaaatgccctccataaattctagtccccttctccttcctaaccaaatcctcccctccttctgcttccatcacttcctagctgtgtaacttaggcaaagtggtttacctctctgtgtctaatttcggcaaaggtaaaatggggaagtgaacctcatctggttctggtgagcttccacgggtgctgtatggaaagcctggcaccctgcctggtggagagggctcgatgatggttagaaggagagtttctctaaactgccgcctaccttccttcccctttctcatttcctgccacaagtctcccacccactttctctgtctccctctcaccccttgtctttctccatcttgtcttcccgtaaagacccagcccttccctcctccatgaaacctggattcctccaaggcgaaggcccccctctctggggtctcagcctccagcgctgacatcctaggccgcctcg

SEQ ID NO: 1880106 - DNA, 4001 bp, Homo sapiens
taaaaatcttgccactgatttgtattatttctattgacctacaaatgagtactaagcccatttataactcccacctatttgataacttaccaacaaaagtttgctaaatttacacagactctacattaatttttcttttcatttttagtttttaaaatcataatggctaattttaagtgataaatatgacattcataaatattagagaaaaaactatgtctgactcctgaagaggattttttgcaaatatgtataaactgaattttacagaacataaacaaattatctttgattctttcccacataaccaacaactatcactttttttctggctgtttttcttttcctcttcaaattgcttaaggatgaaatgaatattacctaattcaggaaatgacaagtattctaagaattgttttaatatcatgcttaagagacaaaagttatctttaaactctaaaataaaatataaataagtctatataaatccaaaagaactcaactcaagtaaaatctagcagctgtcattttctttctttttaaaatactgccattttgactctgtagagtatgtcctctttaaagttcaaatgtatcaccctgtcacatattgatggtgatactaaaaactgtatgcaaagtttatgtgatataaatcctatctccatgtcaaaaaaagaattttttatatttatctatattattattattattattattattattatttgacactgagtctagctttatcacccaggcttgagtgcagttgcgcgatcttggctcactgcaacctccgcctgctaggtttaagcaattctcctgcctcagcctcccaagcagctgggattacaggtgcccaccaagacgtcctgctaatttttgtattttcagtagagatggggtttcactatgttggccaggctggtctcgaactcctgacctcaagtgatctgccagccctggcctcccaaagtgctgggattacaggcgtgagccaccgcgcctggccagatttttaaaatatttagattcatttattaaggagttggaaaagctactgaggtctggtcaattcacatgtcacaaaatgatccttcggctttcattaaatgccaaatgcaaagtaggcctcctaaagagactctgcaaggaacttatgcaaataagaagagagaagatcccaaaactgtgtgtaaaaagcaagcacagaaaggaccagggtatcctagagcactaactgaagaaaatactcagcaccctaacaatgtgatgcatttgggaactatcagaatagaaaactcatgagcctgaattccattgtttaatgctgacattatgcaaaaagtgattacatatggtaaatattaaataaatatttactgattaataattcctttgtattctctcaatgtttattcacagggtgcattagaaatacatctgttaattgaccaatacagggtaatatataaagacattttccattcagtattactactggtagatattcttcaggctgaagtgttagaaatcagttcctcccttaagtcaagaaatgaaagtggaacagacagacctttgagaggaaagcaacttccttgctttaagaagctgctcttgaaatcctggcttgctttcagatacacagagcaaacaacaaccagaatctgattatctgcagggtatgtacattccctagaaactaaatacgtcttagacattcactttctctttatttagtggccatctttattttagggcacagaatgatcaccaactcttggttatggatagcaccaggcatccttattctgccgtgcttagttattctttttttttgtttgtcttgttttgttttgtttttgtggtttttgtttctttttttttttttttaaatatggaacgcttcacgaatttgcgtgtcatccttgcgcaggggccatgctaatcttctctgtatcgttccaattttagtatatgtgctgccgaagcgagcaccgtgcttagttattctaagtgaggtcccaggatccacctgcctaggcttcccaaagtgctgggattacaggcgtgacccaccgcgcccagccaagttttggtttcctcaactggaggtaatattacatattttacttatacatatgcataagtaaacaaagagggttgttttgagggtcaaataaattgatggatgttaacgctctctgtaaattataaagcactatacaaatacaaggcattattgttaataatagagcttaattacacctgtcctcatttgatctctcacagaccatcagaggcatgttattagaatgtactacattattaagataaaagacatcttcttgtgtcacaaacctttcaagccactaatcacattgtagctagttctttccgttttcattaaaaacttaatgctaaaaaggcctcctaaagagcctctgttggtaacactgctattatcttgccccaaacccttgatttattcttacaatccattctttttagggctttactataatttacaagataacaaactaactggtttaatccatgcccatgcctgagaactgaggtattctggaaaaggttgcttgtgctcaagtccttcacgtttctggcccacttagcactaagccccttcttctccaaagcacagagcatgactagaaggctgtagtttacatgctgtattttatactaaggaaagaagccagtgcttgaactttctccctaatgcccccttaccttaaaagaaagatacaactgaatcttaaaaaatgagaacttcctaaactgcatccacagtatccaaaggttagttatactttattcttacatatcaaatgaatgctgagaaggttcttataaccacagctttgttaaccaaaattggttgtttggttggctttaaaaatgaaaatctaactaatggatcaacttatttattcatgagattcagtttctatcaaatctgggaaatcaattaccattataaaacgctgaagccattagtattgtatcaatagctgggaccttaaacagactttccagctgctcactcaaatcctccttccctcaaaggaagcaagccttctgtcctgtccgggctgggtatgcagcctttgctcccaccgctaccacacatgccactgagaacctgattgagaattcagactccatgcaggggataaggaaaggagtaacacatgcaactgtgcagcaacacttttagacacagtttaacttaaaaaaaaaaagtctgcccagcgtaagaacaatcccaaagtcagcccaagagcagagaattagtactatcaagtgatcagaaacaaaaccaaggcaaactctcaccaaattcaatattcagagtaattatcatttaaagaaccaccactgaagcaaattccaaaaccactatcaagaggcaaaggctaccagaaaagctctatttccttaaaaagtatttggttgtaacagaagttaagatttggctttaagacataaaaagcccaaaagagtacctctgtggactattttttcaggctaaggctaccgggagatttaagttcattctccattaaggaaattaaagaatagtgcttggtatcattgagacagaagcaatttgggtgagtactgctctgtggaacagggaaagtatgggaacaagctgcccttttcccaacagtttagcagattcaggactcctaccagtctctgctgctccaaaagaagatctgcttcttccttctcctttttgtataagatctccatttcctgtagcctagaagtaaaaaaaaaaaaaaaaattcaagaatgctattagtattacatgtttaaaagaagaaacagtcatatgggctgcgtaactgtgcattaccttttctccatctcttgtttcatatcaattccttgtttttccagaagctccctctgggcaaatgtccagtccacaggctcagagggggtctcagcagaaggagtcttctctc

SEQ ID NO: 1880107 - DNA, 4001 bp, Homo sapiens; identical to SEQ ID NO: 1880106

SEQ ID NO: 1880108 - DNA, 4001 bp, Homo sapiens
ttacacagtgcctaggactctgccttccgcttggcagctgctcaatgttgtcatctcgaggtgttcaatacataagcactatctgactgactgcactaacatagaataagttgcagaagatccacaggccacaggatggacattcaggattatgggaaagtagctcatcctgatctcaggactgccctccacccccatctctgccccctaatcctttcatctgcttgggaggaagtctgggtccaaccaggattccacacgccacagctgtgctggcagcagtggatggaaatcagagtaaaggctggaagccccagagaagaaaccctcaaagtggtttgtcagcctggaagctccaggaaggcagctccagagccgctttgtggactaccttctattcaggacctagtacataataggtgctttataaagatacaataaatgaataaatgactcactcatcctggagctcaatctgggaaggtaggctaactcagcaaaagagcaccacactggcttctaagccttacttcctcatctataaaatggtgacaacagtatctactttcataggttgacattaggattgagtgagtgaacatacaatgtttaggacagagtaagcatctaatcttagctgtttttattagtagcagcagctattaaactagtttcttttttttcccttttttttggttacagcagcacttttatttttccttacacaatgacatgccgctggggcctaatgttctcacataacagtagaaaaccaaaatctgttctcatctccttaaagaatcgagaattgcatacaaaaaaaaaccttacataaattaaaaggatgaatacatttacaggtgtaaatgcaaactgcttccaactcaaagcaagtcacagcccacagtgttctggcaggaaaacatcagctaagaaaggaaactgggtcctatggcttggcctttccaaccctgacagaccagcaggacagaaacaactggttcaggagcccttgtcagcctctagagaaatcccagaacactcagccatgacatattaataccctgcaaagatcggagactgctggccatgcagactcaccaagtcgcacttgtcttccacaagcacattcttaccttgccacgcagtgaccaagccacatgtactaagggttgaaagcaaagatatgtacagggtattaaacaaataccaaggggaacagttaacttgaatacaaggtcaaaatcagcaacaagttctacaatccagtgctgatattagatacaagcttcaacgacaatttcttttcgaaggcttattccattttcgtgaggctagcatgaggtatatgcatttgccagggccaatttatacttctgaattaacccatgcagcaaatgctacgcatcggctcgcagtccatttagaagcatttgcggtggacgatacaggggcctgactcgtcatactcctgcttgctaatccacatctgctggaaggtggacagtgaggccaggatggagccgctgatccacacagagtacttgcactctgggggcacaatgagcttgatcttcatggtgctggatgccagggcgttaatctccttctgcatcctgtcggtgatgcccgggtacatggtggtgcctctggatagccctatgttggtgtacaggtctttgcggatgtctacgtcacacttcatgatggagttgaacgtggtctcgtggatgccgcaagattccatacccaggaaggaaggctggaacagcgcctccggacactggaaccgcttgttgctgatggtgatgacctggccatccggcagcttgtagctcttctccagggaggaggatgtggtagtggccatctcctgctcgaagtccagggagacaaaaatatggaacgcttcacgaatctgcatgtcatccttgcgcaggggccatgctaatcttctctgtatcgttccaattttagtatatgtgctgctgaggcgagcactaaactggtttttcatgcagaattaccaacatctctgagggggtagacagatctttgggttccatttcctcctctgatctctcctccaaagacaggtgacagttacttgcgccacatctatgcctagctctgcaatcatcactatacagtaatactacgatggctaattgacctttctctccctcctgctggaggtgagtcctttgaaggtgacatggtttggatctgtccccgccaaatctcctgtcaaactgtagtccccatattggaggtgggggctggtggtgggatcatgaggctggttttctcataaatggttcagcaccatccctttggtgctgttctcgtgatagtgagttttcccaagatctggttgtttaaaagtgtgtagcatctcccccctcactccctcttgctcctaatcccgccatgtgagatgcctccctccccctttgccttacaccataactggaagcttcctgaggtctccccagaagcagaagccactatgcttcctgtatagcctgcagaagcatgggtcaattaaacctcttttctttagaaattatccagtctcaagtattagtgcaagaatggactaacacagaagggaacatgaaccctttgacaggaacacagtgtcttattcatcttggtcttatgaacacctgtacacagatctgaatagaaatgggctatgagctgcttttggcccaggtgacaagggattgtggtgcctccacctcacgctgctaccattctccgcagaggaccacgccacagatggtgtttttgagaataagaaaggctaaagagagtttaggatcacaagacaggttttaagaaaaccaatacatttcctgagtatccctcccagttattttctttttttttgaaacggagttttgctcttgttgtccaggctggagtgcaaaagcacgatcttggctcaccgcaacctccacctcccgggttcaagtgattctcctgcctcggcctcctgagtagctgggattacaggcatgtgccaccaccccggctaattttgtatttttagtagagatggggtttctccatgttggtcaggcttgtcttgaactcctgacctcaggtgattcgcccgcctgggcctcccaaagtgctgggattacaggcctgagccaccacgcccggcccctgttattttcacactaatattttattttcttcacagcactcatcactatcaggtgctcttttattagcttacttgtttactgtctatctccttccactatgacttaaactctcaaaagtctaaagaccatatctcctttattcatcactgtatattcgcatcacctagaactatctgggaacacaggggtcacttagcacatgtgttagaagaacactgaatgaattaatgtgcacattttcctaagattttatttcactatttattttgagacggagtttcactgtgttgcccatgctgaagtgcagtggtgcaatctcggctcactgcaaactccacttcccgggttgaggcgattctcctgcctcagcttccagagtagctgggattacaggcacgtgccactatgcccagctaatttttgtatttttagtagagacgggtttcgccacgatggccaggttggtctcgaactacctaccgatccaccctccactgcctcccagagtgctgggattacaggcatgagccaccgcgcctgtcccaatattttatttttaaagaacagatttggatgctcttatatgcataagtacttgaaaacacaaaataattcaagtattttaacataattcaaaaactacgatctttttagaatcagcaacacctaaggccccaaatgatcccttctccacatcaccactggctgttattgatagcggaacaagctatcccatcaggtgagagtggataagatgtagtgcaaagagcaagttagatcagaagactgagctcttcatgcctttgcttattggggtgcgaa

SEQ ID NO: 1880109 - DNA, 4001 bp, Homo sapiens; identical to SEQ ID NO: 1880106

SEQ ID NO: 1880110 - DNA, 4001 bp, Homo sapiens; identical to SEQ ID NO: 1880106

SEQ ID NO: 1880111 - DNA, 4001 bp, Homo sapiens; identical to SEQ ID NO: 1880106

SEQ ID NO: 1880112 - DNA, 4001 bp, Homo sapiens
ccatgttatctcatgtttccataatttgtcccatcttactgagggtggtattccattggatgaatatatcacaaaaggtccattaacctcttgatacatatgaactgtttccagtttggggactattgtaaacaaagctgctaagaacaagttctttttgttaatatttgttttgtaaattccgtttgtcattctttagtattaacttattttgtaaaaggacgtaatcttcataagtgcaaaattcattcaaattttacagaggcctgaagcagaagcctacacaatttcctttgttatatttcataattaagggggaaaaaactttatctgggatgttgtttcctatcagcaaatccttaatgtaagccatacaggatgctagctgtactattagactatcttctgtaatctgtgcaataactctaagaagtacttcgtcttattattttcctgtaacactttccaacttgaagcctagcaaattgaaggacctggccccaggtcaaacagaaggcaagcggcagcgccagtactggaagaaggccttcccaaaggcagacagaagctcacgtctttgtcagaacctcggtatttctgatgcgcctggaagccaatatccaagccgttctcagccactggattggtgggctgctttgctcagaaactcctcgatcaggaatcccaagcatacgttagtgatgacggtcccaaaacaagggacatttcttaaccattctaaaaacccgtttgctcattagtaacgcaatgaaagttgctttcgtcttggttcatatattttatatttgagcaaggcaatgtccgctgctggggttagaagtaaatggctcgtcttcatcaaactagatcagtccgtaggacgtatggcttccactcgcagtgtcctgaacactggctgggcttcctgtgcgttctagccggttttctttggagccgcgggtttctgcaccgcaccctagtcgggatggcagaggcttctcggaacacgcggatctatgagtgcagtccccggggtagccaccagggaacgccataggctttcccgctgtgttcctccttgccttttccgtttgggccaggtagtttctattgaccaggacattacagatcagaagtgggtggggtcagaaaacacaccctgggagaggctggcaaaatgcccagaaccgccatcactaggactggggttttcttctgtagtggaattctcgtgttcatgtagtgcagggaggatcgcagcgcatttccgccaagacaagtgagactgcggttctgacctgcgggcctcgatgaattgcgttaggacacctgggcgctggcagagccgttctcctacacaaagcaagcgtgttatgtctacaaccgaacggggacactaagagccccaaaggccctgctttcatcccaaagaagagtgcctgtctgcgtagtttccacctggctctatgaggtgagaactgattcctcgctagcacagaaatcctgaaacagaggctgtgtaaaaggtgacaggggcctaggggaaaacacgaagattttcacagagcgtgagaccccaagagactggagaccatggatcaatttttgcaataagcagccttatgttcaaagggaaaagctatgcagccttcgcgctagttaacttgtgataaacaggctcacaacggctgacgcttgttccttctccagcgaggacaacgacatgccacttctgttccccagccatccaactgtaaaaataacatgacaccacccatattatgcactactaaaagtatcccttcacatacaatctgcgttttccagcacaaaattcagaggacagcgcgaacgcagtcccccactaccacaaattatgcagtcgagtttcccacatttggggaaacggcaggggtcagcacatccggagtgcaatggataagcctctccctgggaaaaccaccttcgtgatcatcgtatctcccctgccaggtaagtatgagatcatacgcctccgccctgccacagctccatacgcctcaccccttacacgcacggtcacttcccacgcgcaaccccccaccgccccccacccccacccccagccctcctagccctgacacacagctgggactatcacgtccaaccggcggtcctggacttgctcccacagcaggagaaatcctccgtggcgaagcagcagcccctgagatgcctcatctacacaggaatcgccctatccgtgatgtcaccgacagcacctttcccggtccggctctgctcttctgccccaccctctgccacctcagccgatgaacccgctgcgggagccggcggaggaagtgacgcctgcctctccctcttttccctcccatccacgcccctggtctctcccagagaagtaggttcttagtctgtgatgccaaggacccctttggcggccagctggagcctgtgcgctcttcttcaaataatgtcttttaatgcgcaaactagaaagttcaggattacaaagaaaactggttcttttcacatacggttatccttgtgatgtagcattccgcttgacattggaagtcgttcgatatcagagagaaaccatatctacgaaactagagaggctgctcagatgactacaaaccagccattcttacttgttttatcactgggagtgttataaagatggtcgtccagtttcatgattcttgcagggttttttcaaatacagcaatgtacaaaaatgtgctgctccagcagagcacactggacacgcagacatggtgccggagtttgccatctcttccactgccttctctagaccttggcgcttacctcatgttaacagtttatatgctgcaaagacagaaacaaagtcatccaaatttggcaaaaatatttgggggaaattttatttcaggtgtttaactgattacttttaatatgtagactacaacaccaaactctgacaatactccacagacttattaatggtttccacccccctctctgcaaatctatcaggcaagtttttcctgcccttcactttcatataagctgagtcatacagtgtgtagtgggttttgtggggagtgttactgcccaacatgttcaccttgcctgctgcctagacagagccaatttttcgacacaggggaattgcaataaagacctgcactttttatttggtggttgggggccagtgagttgagagttgtgattggtcaggtcggagatgaagtcacagggagctgaagctgtggtcttctgctgggtcagttcctgcgtgggggccacaagaccagatgagccaggttatcagtctagctggtgccagctgatccactgagtgcagggtcggcaaaatatctcaagcactgatcttaggttttccaataacgatgtgatctccaggaacaatttggggaggtttagaatcttgcagccagaggctacatgactcctaaaccataatttctaatctcagggctactttgttagtcctgcaaaggcagtctagtccccaggcaggaagggggtttgctttgggaaaatgatattatcatctttgtttcacagctaaaccataaactaatttcctcccaaagttatttcggcctgtgcccagcaatcaacaaggacagcttggacgttagaaacaagatggaatcagttaggtcagatctctttcactgtgataattgtcccagttgtaacttttgcaaaggcggtttcagaagcagaggcataggtttgacttctttcactcagtcttatgtctatgaatttttcatgttattcatatggttatttgtttctatgtgtattcctttgtaggaatatacactaacttatttatttcttctgctattgttgagcatgttgacctaaaagaaagaggctgaagcacaaaatataatttagagtttacctgagccaacatgaagagagctgcctggaagactcacactcaaggaaccttggatctgagctccctttgatct

SEQ ID NO: 1880113 - DNA, 4001 bp, Homo sapiens
gtaatcccagcactctgggaggctgaggtgggtggatcacttgagatcaggagtttgagaccagcctgaccaacatggtgaaacctcgtctctaataaaaatacaaaaattagccgggcgtcatggcgggcacctgtagtcccagctactagggaggccgaggcaggagaattgcttgaacccgggagatggaggttttaatgagccgaaattgcgccactgccctccagcccaggcaacagaccgagacaccttctcaagcaaaaataaaaacaaaaagctgcaggtggaaaaaaaagtctggattttggttcagagcccctggggccttcctcagtagttttctctttccttgaaaaaggaagcttgtctcagtctctgcatctctctgagtccttttggagattgaggatggtgaggtctcagtgcttggcccccttctaactctgggtacctcccctcccgtgggtcaacctggtccagtgcacaggccccagctccgacgaccatctcccccctaccctttgctcccagcaaaggccatttctaggtcagtcgtgaggtacagccaggacagggcagctcgctccgagatttttggctctcgaaggccttgagcgctgtggttctgcagaacgctgtctgcctctggtggaggaactgacacccgctggagaaagtgtggagggaagcgagggctgcacctgcacgcaggagctgaggcaagcggcggttcccagctctcagtgcaaaagacatttgtcatctgagaggctggactcagttattataattttcaattttgtcaataaaaaccgaatggaaatttgttttcttacttgtagaaacctcctcacaagacctcccatcttacattccagggagacttagcagggtattccgccaagacataggttagactgcggttctgaactgcagacctcgatgccctgcgccggggcaccagggcatgggcaaagccctccccctacacaaagcaagggtgttatgcctacaaccgaacggggacactaagagcccccaacatgcacggttttcattccaaagaaaaccaccagttctgagtacaacttccacctggctctattaactgagtacacgtttccccagcacagaaatcctacaaactcccgtgaatgctgtggtgaaaagcaggagctgccagggcaagatggatcgcacctgtaatcccagcacttcagaaggctgggcggaccacttgagcccaggagttggagcccagcctgagcagaatggtgaaaccgctacgaaaaaagaaaaagaaagagaaagaaaagaaaagaaaaaaaaaaaaagagaaaaaactagccgggtgtggtggcgtgcggttgtcctactcgggagcctgagatgggaagatcgcgccacttctccagcctggacggtacagcgagacttgtcttagggagggggggaaaaaacaacaacaaaaaaacagaggctaagaggtaactccgaggatgacagaaaacaccagagtttttaagagatgttagaagccctgggagcactgaacaaaccagaaagctcccgacccttgatccctgagctccacctagcaagtaccgcggcagctaacctgggagaacaacccaaccaacagagactgaaattcgcctcccaagagagcaagtggatagttctaagctgtccccaaacatggcctcacaaaggaaaactaaccgttgcgaacggaaacaactgaccggacagaacacagccacaaaacacgagcccgcaccctgaattacaaaaacacttacggctcacctactattcgcaccacagaagcaccaagagaaagcgcgaacgtagttccctactatcacaaattatgcactcgagtttcccacacttggggaaatcgcaggggtcagcacatccggaacgcaatggataagcttcgccctgagaaaaaccaccttcgtgatcatggtatctccccttccaggtaagtatgagcttttgcacctccgccccgccacagcctcacacgcttcaccctttacacgcacggtcacttgccccgcgaacgcccccccccccaccccacccccccaccgcccacagccctcctagccctgacacacagctgggactctcaggtccgaccagcggtcctgaacccgctcccacggcacgggaactccttagtggcgaagcagcagcccctgcgctgcctcatctacatagaaatcgccctatccgtgatgtcaccgacagcgcctttcccagtccccgtctgctcttccgccccaccctccgccgactcagccgatcaacccgctgccggagctggcggaggaagtgacgtctgtctctttctccttttcctcctgccattgtcctttggggaggtgtgcagagatcccgcgtctggtctccccctaagactgtggtacttgatctgtgtcctgcagagaacccttctggcggccaacaggaagcttgtgcacccttcttcagataatgtcttttaatgcgcagacttgaacgtttaggattacaaggaaaaccggttcctttcaaacctgtttatctttgtgatgtagcattccgtttcaagttgaaagccgttcaatgtcagagagaaaacatatctatgaaaccagagaggctgctcagatgggttgcaaactagccatccttactggttttaccactagaagtgttacaaagacagttgtccaattttatgaatcttgaagggttttttgttgttgttgttgttatttcaaatacagtgtaatacaaaaatatgtggcccccgcagagacgattggacactctcaggcatggtgatggagtttgtcatctcttccacggccatctcagaaccttagtgcttacctcatgttagtattttatattctccaaagacacaaagataatcccaatttgacaaaacaaacaaaaaaacatctagggcatgtcttatttgaggcgcttaacaaatgactggatcatctcccttgtatataacccagaaaacactgtgaagtagagcaaaattggaaagcccaagtcaaagaccatttgcaaatttcaagtagattccagtctgttgctcaaatcacaaaacatgaaatggaggggtctcccttggagaccataaagtctgtgacatggtggccagttgggtcactggaaaacatggcaaaatattgaaaatgagggattaggtgagagtgtagcaactgaacactaaatgcttgatccaggtgccattcctggatactgacagggagacacattgtccaggtaatactggaaaaatactttctatagtgtaaaccacaaataaaattccaagcccctcaactatttgaatgcacccctcctctcagccagggtcattccaaagttaacctgaaaaactggttcagaccatgatgggaagtaggggtcagatatgcctcattataccctccttcctttggaattcaggcacaactgaccagcacatccgaccaggcccaactgacattacaacagcgatctcaagactttttgtagcaataagacaccaaactccaggctgactctagtgtagcattacatgacagatagcaggccctgaaagaaatacaaatattttaccctaaaatacattttttatcatattttgaaatgtccctacaaagttgtctcttgtggggaaagtctacatgctacagggaatccctttccaggccttttccctaatctaggcacctttttaagtctgataagaaacatttacaatcaattctctctgaagcctgctacctggaggcttcatctgcataataagaacaaccccttaacacagagactgccttctatggattccaggtctttagataaactctttcaaccaattgccagtcaaagtatcagaaaataacggctggtaactatgtaattatgcatatatatgagtagaattttgggggtgggcacagtggctcatgcctgta

SEQ ID NO: 1880114 - DNA, 4001 bp, Homo sapiens
atcccagcactctgggaggctgaggtgggtggatcacttgagatcaggagtttgagaccagcctgaccaacatggtgaaacctcgtctctaataaaaatacaaaaattagccgggcgtcatggcgggcacctgcagtcccagctactagggaggccgaggcaggagaattgcttgaacccgggagatggaggttttaatgagccgaaattgcgccactgccctccagcccgggcaacagaccgagacaccttctcaagcaaaaataaaaacaaaaagctgcaggtggaaaaaaaaaagtctggattttggttcagagtccctggggccttcctcagtagttttctctttccttaaaaaaggaagcttgtctcagtctctgcatctctctgagtccttttggagattgaggatggtgaggtctcagtgcttggcccccttctaactctgggtacctcccctcccgtgggtcaacctggtccagtgcacaggccccagctccgacgaccatctcccccctaccctttgctcccagcaaaggccatttctaggtcagtcgtgaggtacagccaggacagggcagctcgctccgagatttttggctctcgaaggccttgagcgctgtggttctgcagaacgctgtctgtctcttgtggaggaactgacacccgctggagaaagtgtggagggaagcgagggctgcacctgcacgcaggagctgaggcaagcggcggttcccagctctcagtgcaaaagacatttgtcatctgagaggctggactcagttattataattttcaattttgtcaataaaaaccgaatggaaatttgttttcttacttgtagaaacctcctcacaagacctcccatcttacattccagggagacttagcagggtattccgccaagacataggttagactgcggttctgatctgcaggcctcgatgccctgcgccggggcaccagggcacgggcaaagccctccccctacacaaagcaagggtgttatgcctacaaccgaacggggacactaagagcccccaacatgcacggttttcattccaaagaaaaccaccagttctgagtacaacttccacctggctctattaactgagtacacgtttccccagcacagaaatcctacaaactcccgtgaatgctgtggtgaaaagcaggagctgccagggcaagatggatcgcacctgcaatcccagcacttcagaaggctgggcggaccacttgagcccaggaggtggagcccagcctgagcagaatggtgaaactgctacgaaaaaagaaaaagaaaggaaagagaaagaaaagaaaataaaaaaaaaaagagaaaaaactagccgggtgtggtggcgtgcggttgtcctactcgggagcctgagatgggaagatcgcgccagttctccagcctggacggtacagcgagacttgtcttagggagggggggaaaaaacaacaaaaaaaacagaggctaagaggtaactccgaggatgacagaaaacaccagagtttttaagagatgttagaagccctgggagcactgaacaaaccagaaagctcccgacccttgatccctgagctccacctagcaagtaccgcggcagctaacctgggagaacaccccaaccaacagagactgaaattcgcctcccaagagagtaagtggatagttctaagctgtccccaaacatggcctcacaaaggaaaactaaccgttgcgaacggaaacaactgaccggacagaacacagccacaaaacacgagcccgcaccctgagttacaaaaacacttacggctcacctactattcgcaccacagaagcaccaggggaaagcgcgaacgcagtcccctactatcacaagttatgcagtcgagttcctcacattgggggaaaatggcaggggtcagtacacccggaacataacggataagcctcgccctgagaaaaccaccttcgtgatcatggtatctcccccgccaagtaagtatgagcttttgcacctccgccccgccacagcctcacacgcttcaccctttacacgcacggtcacttgccccgcgcacgccccccccccccaccccccccgcccccagccctcctagccctgacacatagctgggactctcaggtccgaccagcggtcctgaacccgctcccacggcacgggaactccttagtggcgaagcagcagcccctgcgctgcctcatctacatagaaatcgccctatccgtgatgtcaccgacagcgcctttcccagacaccgtctgctcttccgccccaccctccgccgactcagccgatcaacccgctgccggagctggcggaggaagtgacgtctgtctctttctccttttcctcctgccattgtcctttggggaggtgcgcagagatcccacgtctggtctccccctaagactgtggtacttgatctgtgtcctgcagagaacccttctggcggccaacaggaagcttgtgcacccttcttcagataatgtcttttaatgcgcagacttgaacgtttaggattacaaggaaaaccggttcctttcaaacctgtttatctttgtgatgtagcattccgtttcaagttgaaagccattcaatgtcagagagaaaacatatctatgaaaccagagaggctgctcagatgggttgcaaactagccatccttactggttttaccactagaagtgttacaaagacagttgtccaattttatgaatcttgaagggttttttgttgttgttgttatttcaaatacagtgtaatacaaaaatatgtggcccccgcagagacgattggacactctcaggcatggtgatggagtttgtcatctcttccacggccatctcagaaccttagtgcttacctcatgttagtattttatattctccaaagacacaaaaataatcccaatttgacaaaacaaacaaaaaaacatctagggcatgtcttatttgaggcgcttaacaaatgactggatcatctcccttgtatataacccagaaaacactgtgaagtagagcaaaattggaaagcccaagtcaaagaccatttgcaaatttcaagtagattccagtctgttgctcaaatcacaaaacatgaaatggaggggtctcccttggagaccataaagtctgtgacatggtggccagttgggtcactggaaaacatggcaaaatattgaaaatgagggattaggtgagagtgtagcaactgaacactaaatgcttgatccaggtgccattcctggatactgacagggagacacattgtccaggtaatactggaaaaatactttctatagtgtaaaccacaaataaaattccaagcccctcaactatttgaatgcacccctcctctcagccagggtcattccaaagttaacctgaaaaactggttcagaccatgatgggaagtaggggtcagatatgcctcattataccctccttcctttggaattcaggcacaactgaccagcacatccgaccaggcccaactgacattacaacagcgatctcaagactttttgtagcaataagacaccaaactccaggctgactctagtgtagcattacatgacagatagcaggccctgaaagaaatgaaaatattttaccctaaaatacattttttatcatattttgaaatgtccctacaaagttgtctcttgtggggaaagtctacatgctatagggaatccctttccaggccttttccctaatctaggcacctttttaagtctgataagaaacatttacaatcaattctctctgaagcctgctacctggaggcttcatctgcataataagaacaaccccttaacacagagactgccttctatggattccaggtctttagataaactctttcaaccaattgccagtcaaagtatcagaaaataacggctggtaactatgtaattatgcatatatatgagtagaattttgggggtggacacagtggctcatgcctgtaatcccagca

SEQ ID NO: 1880115 - DNA, 4001 bp, Homo sapiens
tttcctgtaacactttccaacttgaagcctagcaaattgaaggacctggcccaaggtcaaacagaaggcaaggggcagcgccaggactggaagaaggccttcccaaaggcagacagaagctcatgtctttgtcagaacctcggtatttctgatgcgcctggaagccaatatccaagccgttctcagccaccggattggtgggtccttttgctcagaaactcctcgatgaggaatcccaagcatacgttagtgatgacggtcccgaaacaagggacatttcttaaacattctaaaaacccttttgctcatcggtaacgcaatgaaagttgttttcggtcttgcttcatatattttatatttgagcaaggcaatgtccgctgttggggttagaagtaaatggctcgtcttcatcaaactagatcagtccgtaagaagtacggcttccactcgcagtgtcctgaacactcgctgggcgtcctgtgcgttctagccggttttctttggagccgcgggtttctgcaccgcgcccgggttgggatggcagaggcttctcgggacgtgcggatctatgagtgccgtccccagggtagccaccaggggacgccataggccttccttccgtggtcctctttgcctttttcgtttgggccaggtagtttctattgaccaggacattagagatcagaagtgggtggggtcagaaaacacaccctgggagaggctggcgaaatgcccagaacctccatcactaggcctggggttttcttctgtagtggaattcttgtgctcatgtagtgcagggacaaaaccaattagatacttctgggagttaaaaagagatgaatttacaatgccatttgagaaggggtattaaggaaacgtccgaatttgccagggtactgatgcgtgtctggtgcaaaacgcaggttgagagagagctaagtacttcctgtccatgaaggtgataagcgagggcctgaagagggacgggggaggacactggcgccagagatagaaagaggcggcttgggggtgggaagcatgggtcggggtgctatttagaaagttgcctggcaatggatgtgggatgtggaagcgagacatcaaacaagaagctgtcacttaaatgaaatctgaagaaagactagatatgtaaacggcaggagatagtggatccggctcctcataaaatttcccgctttatatttcagggaggatcgcagcgcattttcgccaagacaggtgagactgcggttctgacctgcgtgtctcgggatgaattgcgttagggcacctgggcgccggtagaccccttcccctccgcaaagtaagcgtgttatgtctacaacccaacgggaacactaagagccccaaaggccctgatttcttcccaaagaacagcgcccgtctgcgtagtttgtacctggctctaccaagtgagaacacattccccgctagcacagaaatcctacaaactcctgagggggctgcgcttagaagcagaggctgtgtaaaaggtgattgggggctagggaaaaacaagaagatttttacagagcgtgagaccccaagagaatggagactatggaccaatctctgcaaaaagcagcctcatgttgaaaggaaggagctgtgcggccttcgcgctacttagcttgtgttaaacaggaacacaacgcctgacgcttatttttccggcaggaacgacggcgacatgttacttcctgtttccctgccatccggctataagaataacacaccaccaccaagattatacagcaaaaaaaagcgagaagtagacctttgcataccaactgctttttgcactggaaaattcaggggaaagcgcgaacgcagtcccccactaccacaaattacgcagtcgagtttcccacagttggggaaatcgcagaggtcaacacatccggagtgcaatggataagcctcgctctggaaaaaccactttcatgatcatactatctcccctgccaggtaagtgtgagttcacacatctccgccctgcgacagctccatacgcctcaacctttacagacacggtcacttgccccgcgcacccgcacccccacccccaccccgccccatgccacccggagccctcctagccctgacacacagctgggactctcacgtccaaccagcggtcctggacttgctcccaaagcaggagaaatccttcgtgggaagcagcagcccctaagctgcctcatctacgtaggaatcgccctatccgtgatgtcaccgacagcgcctttcccggtccccatctgctcttccgcccgaccctccgccactcagccgaccaacccgctgcgggagccggcggaggaagtgaagtctacctctatctcctttccctcccttccccacccctggtctctcccaaagaagtaggttcttagcctgtgatgccaaggacccctttggcggccagctggagcctgggcgctcttctttgagtaatggcttttaatgcgcaaactagaaagtttaggattacaaagaaaaccggttcttttcacatacggttatccttgtgatgtaccattccgcttgacagtggaagtcgttcaatatcagagagaaacagtatctatgaaactagagaggctgctcagatgactgcaaaccagccatccttacttgttttatcactaggaatattataaagacggctgtccagtttcatcaatcttgtagggtttttttcaaatacagcaatgtacaaaaatgtgctgccccagcagagcacactggacactcaggcatggtgctggagtcgttttgccatctcttcactgccttctctagaccttagcgcttacctcatgttaacactttatatgctgcaaagacagaaacaaagtcatccaaatgtggcaaaaatattttggggaaattttatttcaggtatttaactgattacttttaatatgtaggcaacaacaccaaactctgacaatactccgcagacttattaatggtttccacccccgtctctgcaaatctatcaggcaagtttttcccgccctttactttcatataaactgagtcatacactgtgtagtgagttttggggggagtgttactgcccaacaggttcaccttgcctgctgcctagacagagccaattttttgacacaggggaattgcaataaagagttatttaaacagagctggctgtgtgggagaccagacttttatttttactcaaatcagcctcctcaagcattccgggaccagtttttaaggataatttggtggatgggggccagtgagttgggagttctgattggtcaggtcagagatgaaatcacagggagctgaagctgtcgtcttgtcctgggtcagttcatgtgtgggggacacaagaccagatgagccaggttatcagtctagctggtgccagctgatccactgagtgcagggtcggcaaaatacctcaagcactgatcttaggttttccaataatgatgtgatctccaggaacaatttggggaggtttagaatcttgcagccagaggctacatgactcctaaaccataatttctaatctcgtggctaatttgttagtcctgcaaatgcagtctagtccccaggcaggaaaggggatattatcatctttgtttcacagctaaaccataaactaagttcctcccaaagttattttggtctgagcccaggaatgaacaaggacagcttggatgttagaaacaagatggaatcagatcagatctctttcaccgtgataattgtcccagttctaatttttcaaaggcagtttcagaagcagaggcataggtttgacttctttcactcagtcttatgtctatgaatttttcaccttattcatatggttatttgtttctgtgtgtcttactttgtatgaatatacattaacttatttattcatttgactgttgttgaacatgttgacctaaaagaaagaggctgaagcacaaaacataatatagagtttactt

SEQ ID NO: 1880116 - DNA, 4001 bp, Homo sapiens; identical to SEQ ID NO: 1880066

SEQ ID NO: 1880117 - DNA, 4001 bp, Homo sapiens; identical to SEQ ID NO: 1880067

SEQ ID NO: 1880118 - DNA, 4001 bp, Homo sapiens; identical to SEQ ID NO: 1880068

SEQ ID NO: 1880119 - DNA, 4001 bp, Homo sapiens; identical to SEQ ID NO: 1880069

SEQ ID NO: 1880120 - DNA, 4001 bp, Homo sapiens; identical to SEQ ID NO: 1880070

SEQ ID NO: 1880121 - DNA, 4001 bp, Homo sapiens; identical to SEQ ID NO: 1880071

SEQ ID NO: 1880122 - DNA, 4001 bp, Homo sapiens
aatcccagcactctgggaggctgaggtgggtggatcacttgagatcaggagtttgagaccagcctgaccaacatggtgaaacctcgtctctaataaaaatacaaaaattagccgggcgtcatggcgggcacctgtagtcccagctactagggaggccgaggcaggagaattgcttgaacccgggagatggaggttttaacgagccgaaattgcgccactgccctccagcccgggcaacagaccgagaccccttctcaagcaaaaataaaaacaaaaagctgcaggtggaaaaaaaagtctggattttggttcagagcccctggggccttcctcagtagttttctctttccttgaaaaaggaagcctgtctcagtctctgcatctctctgagtccttttggagattgaggatggtgaggtctcagtgcttggcccccttctaactctgggtacctcccctcccgtggtcaacctggtccagtgcacaggccccagctccgacgaccatctcccccctaccctttgctcccagcaaaggccatttctaggtcagtcgtgaggtacagccaggacagggcagctcgctccgagatttttggctctcgaaggccttgagcgctgtggttctgcagaacgctgtctgcctcttgtggaggaactgacacccgctggagaaagtgtggagggaagcgagggctgcacctgcatgcaggagctgaggcaagcggcggttcccagctctcagtgcaaaagacatttgtcatctgagaggctggactcagttattataattttcaattttgtcaataaaaaccgaatggaaatttgttttcttacttgtagaaacctcctcacaagacctcccatcttacattccagggagaattagcagggtattccgccaagacataggttagactgcggttctgacctgcaggcctcgatgccctgcgccagggcaccagggcatgggcaaagccctccccctacacaaagcaagggtgttatgtctacaaccgaacggggacactaagagcccccaacatgcacggttttcattccaaagaaaaccaccagttctgagtacaacttccacctggctctattaactgagtacacgtttccccaacacagaaatcctacaaactcccgtgaatgctgtggtgaaaagcaggagctgccagggcaagatggatcgcacctgtaatcccagcacttcagaaggctgggcggaccacttgagcccaggagttggagcccagcctgagcagaatggtgaaaccgctacgaaaaaagaaaaagaaaggaaagagaaagaaaagaaaagaaaaaaaaagagaaaaaactagccgggtgtggtggcgtgtggttgtcctactcgggagcctgagatgggaagatcgcgccacttctccagactggacggtacagcgagacttgtcttagggagggggggaaaaaaacaacaaaaaaaacagaggctaagaggtaactccgaggatgacagaaaacaccagagtttttaagagatgttagaagccctgggagcactgaacaaaccagaaagctcccgacccttgatccctgagctccacctagcaagtacagcggcagctaacctgggagaacaccccaaccaacagagactgaaattcgcctcccaagagagtaagtggatagttctaagctgtccccaaacatggcctcacaaacgaaaactaaccgttgcgaacggaaacaactgaccggacagaacacagccacaaaacacgagcccgcaccctgaattacaaaaacacttacggctcacctactattcgcaccacaaaagcaccagaggaaagcgcgaacgcagtcccccactaccacaaattatgcagtcgagtttcccacgtttggggaaatcgcagaggtcagcacatccggaacacaatggataaccctcgccctgagaaaaaccaccttcgtttgataatagtatctcccctgccaggtaagtataagcttttgcacctccgccccgccacagcctcacacgcttcaccctttacacgcacggtcacttgccccgcgcacctccccgccccccccagccctcctagccctgacacacagctgggactctcaggtccgaccagcggtcctgaacccactcccacggcacgggaactccttagtggcgaagcagcagcccctgcgctgcctcatctacatagaaatcgccctatccgtgatgtcactgacagcgcctttcccagtccccgtctgctcttccgccccaccctccgccgactcagccgatcaacccgctgccggagctggcgaaggaagtgacgtctgtctctttctccttttcctcctgccattgtcctttggggaggtgcgcagagaccccgcgtctggtctccccctaagactgtggtacttgatctgtgtcctgcagagaacccttctggcggccaacaggaagcttttgcacccttcttcagataatgtcttttaatgcgcagacttgaacgtttaggattacaaggaaaaccggttcctttcaaacctgtttatctttgtgatgtagcattccgcttcaagttgaaagccattcaatgtcagagagaaaacatatctatgaaaccagagaggctgctcagatgggttgcaaactagccatccttactggttttaccactagaagtgttacaaagacagttgtccaattttatgaatcttgaagggttttttgttgttgttgttatttcaaatacagtgtaatacaaaaatatgtggcccccgcagagacgattggacactctcaggcatggtgatggagtttgtcatctcttccacggccatctcagaaccttagtgcttacctcatattagtattttatattctccaaagacacaaaaataatcccaatttgacaaaacaaacaagcaaaaaaacatctagggcatgtcttatttgaggcgcttaacaaatgactggatcatctcccttgtatataacccagaaaacactgtgaagtagagcaaaattggaaagcccaagtcaaagaccatttgcaaatttcaagtagattccagtctgttgctcaaatcacaaaacatgaaatggaggggtctcccttggagaccataaagtctgtgacatggtggccagttgggtcactggaaaacatggcaaaatattgaaaatgagggattaggtgagagtgtagcaactgaacactaaatgcttgatccaggtgccattccctggatactgacagggagacacattgtccaggtaatactggaaaaagggggtgggcacagtggctcatgcctgtaatcccagcactccctcaggaggctggcagattgcctgagtccaggagtttgagaccagcctgggaaacatggtgaaaccccatctctacaaaaaaaaaaaaaaaaaaaaaaaaaattagccaggcatggtggtgagcacctgtggtcccagctactcaggaggctgaggtgggaggattacttgagcctgggaggtgaaggttgcagtgacccaagcttgcaacactgcacttcagcctggatgacagaggaatgggccttcactagacactgaacctgctggcaacttgatcttggactgaccatcctccataactgtgagcaataaatttttgttgtttataagttactcactctgtggtattttgttatagcagcacaactggattaggacatcaacctgaccttaagaaatcatctcaattcagtcttggctctggtgggaaacaagggacacactcggatgtgtgatttaaagagagttgtggttttttttttgtttttttttttttgagatggagtctcgctctgctgcccaggctggagtgcagtggtgccatctcggctcactgcaagctccgcctcccgggttcacgccattctcctgcctcagcctcccgagtagctgggactacaggcgcccgctaccacacccggctaattttttgtatt

SEQ ID NO: 1880123 - DNA, 4001 bp, Homo sapiens
ccccagagccggtttagaatccagcaaaggcccctgcccggtgtatcccacctctggagacccgaggatagtgcggtggggagcaccgcgggttctggtctttcccacgctcacgtccactggcccaggcccaaaggaaatggctgtgagagcaagatgtgaagatagttacaaataccagctagggccagtgacagttgcagaaatgaggacttgtaatagttaggagtatttcttcattattttgagatgaatacatttggttatatattaaccaatacttttcttgagaattctcatcttccatcatcctcgctatcatattcattaatagttaacttttagaaatctcaatatttaggttacaggatagcaaatatggaatgtgatctagctaaaaaaggagtgaacatcattcaaagacaaataaaagactttatcctgttggggaaagggttggcatattttcactgaatgagaaaaagtatgattttcctattgtctttatttgaaccttaagtatggctttacaaggaggaaaaaggaggaagaagaagagaaagaagaggatgaggaagaggaggaaaagagaaggaggaggaggaaggtgcacattgatgccactttgagaagaagtggactgtggtggatttgtaatgtatcagttttgccaagctgaatgcacatttcccagatttgccatctttagatagctctaggttagcctgggcaacaggagacacttggaagatagaattcaagtggctgttacacgcttttgtatactgggaagggcgttgttacagctcaggcatgatcttcatcttccctgacccttggactggtgggtgttttgcttcttgatctaacattaaggttagaagttgcaggatcccagctgggttttgttacatccaatctggtttaagttcccatattattaggaaagctttagggtgcttcaggaaaacgcttttcaaaaaatcagatttggaaaatatcaaatggaattacaggcaataagcataacccagtggaaacatgaatcaaaccctctagagcagggttgtctaaattttgggttccttgggccacactgggaaaaaaaaaaaaagacatttgtcttgggcccagcataatatacactaactgcaactgaaccgtgcgtgtaaagcttgtaaacaaaatctgtctgtaaagtctgtaaacaggccaggcgcggtggctcaggcctgtaatcccaacattttgggtggccgaggcgggcggataacttgaggtcaggagtttaagaccagcctggccaacatggtaaaaccctgtctctaccaaaaattcaaaaaattagccgggcctaattttttagtggcctgcgcttgtaatctcagttacttaggagatcgagtattctctggctgaggcaggagaatagcttgaaggcaggaggcagaggttgcagtaagccgggatcccgccatgcactccagtggactgtttgctgttaataaatgtttacaatgggctcccgtagggaaaagaaaagcttagttttatttctatagaacaaaaaaaaaagttaagagattagtagagacgggtccaccatatttgaccacactgacatcaaactccagagctcgagcggtattaacataaagttatcaatgcatctcacagactactgagattacaagcgtgagaaccaaccactacctggcaaaatctttactttgaaagtaagttacagatgggaacaaagacctgtttattagtttatactaacgccttgtatatgcttccacagcaaacaaaatccacttttaaaacgacaacaacccagggaaaaacacagacacagttccccactgccacaaattatgtaatcaagattcccacattcggggaaatcacaggggtcagcacatccacagtaaaactgctaagccttgctctggaaaaaccaccttcgtgatcataacatttcttctgccagataaacataagtataagctcacgcccctccgccccgccgcagcctcatatgcctcaccctttacacgcaaggtcacttgcgtcacgcgcatccaggagccatcctagccctaacacacagctgcgactctccggtccgaccagaggtcccagacttactcccacggcacgggaactctttcgtggcgaagcagcaggtggcgaagcagcagcccctgcgctgcctcatctacatagaaatcgccctctccgtgatgtcaccgacaacgccttctggatccccgtctgctcttccgcctcacccaacgcccctcagcggagcaaccagctgtcggagccggcgggagaagtgacttatgcctgtcccttctttctctcctgtccccgcccctcgtctcccgcaatgaagcgagtatttaatctgtgtcctgtggaagtcccatttggcggccagctggaagcccgtgcacccttcttcaaataatggctttcaatgagcagactagaacgtttaggattacaaaggaaaccgattcctttcaaacttggttatctttgtgatgtggcactgtgtgcatatcttcgttaaaacgcattgaaggccactgcactccaccctgggcgacaggaggtgactgtgtctcgaaaaaaccaaaaacactcccccctcaccccaaagcattagacgtcaaggctggcagggatgtctgttctcttgaaagttcaatatcaaaatacttggaaattaaactaaaatagtagaagcaagaacaaaaattaagttgaagataatatcaagaatatttcccacaaaccaaaataagaatgtaaaaacaggagagaaaagttcaggaagatagacgtccaaggtccatatgattagcatgcgtatcagaaagaggatagaaaaaaatcagtacaataattcaaaacactttccataccaatggattgaaactacagtgaatttaaagtattgaattgatattgaactttcaagagaacagacttccctgccagccttgatgtctaatgctttggggtgaggggggagtgtttttggtttttttgagacacagtcacctcttgtcgcccagggtggagtgcagtggccttcaatgcgttttaacgaagatatgcacacagtgccacatcacaaagataaccaggtttgaaaggaatcggtttcctttgcaatcctaaatgttctagtctgctcattgaaagccattatttgaaggagggtgcacgggcttccagctggctgccaaaggggacctccacaggacacagattaagtacccgcttcattgcgggagatgaggggcggggacaggagggaaagaagagagaggcataagtcacttccccgctggctctggcagaggtttggtcccctgagtgctcctttcttgtaagcagttcttgtttcatattttcactatctctgacactattaactgtacaattttttttcttctgtacacaaaaaaagtttgtttcaatagtgaagtatgagtcagggtggtggctcatgcctataatcccagcactttgggaggccaaggcgggcagttcacctgaggttaggagttcaagatcagcctggccaacatggtgaaaccctgtctctactaaaaatacaaaaattagccaggtgtggtggtgggcacctgtaatcccagctatttgggaggctgaggcagcagaattgcttgaacgcaggaggcggtggttgcagtgagccgagattgcaccactgcactccagcctgggcaacagagcaagactccatctcaaaaaaaaaaaaaaaaaaaagtgatgtatcttctacagtatactcttccaacttatcagattctgtcattgacatacgatgttgcatcaatacttgtgtaaggggtttaacactactactatatataatatatgtaatatattttatatatatatgtatatatatatataacactaaggtttattaaaacaactctcagtaaacagatgcc

SEQ ID NO: 1880124 - DNA, 4001 bp, Homo sapiens
aaaggcagctgttcttgtatccccagagccggtttagaatccagcaaaggcccctgcccagtggatcccacctctggagacccgaggatagtgcggtggggggcaccgcgggttctggtctttcccacgctcacgtccaccggcccaggcccaaaggaaatggctgtgagagcaagatgtaaagatagttacaaataccagctagggccagtgacagttgcagaaatgaggacttgtaatagttaggagtatttcttcattattttgagatgaatacatttggttatatgttaaccaatacttttcttgagaattctcgtcttccatcatcctcgctatcatattcattaataattaacttttagaaatctcaatatttaggttacaggatagcaaatatggaatgtgatctagctaaaaaaggagtgaacatcattcaaagacaaataaaagactttatcctgttggggaaagggttggcatattttcactgaatgagaaaaagtatgattttcctattgtctttatctgaaccttaagtatggctttacaaggaggaaaaaggaggaagaagagaaagaagaggatgaggaagaggaagaaaaaaggaggaggaggaaggtgcacattgatgccactttgagaagaagtggactgtggtggatttgtaatgtatcagttttgccaagctgaatgcacatttcccagatttgccatctttagatagctctaggttagcctgggcaacaggagacacttggaagatagaattcgagtggctgttacacgcttttgtatactgggaagggcgttgttacagctcaggcatgatcttcatcttccctgacccttggactggtgggtgttttgcttcttgatctaacattaaggttagaagttgcaggattccagcagggttttgtcacatccaatctggtttaagttcccatattattaggaaagctttagggtgcttcaggaaaacgctttttaaaaaatcaaatttggaaaatatcaaatggaattacaggcaataagcataacccagtggaaacatgaatcaaaccctctagagcagggttgtctaaattttggcttccttgggccacactgggaaaaaaaaaaaagacacttgtcttgggcccagcataatatacactaactgcaactgaaccgtgcgtgtaaagcttgtaaacaaaatctgtctgtaaagtctgtaaacaggccaggcgcggtggctcaggcctgtaatcccaacattttgggtggccgaggcgggcggataacttgaggtcaggagtttaagaccagcctggccaacatggtaaaaccctgtctctaccaaaaattcaaaaaattagccgggcctaattttttagtggcctgcgcttgtaatctcagttacctaggagatcgagtattctctggctgaggcaggagaatagcttgaaggcaggaggcagaggttgcagtaagccatgcactccagtgaactgtttgctgttaataaatgtttacagtgggctcccatagggaaaagaaaagcttagttttatttctatagaacaaaaaaaaaagttaagagattagtagagacgggtccaccatatttgaccacactgacatcaaactccagagctcgagcggtattaacataaagttatcaatgcatctcacagactactgagattacaagcgtgagaaccaaccactacctgacaaaatctttactttgaaagtaagtgacagatgggaacaaagacctgtttattagtttatactaacgcgttgtatatgcttccacagcaaacaaaatccacttttaaaacgacagcaatccaggggaaagcacaaacagttccccactgccacaaattatgtagtcgagattccctcatttggggaaatcacaggggtcagcacatccagagtaaaattgctaagccttgccctggaaaaaccaccttcgtgatcataacatttcttctgccagataaatataagtataagctcacacccctccgccccgccgcagcctcatattcctcaccctttacacgcaaggtcacttgcgtcacgcgcatcccggagccatcctagccctaacacacagctgcgactctccggtccgaccagcggtcccagacttgctcccacggcacgggaactctttcgtggcaaagcagcagcccctgcgctgcctcatctacatagaaatcgccctctccgtgatgtcaccgacaacgccttccggatccccgtctgctcttccgcctcacccaacgcccctcagcggacctacccgctgtcggagccggcgggggaagtgacttatgcctgtcccttctttccctcctgtccccgcccctcgtctgccgcaatgaagcgggtacttaatctgtgtcctgtggaggtcccacttggcagccagctggaagcccgtgcacccttcttcaaataatggctttcaatgagcagactaggacgtttaggattacaaaggaaaccgattcctttcaaacctggttatctttatgatgtggcactgtgtgcatatcttcgttaaaacgcattgaaggccactgcactccaccctgggcgacaagaggtgactgtgtctcaaaaaaaccaaaaacactcccccctcaccccaaagcattagacgtcaaggctggcagggatgtctgttctcttgaaagttcaatatcaaaatacttggaaattaaactaaaatagtagaagcaagaacaaaaattaagttgaagataatgtcaagaatatttcccacaaaccaaaataataatgtaaaaacaggagagaaaagttcaggaaggtagatgtccaaggtccatacgattagcatgcgtatcagaaagaggatagaaaaaaatcagtacaataattcaaaacactttccataccaatggattgaaactacagtgaatttaaagtattgaattgatattgaactttcaagagaacagacatccctgccagccttgacgtctaatgctttggggtgaggggggagtgtttttggtttttttgagacacagtcacctcttgtcacccagggtggagtgcagtggcctttaatgcattttaaggaagatatgcaaacagtgccacatcacaaagataatcaggtttgaaaggaatcggtttcctttgcaatcctaaacgtcctagtctgctcattgaaagccattatttgaagaagggtgcacgggcttccagctggctgccaaaggggacctccacaggacacagattaagtacccgcttcattgcgggagacgaggggcggggacaggagggaaagaagagagaggcataagtcacttccccgctggctctggcagaggtttggtcccctgagtgctcctttcttgtaagcagttcttgtttcatattttcactatctctgacactgttaactgtacgattttttttcttctgtacacaaaaaaaagtttgtttcaatagtgaactatgagccagggtggtggcttatgcctataatcccagcactttgggaggccaaggcgggcagatcacctgaggttaggagttcaagatcagtctggccaacatagtgaaaccctgtctctactaaaaatacaaaaattagccagatgtggtggtgggcacctgtaatcccagctatttgggaggctgaggcagcagaattgcttgaacacaggaggcggtggttgcagtgagctgagattgcgccactgcactccagactgggcaacagagcaagactccatctcaaaaaaaaaaaaaaaaaaaaagtgaagtatgtaccttctacagtatactcttccaacttaacagattctgtcattgacatacgatgttgcatcaatacttgtgtaaggggtttaacactactactatatataatagatgtaatatattttatatatatatgtatatatatatatataacactaaggtttattaaaacaactctcagtaaacagatgcccctgatg

SEQ ID NO: 1880125 - DNA, 4001 bp, Homo sapiens; identical to SEQ ID NO: 1880123

SEQ ID NO: 1880126 - DNA, 4001 bp, Homo sapiens
ttctcctcttccatcaccctagctagcacattcattaataattaacttttagaaatctcaatatttaggttacaggaaagcaaatatggaatgtgatctatctagctaaaaaaggagtgaacatcattcaaagacaaagactttatcctgttggggaaagggttggcatattttcactgaatgagaaaaagtatgattttcatattgtctttatttgaaccttaagtatgattttacaaggaggaaaaaggaggaggaagaagcaaaagaagaggaagaggaggaaaaaaagaagaggaggaagatgtacattgatgccactttgagaagaagtggactgtggtggatttgtaatgtatcagttttgccaagctgaatgcacatttcccagatttgccatctttagatagctctaggttagcctgggcaacaggagacacttggaagatagaattcgagtggctgttacactcttttgtatactgggaagggcgttgttacagctcaggcatgatcttcagcttccctgacccttggactggtgggtgttttgcttcttgatctaacattaaggttagaagttgcaggattccagcagggttttgtcacatccaatctggtttaagttctcatattattaggaaagctttagggtgcttcaggaaaacgctttttaaaaaatcaaatttggaaaatatcaaatggaattataggcaataagcataacccagtggaaccatgaatcaaaccctctagagcagggttgtctaaattttggcttccttgggccacactggaaaaaaaaaaaagacacttgtcttgggccaaacataatatacactaatcgcaattgaactgtacctgtaaagcttgtaaacaaaatgtgtctgtaaagtctgtaaacaggccaggtgcggtggctcaggcctgtaatcccaacattttgggaggccgcgaggcaggcggaaaacttgaggtcaggagttcaagaccagggtggccaacatggtgaaaccctgtcactctttttttttttttttttttttgagacggagtctcactctgtcgcccaggctggagtgcagtggtgcgatctcagctcactgcaacctctgcctcccgggttcaagcgattctcttgcctcagcctcctgagtagctgggactacaggcacgtgccaccacacccggctaattttttttttttgtatttttattagagatggggtttcactgtgttagccaggatggtcttgacctcctgacctcatgatccacccgcttccgcctcccaaagtgctgggattacaggcgcgagccagtgcgcccggcccggtgaaaccatgtctctactaaaaattcaaaaaattagccggacctaattttttggttgcctgagcctgtaatgccagttactcgggaggctgagtattctctggttgaggaaggagaatagcttgaacgcaggaggcaaaggttgcagtaaggcgagatcgcgccatacactccagcggactgtttgctgttaatcccatagggaaaagaaaagcttagttttatttctatagaacaacaacaaaaaaagataagagattagtagagacgggttcactatatttgcccacacacgcctgaggtcgagcgatattaacataaacataacctatcgacgtacctcatagattgctgggattacaaacgtgagaaccacgatgtcccaaatttttagtttcagtgaagttacagatgggaacaaagacctgattctcagcttacgctgacgcccagtatgcgtttctgcagcaaacaaaacctatttttaaaacgacaaaaatacaggggaaagcgcgaatgcagtctaccactgccacaaattatacagtcaagtttcccacatttggggaaactgcaggggtcagcagatccggagtgcaatggataagactcgctctggaaaaaccaccttcgtgaccagggtatctctcctgccaggtaagtatgagttattgcacctccgccccgccggcagcctcacacgcttcaccctttacacgcacggtcacttgccccgcgcacacccccctcccccccagccctcctagccctgacacacagctgggactctcaggtccgaccagcggtcctgaacccgctcccacggcacgggaactccttcgtggcgaagcagcatgtggcgaagcagcagcccctgcgctggctcatctacatagaagtcgccctatccgtgatgtcaccgacagcgcctttcccagtccccgtctgcctttctgccgctcagccgaccaacccgctgccggagccggcaaggggaagtgacgtctgcctctcccttttttctctcctgcttccctcatctgttctcttccaaagaagctggtccttagcctgtattgcggagcaagctttcggcgaccagctggaccctgggcacccttcttcgaacaatggcttttaattctcagactagaacgtttaggattacaaaagaaactggttcttttcacattcttattcttgtgatgtagcattccgcatatatatatatatatatatatatatatatatatatatgtatccaactatcctaaaagacactacccttcatcattccatgccattagacatgtataggaccatgcatggtgatctcctccagacaaaagtaaatgctggtgcagaacaggtaagtgtactataatttgagtacatcagcttttgggcattttaaaccatgggtcagacaagttagagcaagagggcaggttgatagcaagagggagtgtttttcttttaattttctttttttttgttttgagacggagtctcgcgctcttcgctcaggctggagtgcagtggggctatctcggctcactgcaagctccgcctcccgggttcacgccattctcctgcctcagcctccccagtagctgggattacaggcacctgccaccacgtccggctaattttttgtatttttagtagagatggggtttcactctgttagccaggatggtctcgatctcctgaccttgtgatccgcccacctcggcctcccaaagtgctgggattacaggcgtgagccaccgcgcccggcttcttttaattttcaaatagcaaagtgatgtttgccactgtcatttcagaatgaggtgacaatttgttgttgtttggttttgtggggttttttgtttgtttgtttgtttctgagacaaggtctcactgtcgcccaggttggagtacagtggcatgatcagggtttacttctgccttgacctcacgaattcaagcaaacctccttactaatcctcccaagtagctgggactacaggtgcatgacaccacaccctggggtgtgaactgggatttgatgttttcagttggctccctgatggaataggttcccttactattctggaatacagattgtcttcatgattatgattcataatcataatgattatgacagcagtccctgctgtcaggcagggacgtttaagtctgcagaagctgtctgctgccttttattcagatatgccctgcccccagaggtggaatctagaggcagtaggccttgctgagctgcagtgggctctacccagttcgagcttccctaccactttatttacactgtgaccatagaaccacatactcaagcctcagcagtggcagaaccccctccccctgccatgctccagtgtcacaggttgatctcagactgctgtgctagcagcaggcaaggctccatgggcatgggacctgccgagccaggcacaagagggaatctcctggtctgtcggttgcaaagacagtggaaaaaagcacagtatttgggcaggggtgtactgcttctcgaggtacagtcactcacagcttcccttggctaggaaaaagaaatcccccaaccccttgcacttcccgggtgaggcgacaccccaccctgctttggctcatcctccgtgggctgcatccactgtccaacg

SEQ ID NO: 1880127 - DNA, 4001 bp, Homo sapiens
gcaagataaacctaccaggcagttacattaataaaagagaaacacaaatggtaagcatgcttgaaaagaaatataagtctgtgtatttctttggaagaaacacaaaaggaggaggaatgataagacaggcaataaatacactgtcctaaatattttcatgattctcctgcctccttcgtatccttcttatcccaacaacttctccccagaaaccttcaacttaaacatggtcctgccagaactgggtttgtccttccctttacattttcctctcacctaccctacaccccttccatatctaatctgttctttaacttccaggtcattgagaattttccatttaaaaatataaaaaattcataaagcggaagataaccagtcatccatattcacacctcctggaattaactactattaacatacctacatatttttcttccaaatcattgttaaactatacatgctaagcatagaccatactaacagtagagaagatgtaaacatatgtaaaatttttgaaaaccttacgttcaaaaataacttctcataacatttgggcaaccctggagttacagtcttgtggtacatctacagggagaagaatgtatattttagctagactgtccctatccctaaaagaaaaaggaagaaaaaataataaagaaggatatatatacttgaaaaaataataaaataataaagacgcatatatgtatgcttttataaaatttagctgagactctatttttattttacaaacattccatttaatagtgcatgaacttaactgcagacaaagagacagaaacagaaacgaaggaattcctcaactcccgattacagttagagagatatttttctaaaggaatcttctaaggataaacgtacactaaattaagtagaagacattaagatttggagtggttttcttattcccttttacaatcaggttgattaaggtgtgagttgactttggtacaatgcatccatttcaagtttgatgacgtgtctattactctaaaaggtcctcttgtgccctttgcagtcagttccgccctccccctgaggccagcagtcaatgatgtagtttctgtcactatacaggttagttttaactgttgtagaaattcaccttgatggcgccacacagggtgcactcttttcatcactcggcataatgtttttgagatgatccacgctatttcatgtttccgtaatgtgtcctattttattgctgggtagttcgggtagttggggtagatcgcagcacattctggcgacaggtgagactgcggttctgacctgcaggcctcggtgaacatgagcaagggcacctgggcgccgggagagacctcccttcccctacagaaagcaagcgtgttatgttaacaaccgaacggggaccctgctttcatcccaaagaacagcacccgactgcgtagtttcttccctggctctaggaggtgagaacacattccccgctagcacagacatcctacaaactcctgcggaggctgcggttagaagcagaggctgtgtgaagggtgactctgggggctatgaaaaaacacgaaggttttcacagagcatgagaacccaaaagactggagactatgaagcgatctgcaaaaagcagccccaagtagaaagggaagagaagagccctgcggccacttagtgttaaaagagctcacggcggcggagaggataacacgttactttctgtttcccatcattgcgactgtaaggagaacacttaacatgccacccaagccacaaaactgcagttttaagaataacccttataggggagtctattttttcattacaaaaattcaggggaaagcgcggacgcagtcccccactaccacaaattatgcagtcgagtttcccacatttggggaaatcgcaggggtcagcacatccggagtgcaatggataagcctcgccctgggaaaaccaccttcgtgatcatggtatctcccctgccaggtaagtatgacttcacacacttctgccctgtcacagctccatatacctcaccctttacacacatggtcacttgccccgcgcacccccgagccttcctagccctgacacacagctgggaccctcaggtccgaccagcggtcctgaacccgctcccacggcacgggagctccttcgtggtgaaacagccagtggcgaagcagcagcccctgcgctgcctcatctacatagaagtcgccctatccgtgatgtcaccgacagcgccttcctcgtcccggtctgcttttctgccccaccctccgccactcagccgaccaacatggtgccagagcctgcgggggcagtgatgtctgcctctgcctcctttccctctcttccccgcccatggtcttccccaaagaagcgggtgtttctgttgtagttttttgtttgttttttgttttgcgccgtctcgctctgtcgcccaggctggagtgcagtcgcatgatctcggctccctgcaacctccgcctctcgggttgaagcgattctcctgcctcaggcttccgcatagctgggattacaggcacacgccaccaagcccggctaatttttgtgtttttagtagagacggggtttcaccatgttggccaggctgatcccgaactcctgacctcaggtaatccgccgacctcggcctcccaaagtgctgagattacaggcgtgagccatcacgactgcccagaagccggttcttagcctgtgttgccgaggacctctttggcagaaatctggagcctgtccacccttcttcaaataatggcttgtaatgcgcagactaaaacatggaggattacacaagaaactggttcacttcacatcattatccttgtgatgtagcattctacttgaaattggaagccgttcgatatcagagaaaccatatctatgaaactagagaggctgctcagatgactgcaaaccagccatccttacttgttttaccactagtagtgttataaggacggtggtccaatttcaggaatcttgtagggttctttcaaatacagcaatgtacaaatatgctgccccagcagagcacactggacactcgggcatgatgctggagtttgtcatctcttccacggccttctccagaccttagcacttacctcatgttaacactttatgttctgcaaagacagaaacaaagtggtccaaatttagaaaaaatatatatatatttgggggaaactttatttgaggtgcttaacagattacttttaatctgtagaatacaacaccaaactctgacaatactccacagactccaaatctatcaggcaagtttttcctgtcctttgctttcatataaactgaatcataaagtgtatagtgggttttgggggaatataactgcccaatgggttcatgttgcctgctgcctagacagaaccaatttatcaagacaggggaattgcaataaagaaagttatttacccagagccagctgtgtgagagaccagttttattattacccaaatcagtcttcctgagtattctgggacccgaatttttaaggataatttggtggctgggggccagtgagttgggagttctgattggtcaggtcggagatgaactcaaagggagctaaagcatcctcttgagctgggtcagttcgtgggtgggggccacaagatcagatgagctggtttatccatctgggtggtgccagctgatgcatcaagtgcagggctacaaaatacctcacgcactgatcttaggttttacaatagtgatgtgatccccaggcacaattcagggaggtttagaatctcataagttggaggctgcatgatcctaaaccatcatttctaatcttgtggctaatttgttagtcctgcaaaggcagtctactccccaggcaggaaggggatttgttttgggaaagggctgttatcatctttgtttcacagctaaaccataaactaagttcctctcaaagttattttggcctgtgcccaggaatg

SEQ ID NO: 1880128 - DNA, 4001 bp, Homo sapiens
ctctgatgaagtctatccattttatttcaccatgacttgagaaaaggatgtgtaaatcttctctacaggtctgatcatctaaatcacctgaaaacttcagcaagcatccaatcttctcttctagagatttcatttcagcatcttcttctaacttttgatttgcttcttgctcttgtttagctcttaatttagcttccactttattttgttttctttcttcttctttctttttttttattaatattatttttttggcaaagtaatcatctttgaaaagtattagcaggcctgtgtctgtacttctggccaggggtctctacaaacttcttagcagattcaatgctatcaaacacaacaaaaactgatcccttaaatattttatgcaatgttcttctcatctgaatatttagtacttgatctttatcttctaatcattcttttatgtcatcaagagttgcatcagttcggaagcctttaatataaacagatctgtttctttacatcatttttatactcatcagtcacttcaggtaggggtttgcttgaagaccttctgattttagttttatcttcactgattttcatgagttctgccttggatttgctcaatgcttccacaattacattaaagtctgttgttagatggttcaacctgttgaattttatcattatctccaaagatacccagccttcgtccagttttatctgttcccttaaaaacttgtctcctggcaaattgaagtctccaaaataatactcaatttgatgacagattttggcctccagggcagccatcttttcattatcatcattttcagccattgtggctatctttaaagttccagtcccatagagccgtgccacaggctcacaaacagcaacagcaatgactcctggagtggttttcttattactttttacaattaagttgatcgaagtgtgagttgactaggtacaatgcatccatttcaagtttgatgacaggtctattattctaaaaggtcctcttttgcgctttgaagtcagtccccgctttccctgaccccagcaatcaatgatgtagtttctgtcagtcactatacaggtaagttttacctgttctagaaattcaccttgatggcgccgcataggatgcactcttttcatcactcagcataatgtttttgagattatccatgctatctcatgttttgtaatgtgtcccattttattgctgggtagttcgggtagttggagtagatcgcagcgcattctgctgacaggtcagactgcggttccgacctgcgggcctcggtgaatatgcgcaagggcacctgggcgcgggcagagccgttcccatccacaaaataagcatgttatgtctacaaccgaagggggtcacagagccccaaaggccctgctttcatcgcaaagaactgagcccgtcggcgtacagtttctacctggctctatgaggtgagaacacattccccgccagcacagaaatcctataaactcctgtggggcagcggttagaagcagaggctgttaaaggtaactctagaggctgcggaaaaacacgaagattttcacagagcgtgagaacccaggagactggagaccacgggccaatctctgctaaaagcagccccacgtagaaaggaaagcgctctggggccatcgcgctagttagcttatgttaaacaatctcacctcggctgaccttataatttctccggcggcaaggacaacaaccaacgcgttactttctatttcatagcctcctaactacaaggaaaaacacttcggatgccgtccaggatataacacgatagactgcatgcagtctatctttccacaccgcaaaaaaaaaaaaaaaacgggggaaaagagcgaacgcagtctcccactaccacaaattatgcagtcgagcttcccacatttggggaagttgcacgaattagcttcgccctgcgaaaaccaccttcgtaaacacgatttttcttctgctaggtaaatgtgagtctgcacgcttccgccccgccacagcctcatacgcctcaccctttacacgcacggtcacttgccccgcgcaccctcgaggcctcctagccctgatacacagctaggactctcaggtccgaccagcggtcctggactccctcccacagcacgggaactccttcgtggcgaagccgccggtgacgaagcagcagcccctgcgctgcctcatctacatagaagtcgccctatccctgatgtcactgacagcgccttccccgtcccagtcagcttttccatcccaccctccgccactcagccgaacaacatgctgccacagcctgcgggagaagtgacgtttgcctctccttctttttcctcccttccgcgccgctggtctcccccaaggaagagggttttgatttttgttttgttttgttttttgttttgaaccggagtctcgccctgtcgcccaggctggagtgcagtagcacgatctccgctcactacaacctcccttcccgggttgagacggtttttctgcctcaggcttccgagtagctgagattacagcccggctaatttttgtatttttagtagagacggggtttcaccactttggccaagctgatctcgaactcctgacctcaggtgatccgcccgccccggcctccgcaagtgctgggattacaggcgtgagccaccacgcccggccagaaacgggttcttagcctgtgttgctgaggacctctttggcgggcagctggagcctgtgcacccttcttcaaacaatggcttttaatacactgactagaacgtttgggattacaaaagaaaccagttcttttcacatcgttattcttgtgatgtagcattctacttgaaattggaagccgttcaatatcagagagaaaccatatctatgaaactagagaggttgctcagatgactgcaaaccagccatccttagttgttttaccactagtagtgttataaagatggttgtccaatttcgtgaatcttgtagggtttttgcaaatacagcaatgtacaaaaatatgctgcctcagcagagcacactggacactcaggcatcatgctggagtttgtcatctcttccacagccttctctagaccttagcacttacctcatgttagcacttcatattgtgcaaagacagaaacaaagtcacccaaatttggcaaaaaatatttgggggaaattttattggaggtgcttaactgattaattttaatctgtagaatacaaccccaaactctgacaatactccacagattccaaaactatcaggcgagttttttcctgcccattactttcatataaactgaatcataaagtgtgtagtgggttttgagggagtgtaaccacctgatgggttcaccttgtctgctgcctagacacagccaatttatcaagacaggggaattgcaataaagaaagttatttatgcagagccaactgtgtgggagaccagagatttattattactcagtcttcccaagcattctgggacaggagttttcaaggataatttggtgggtgggggccagtgagttgggagttctgattggtcaggtgggagatgaactcatagggagctaaagcatcctcttgagctgggtcagttcctgggtgggagccacaagaccagatgagctggagtaaggtggtattgcattgtggttttgatttgcattaccctgattgatagttagtgatgttgagcatgttttttcacatgtttgttggccacttgtacatatcttcttttgagaattgtctattcatgttcttagcccactttttgatggaattatttgtgttcttcttgcagatttgtttgagttgcttgtagatttctaaaattcaaatgcaaccaaaaaagaggccacatagccaaagcaagattaagcaaaaacaacaaatctggaggcatcacattatctgacttcaaactatattataaggtcatagtcaccaaaacagcatggtactggta

SEQ ID NO: 1880129 - DNA, 4001 bp, Homo sapiens
ggcagctcacttttctcctatgcctattctaaaatcaaattattcttttattcatattgtctgttttaactagattttatgtgcataagtgtattgtaaagtgggaaggaagaccactagaggcaagtacttccttctccatttgatgatgaggaatctgaaggtaagaggcagcaagtaacttttctaaggtcacacagcctatcagatatagagctgggttttgcattcaggtcaattgaacattgaaccctgaggacaggcagctggtaagtatcacagctgagattaaaacgcaagccatctaattcccatcctcatctttcttctgcttgcttcctgcctaaaaaacaggataacaaaggagggttgtttctgtttgtaatttcaaagttagtactcaatatatcacaagggtctcttaaatcatacagtgttcattacctgcatattccttgtgagagttaagctttggtcttcctcattttaccagatgggaaaccaaggccaggaagtttcagcattctcaccagctcttcagaaagctcatgtatcttggaagcagaatgcaggatggtgctggaggggctgagagtaggtaggaaattaagggactctgttaggagcagtggagtaaagacctttaacttgaaaccatttaaaaaatactttcataccatatatttgtgagcccaggtaatttctgaatttctgatccaaatcttttcctccaaaatgcctgctaagaaactctagaggtcgggggtgaagcggggagggagaaggaagaaaaaaaaaaagaaagtacaatgattccattcagaaacttggtccaaatccttgtctctttcttctatcagaaatcctctgttgtcagtccctggcatcacctagagatttccttaccagcagcattcttatgtttttactaaaacttctcctagaagagcatgttttgcttttaggagccagacttaagaaagtgcatcagcttaaaaatacatttgcttgtaatttttgtccatgctgccatctgacaggatttgaggatgcttccatttctgccaggataatagctttgttatctgctgagatctgcaatagctcgacagcacaggaaatctgtgtctcagccccctgctccaagtttagctcatccattacctaaaattgggtttacacaaggaaaattactttagtgctaatccagttgacttgtaaagtaaatttagcttcctcgggttcctagtcccataatctaaactgatttcaacaacagctttaggagtcctcccacacttcttaagaaccctcaggagcatgggtccccagcaagctgaccacagctactagtcatcttcaagccagtgatgtttgctgccttggtacattgtccgtggctccacaattacacactggagggtagggctgggagtagtgggagaagatagccttgggctattcatttcacatttctgtgtctccgtctgtaaaatcctggtaacaaatgaggtgccacatagagggaaaaagtggaattaaatgttttgaacccaactcacagaaaatctgtggagtaaaaagctgattacaagtaacaaaatcttcctttttttctcccttgttcctaagtgttagacctgggttcacttgccacaacttataaaccaatcaaatgtgatgatgtttaagacttgcttacagtggtttccccaaagctaatcaatgaaaagtccttacattccacaaactagtcagctttgcagcaacagcctcaccttcttggggaggcacatgatgtgagtcacacaattttcatgccagcccagagcgttgggtgccattacaaagccatgggtgtcttacatgaatgggagcctcgcggggggttgaagaggctgatctgatctgtggttcctcaattcagaggacatgagcttttgaaaataggcctttctaggtgaattggcctgcatgtcatagtttacacatactgagagctgatcatatatcaataattgttctaagttccattgtgggtgagtgctattgtgatgtgctattgtgtgtgtactattgggtaagtgctattgtgatgtttatcagatcctcatcataaccacatgaagcagtaaaggtattatctccaactggggcacagaaaaaaaaagttaacttgtccaagtcacatagctagtaagtggcaggcctagaattccaacccaggcattctatcatgattactagtggccacgaatcagatgattgtagtaacttgtcctggacttgggagatctgtatgctgactcatagagccctaacagtgtcttaattgatacgcccagtggtttcttctcagtcaccagtgaactttgtagaataggatgcagctggttaccctttcatagcatctttcacccttttttcccacctctttgagactctttttagtgtgctttgttgacttctcttcctctttcaacctcatatttgtggattcccccacaagtttctgtccctgcccttcctccttccctcaccatctaatctcacctgcatacccagtgtgctcatcaattcttataggttcaactggcagttctataaggatgactgaaatttatcagccaaccctgactcttttcccgaatgcaagacctgcatttccagcctcccattggacatttccctatggacagcctgccagcattccctatttcacctctccacattgccgcactaatttgcacagtagccagtacataataagcatgtgataaattggtaatagatgaaagaatgcataatttaatgaaacagttgccaccttccatagatttaatcttccagactgctcttacctaagctactttcttccgtttttctgaatcccctcacttaaccctgctctcaggtgcccctcaacctgcatcttttgtttctctttgttctggtgcctgttttcttctcttctacactcttttatagttatttctgtaaatgtcttttctattcaagaatgtgcatacattaagggaagagattgtattttcttcattggttttcactaaatagcctaacaccgtgcatttcacaaagaggcacaccatatctatggaaagagtgaatcagtgaaagtagacatagcactctgcagtttacaaagggcttcacaggtaccatccctatattctgcagtaggccgaagagatagccgttgagtcattagccccattgtacagatgaggaagctgcaagttagtgtggtcgttaatggtccagaatctcactgctcttaagtttccaagccattcttatgattttaaactggaaggcagatcatcccctcatcatgactttctcccccatgtactcgggaaaaatgagggagagagacaagagaactttggggtgaaaactcacattgggaacaattacaagtgtgtctgatttggtagcttggatgttacaaccactcatcaattttcatgtggcttcaaagaccctcatttgaagctcctaagagcagctcacttcagaagagacccaggtaccaatttattctggagagttccagtgtttcgtcctaaaaaaaaaaaaaagaaagaaagaaaaaagaaagcataaagtttaaacagatccaaggatttttcttttggaatctgacagatctgggttggaggcccaactttaacatttaacaatcgcctccctgcccccatttataaaatgaagataaaaacactcttactcgtggtgatatatgtggattaaaaggataaattttaaagtgcttggcatgactcctggcatgggaactcagtccattttctccctctgcccctgaattgtgcctctgcctttaactccttctatatgtgggaccatgaccggtgaacttggggccaagatgagcctcacctaccaggggtagagagtagaaagcccaagctgatgactgaagctggaagtgtcagcttcttgcacaattgctgccctct

SEQ ID NO: 1880130 - DNA, 4001 bp, Homo sapiens
gattacaagtaacaaaatcttcctttttttctcccttgttcctaagtgttagacctgggttcacttgccacaacttataaaccaatcaaatgtgatgatgtttaagacttgcttacagtggtttccccaaagctaatcaatgaaaagtccttacattccacaaactagtcagctttgcagcaacagcctcaccttcttggggaggcacatgatgtgagtcacacaattttcatgccagcccagagcgttgggtgccattacaaagccatgggtgtcttacatgaatgggagcctcgcggggggttgaagaggctgatctgatctgtggttcctcaattcagaggacatgagcttttgaaaataggcctttctaggtgaattggcctgcatgtcatagtttacacatactgagagctgatcatatatcaataattgttctaagttccattgtgggtgagtgctattgtgatgtgctattgtgtgtgtactattgggtaagtgctattgtgatgtttatcagatcctcatcataaccacatgaagcagtaaaggtattatctccaactggggcacagaaaaaaaaagttaacttgtccaagtcacatagctagtaagtggcaggcctagaattccaacccaggcattctatcatgattactagtggccacgaatcagatgattgtagtaacttgtcctggacttgggagatctgtatgctgactcatagagccctaacagtgtcttaattgatacgcccagtggtttcttctcagtcaccagtgaactttgtagaataggatgcagctggttaccctttcatagcatctttcacccttttttcccacctctttgagactctttttagtgtgctttgttgacttctcttcctctttcaacctcatatttgtggattcccccacaagtttctgtccctgcccttcctccttccctcaccatctaatctcacctgcatacccagtgtgctcatcaattcttataggttcaactggcagttctataaggatgactgaaatttatcagccaaccctgactcttttcccgaatgcaagacctgcatttccagcctcccattggacatttccctatggacagcctgccagcattccctatttcacctctccacattgccgcactaatttgcacagtagccagtacataataagcatgtgataaattggtaatagatgaaagaatgcataatttaatgaaacagttgccaccttccatagatttaatcttccagactgctcttacctaagctactttcttccgtttttctgaatcccctcacttaaccctgctctcaggtgcccctcaacctgcatcttttgtttctctttgttctggtgcctgttttcttctcttctacactcttttatagttatttctgtaaatgtcttttctattcaagaatgtgcatacattaagggaagagattgtattttcttcattggttttcactaaatagcctaacaccgtgcatttcacaaagaggcacaccatatctatggaaagagtgaatcagtgaaagtagacatagcactctgcagtttacaaagggcttcacaggtaccatccctatattctgcagtaggccgaagagatagccgttgagtcattagccccattgtacagatgaggaagctgcaagttagtgtggtcgttaatggtccagaatctcactgctcttaagtttccaagccattcttatgattttaaactggaaggcagatcatcccctcatcatgactttctcccccatgtactcgggaaaaatgagggagagagacaagagaactttggggtgaaaactcacattgggaacaattacaagtgtgtctgatttggtagcttggatgttacaaccactcatcaattttcatgtggcttcaaagaccctcatttgaagctcctaagagcagctcacttcagaagagacccaggtaccaatttattctggagagttccagtgtttcgtcctaaaaaaaaaaaaaagaaagaaagaaaaaagaaagcataaagtttaaacagatccaaggatttttcttttggaatctgacagatctgggttggaggcccaactttaacatttaacaatcgcctccctgcccccatttataaaatgaagataaaaacactcttactcgtggtgatatatgtggattaaaaggataaattttaaagtgcttggcatgactcctggcatgggaactcagtccattttctccctctgcccctgaattgtgcctctgcctttaactccttctatatgtgggaccatgaccggtgaacttggggccaagatgagcctcacctaccaggggtagagagtagaaagcccaagctgatgactgaagctggaagtgtcagcttcttgcacaattgctgccctcttagagctgcttgaggccatctcaacgtgcaacatgactgacatgcagttaggtcattgaaatcacaccatcggaattcttcagcttaatatgtcgcttcttagaaagttaatgcccttttgatactatcagtatgaaatgttgagaagcaaaagctcaaaggcttaattttagaagagagagagcagtttctaaaggagtgactgatgggagagagactcagtagttgactatgcaaaggtgcccagggcaggtgtgaacaacaaagctggcttcctgatacaggtagtactgaaagaaccccggctccacagccctgcagcacctttaaagaaagggtgagggagacatgcttaagcatttttttttctgctccacaacagggcccagggtattgacagtgctgacagaacaactgagaagttgtttaggttggcattaacaaacccggcacattgccttttctgattgacacaattcaaacgggtatcaactgcctttcagtaccactgagaagtggtgaacgatgagggaatcatagggccatccaagtgcattcctagcagggaccatgaatcagccttatcttgtcccacctcctctttacacagggaggtaagccaaggctcaggacatcatcagatatgtgataaatcctccattaactggaatagtcagttaacaagacttgtttgccttttatattgttatagtccaattttggttaagtagaggtaaaataggtaaaaataagatggttgtttgtttgcttgtttttgagacgaggtctcactctgtcaccaggctggattgcagtggtgcgatcatggctcactgcagcgtctacctcttggactcaagcaatccccctacctcagcctcccgagtagctgggactacaggcacgtgcccagttaggttgggattttttcattgaagtgattttaagtaatatgtacagtttcacatctggtaccttgctccaccatttactaactaggtgaccctggacacatttctttatttttatttttataacttgctctgttgcccaggatggagtgcagtggtgcaatcatagctcactgcagccttgaactcctgagctcaagggatcctcttgcctcagcctcccgaagagctggggctacaggcacatgccaccatgcctggctaatttttaatttttatttatttatttatttattttgtagagacaggtcttgtcttattgcccaggctggtcttgaactgctggctttaagcaattctcccaccctagcctcccaaagtgcatttcttaaattcttatatatgcctcagtttactcatctgtataagagggtaaatagaacttacctcttatggttgtaacgataaataaataagataaagtatatatatgtgtatatatatatatcacttaaaaagaataagcactcaatatatatttattttattaatactgctattatcatctgcttttgctctatctctattcctgcctgatgcacctgaaggttgagcggcattgtaaacagagggtggcagcatgagcttaggcattgtgtggaactggatgtgaac

SEQ ID NO: 1880131 - DNA, 4001 bp, Homo sapiens
tccgagctacttgggaggctgaggtgggaggatcgcttgagcccaggagtttgcagctgtagtgagctgtgattgtgccatcatactctagcctgggcaatagagtgagacccagtctcaaaataaattaattaaatcaatcgatctatctataatcaatcagaggaccatataaatacttagtgttttgtgggggtttttgtaggtagtatggtagaaaacatctttggtccagttccttccaccctacataggtaggatacaaataatcctaactggacatagtcacactaatggaatttgccttccctaagtatctaccaactaaaagcaaagaaaatggactcagataagtgctttgtgtggcaaaagggcaggtattagaacttctagtggataattaaaattgattataaatttatttcctctcctacaaacttacctatatttacaccttctttctcattcttcattctcaagttttaattaaatgagaatctcttgcaagtgggccaggcatttattttttcaaagttcctcaagggatttcaatgtgtagctaaaattgagaaacattcttgatccttcccaagaccttccaccatcacatgtatccccactaccctgtatcttcaagttctccctctctattggctgtttctccttaggagaagatatttggcctattttcccaaatatcttaaccctgtgttctcttttagttgttactgtttcatattttccatctcctttaatttggtttaatctattttccacatctagccctcttcctgaaatcactcttgctaaggttattaattatctaattatcagaaagcacgaaacttttcaggtcttttcttctgcttgtataatatgttacacttttggtcttttatagaatttcaataaaagtctttgcttagaatctgtgatatcccactccctctggtactccttctgtccttctctttattctttcatagttgcttttacctaggttgaagtgttagcaaggcccaggatttggtgtttagcctttttttgctttcaacctataccttcttggacagtttcatctgtaccagttttgttttgtttttcatcctacttgtgttgacccagatctatattcctagccttaacctttctgcaagtacttcagattcaacatatcaaaaagtgaacccacaattcctccctgaactcatgatttctccctggcaatgccatctttttcctctcctctgatatcatttccttgaacaacgtatttaacttttcttatagtgtgagtctgatggtaataatttaccttagtttttctttacctgaaaatgtccttatttcatcatcattctcgaaggacatttttgttggatatgaaattcttttttttttttttttttttttttttttttttttttttttttttagcccagaggtcctttattttttttttttaacacctattatgccatgaattcatagggaataggttccagcagctcaggctccttcccattggttctcacaaagtgtgcttctctgggtggagcaggctggcgctttagttgaacccaggtacctttctctttggcttctttctttttctgatcattttccttcacacgtttcaggaagctatctcggctcttagaatgcttaatgtgctcaatacgcacattaattctcttggcaagaatcttgcccttaacttgtttgtttacaacaatgccaacagcatgctgggtaacattgtagactcttccagttttgccatggtaacacttgtggggcattcctttttgaacagtacccgttcccttgatgtctacaatatcacctttcttatagattcgcatatatgtggccaaaggaacaactccatgttttctaaaaggcctagagaacatatatcgggtgcctctcctctttccctttgtgtttgtcattttggcgaattactggaagatggcggttccggccgaaaagaagctggatatgaaattctgggtcaacagcttttttttcctttcattgctaaagttgttccactatcatctctgctttcattgagaactctgtggttgttaaaatcatttccctgtatataatatgctgtttttcctgactattttcaggattttttgtctttggtttctagcagtttgactgtggtatgtctagtcatggttcccttcacagttttcctgtttgaggcttgttttagctttttgtatttgtaaattcctttttactgaataggaatttttctatcatttcttgaaatactttttctgggccaggtgtggtggctcaggcctgtaatccaagcactttgagaggctgaggcaggcagatcacctgaagtcaggagttcaagaccagctaggccaacatgatgaaatcccatctttactaaaaatacaaaaattagccaggcgttgtggtgggcacctgtaatcccagctactcaggaggttgaggcaggagaatcgcttgaacctgggaggcggaggttgcagttagctgagatcgcaccactgcactccacactccagcctgggcaacagagcgagactctgcctcaaaaaaaaaaaaaaaagaaatattttttctgcctaatttattcatattctctctcctccctgcttcttctgttaccttaattacccatatatatatattttttttcaattactcatgtatttgacttttctaaattatcccatgcatccttgaggttttgttttttttcagttatcctaaacttaagataaaatgaacaagccataaaattcatccatttaaagtacacggtttagtggtttttagtttattcactaagtcgtgcagctatcaccacaatctaaatttagaatcttttcatcagtccaaaaagaaacttgaacgcattagcagtactttcacccattccttccaaccttatacaaccactatagtaatttcggtctctatagatttgcccattatacacatgcatacaaatggaatgatacaatatgtggtcttctgtgactggcttctttaatttagcctaatgttcagttctatttttctctctcttcttcaaattgaatgatttctattaatttgtcctaaagttcactttctctattttctccagcctgttcttaggcctatccagtgatttttttttttaatttcagatactggttttcagttctaaaattttcttatgttttttttaagacagggtctggcactgttgcccagattagagggcagtagcatgatcataggcacatgccaccatgcctggctaatttctttttgtattttttgtagagatggggtttcacccatggttggtcttgaacttctgggcccaagggatctgtcaaccccagcctcccaaaatgctgggattacaggcatgagccacagtggctgaccttcatttgtttgtttgtttgtttgtttcctgctgagatttatcatctttttattgattacaagtgtatatatttttttcttcctttttttgttttttgttgttgttgttgtttgagacagggtctcactctgtcacccagtttggagtgcagtggcgaaatctgctcactgcaacctctgcctcccgggctcaagtgatcctcccacctcagcctcccaagtagctgaggctataggtgcatgccaccacacccagctaatttttgtattttttgtagagatggggtttcgccatgttgcccaggctaagtgtacgtttctttaactcatttaacatggttatgtatcctttacaaccttatctgataaatcaatatctggattatcttgggattggcttccattgatttattttcccttgagaattattcgttttcctggctctttgtaagtcaagtaatttaagattatattcaggacattgcgagtggtatgttggattctagattctgttatattgcttagaaaagagttggtgttccttttttaacaggcaattc

SEQ ID NO: 1880132 - DNA, 4001 bp, Homo sapiens
gaggcaaccatgttcaattctttcaactatgtcttctgctaatttacctccatatttccaaacaagacaatacgctgctatttcttgatttttcaatattagacattatctatttgatttcctactatagaatacaaggactattcttattataccgtgcttacttacttcccacttttcctaccatgtgctccaacatagctttatcacaatttatgattactccttgttgctgagacaaatagtgttgtctgcttatatttcccttcttgaacaatctttttttcctctagatataataaatgcctcattttcatatattttttagttgtctatgtgtttattagcttttccaaagatttaaaaaaagttctaaagcagcttaatactattttccatagtagtcaaatgcaccatgtagcttttcagtttttcttccttcttttttttttttccattagcaagatgtccctccttttttgacactgttttcggtcatttgatctctggacctcttgcacagctgttgtcctaggacttctctatcttttatatgaaatcctgtttcctgaatcttatgtcttcctatttcttggtttcttccttgtgtggctgcagcatgtttgccagggcatcctgagaaagggtttgcaggtgatatagtggaggccataatgcctcacctcatactcactcaactcacctgaattcacctgcagctgctggctgggtcaatttctcctgagaattaaactatgacagggaaaaattagtcacctgcaaatagtcaccctgggtaggagagaggccctaagagtctaacttctccttatacagagtttacaattatcctctcatttttagaatcattctttaaccatatattttgttgtacatgattcctccaaattcctggactttttctaagatcttccaggaaaattagcttgcttttcattagcattcctttctttagggaaataaactcaattccctattacccaattttctataacaacatgaccaagatttgtggttatcccaatgttacttcttagatattagacaaaaataatgttaaatggttaaataaaagagacatctttatatctctgtttatcttaattaggcttgtcagaagtcttttttattggtcttttcacagaattagtttttgattgtttgatcacatcttccttctgtttgcaatcttgtacattgtaatctcttctattttgtaacattcttagtcttgaataatacaaaaaaaagtatatattttccctaccacactagtctctctgtttactgtactcctgtgcccactggaatgaaatgttccttaatttttctatttttgctgaaaaccacaatttcaacagataatttaaattatacaaattgttatctcaacaagattacttaagacttgtcaaacacattgtagcatacatttctgtaactgttgttagccaaataattaaactcttcaatctgcgatttctacatatccaacgagaacctatgtctttttttttttgaaggcaattttataactttatttgatgtatttgacgatcagcgattagttctcatccacattgactgtagattttcaaaagtggcaacaggtacataggtaaccaaagtatagagcttatttggtgaatcttcatcctcattacgttttcgggacagccgcacacggattcggtatgggacattcttattcctttggcccagacagctttgttgagcctgatatcaatgcgcgcatctggagttcccatctccttcatgccaaatttccgaagctctttgagtgcccgaggggcacacttcttgaagcccactccatggatgtgcttgtgaatgttgatggtgtattctcgggtcaccacctcgttgatggcagaacggcccttttattcttgccacccttctttgcgggagccattctgccgggtccaagttggaaaggaagagcgcgagggattgagggagaaggaaagccgagaatctatgtcatttaatagatcatgctttgggtgtcaagtctaagaattctttggctagtcctacgtcccaaagaatatgttctccagttttgttttgtttttttaagttttatagttttactttccacatttaaacccaggatcacccaggcacagtggctcacacctgtaatcccagcactttgggaggccaaggcaggaggattgcttaaatccaggagtttgagaccagcctgggcagcatagtgaggcttggcctctaaaaaaaaaaaagttacctgtgaagtctcagctacttggaaggctgaggtcggagggtcggagggttgcttgagtacaggaggtcaaggctacagtgagctatgattgcaccactgcactccagcgtgggcaacagagtgagaccttatctcaaaaatgtacatgaattagtaagtacataaacccaggatccactttgagtttattttttatgagctatggtacttaagttaaagtttatttttttttcctatggatgaccaattgctccaacaatcatttgttgaaaaggccatctttcctcattgaattggttttgcacctttgtcaataatcagttgggtgtatttgggtgggcctatttcctgttctctattctgtcccattattctgtgtctatcactctgccaataccacacaatcttgattattgtagctacattgtaagttttaaaattggttagactgattcctcccaatattcttcttttttcaagatttttaagctattctagttcctttgtctttccatatacatttaaaaataatattgcctgcatctataaaaaatcacgctaggattttgacaagaattgtgttaaaggtgtacattagtttgggaagaattgacttctttactatattaagttttccaatccataaacacgatatgcctctccatttatttagatttttacaaactttccttcatcagtgttgtgtagtttttgtcatacaaaacctatacatgttttgttagatttatacctatttcttttttcttcttagtattgtaattgtaaatgatactattttaaatttcagagtccacatgttcattgccaatatgtagaaatacaattgattttttatcttgtatgtttatcttgtatgttgcaaccttgctgaagactcacttattagttctaggagtttttaatgtattcttgggattttctaggtagacaatcacatcatatataagcaggggcattttatttctttctttcctacccatatgccttttattttcttctcttatcttagtgaactggctagaacttccagcattatgttgaataagagtggtactagcagacatctttactttgttttgattttagggggaaagcatgcagtctttcattgttgagtatgttgttagccaaaagtctgtgtagatgctctttatcaagttgaggaagtttccctctatgccctctcctttttgcttgtttctttttttaatttttttttagactttccatcaggaataggtgttaattttgttgatttttttgcattgattgacaggattttttatggtttgacatgatttttgatgtgatttttcttctttagcatgttaacatgatggattacattgattgattttgaaatattgaaccagtcttgcattccaggaataaaccccacttggtcatggtgtataattctttttatatgttactaaattctatttgctaatatttggtttagtatttttgcacctatagtcatgaaaaatattagtctgtagttttcttgtgtgtgtgtgtgtgtgtgtgtgtgtgtctgtgtgtgtgtattaaacctgtatgtgtctttagcccaagatatgatatgtccatcttggtatatgtgtcatgggcacttagaaagaatgtgtagtctttgtctggctttggtatcaggataaactaactttgtaaaatgaattgg

SEQ ID NO: 1880133 - DNA, 4001 bp, Homo sapiens
tcaaaaaaaaaaaaaagaaaaaaagagaagaaaagaaaagagagaaaggaaggaaggaaggaaagaaggaaaaaaagagccacattaaacaaacctgactgagaacacacaggtctccagatactacatttgtggaacatcagtttaagaaattttatacaataataaaaaggcaaataatttaaaaataggtaaagtcgaggcatagtaatcccaggactttgggaagctgaggtaggagaattgcttgaagccagcagtttgagagcagcctaggcaacatattgagatcccgtctctacaaaaaattcaaaaattagttgggcataggggcacacacctgtagttctagctactcggaaggctgaggtgggaggattgcttgagtccagaagttacaagttacagtgagctatgatcacaccgctgcactctctcctggatggcagagcgagaccctgtctcttaaaaaaaaaaaaaaaaaaaaaggaaagaaagaaaaataggtaaaaaggggcacatgttctcaagatctcctgagggctgcgtcatgagaaaaaaattaaatataaaataagtaaaagatttaaatagctgggcgcggtggcttacgcctgtaatcccagcactttgggaggccgaggcaggcagatcacgaggtcaggagttcaagaccagcctggccaaaatggtgaaaccctatctctactaataatacaaaaattagcgggtgtggtggtgtgtgtctatagtcccagctacttgggaggctgaggcaggagaatcacttgaacccgggaggcagaggttgtggtgagccgagatcgcgccatcccactccagcctgggcaacaagaatgaaactccatctcaaaaaaaaataaaaaacaaaaaaacaaaaaaactgattgaggagagcaaagatcacctggtgaccatcaagctgaccatccagaggcaacatttcttatctgaggaatttagaagtaattagatgtccctattattctaaagcaagcatctggtaccaggcttttaaaaaattttttaagtaactaggatttctgtacatctcctgaataaatgcatgttgaaactcgttgtgcagcccttgctgacattaaggcaccaaaatatctacaaatgtaatcacgtatcatgacctatgtggctaatatggtccacattactcctaagctcctgctttaaggtccataaatacccctaaggaaaagtctgccgtggcgcacttacttttctcatgctgaggcacctcactgcactcttctgcagctttctttcttttttttttttgactgtaagtttattcatcgcataataatcctctccaattttactgaggtggctgaccacgtccacaaccaaatccatctctgaactggaatttggttgctgacccggccccagcctcggctttcttgttggcaccagggggcacagcactccgtttgtaggtatctctgttggcttcccctcttgtgagtcttgcaggtcgctcaccctccagactttaggccaaggcctgccagtctctggacagctgcggtgtaaggtggcaggcacaatctccgagggcagatgaaggtaatcacagagatactggataccctcattggtaaggtaccagtagaaatgtctccaggcaaacttccttcacgtagcctcgggacttgagagactgcatggccttcatgacacgaaggttgggcgcattcttgtctgccagctccgggtgcttaggcatgtggacatccttcttggccaccatgactccctccttaaaaaggagttcataaatggcaatccagttcttcttaggcatcaacatctcggtggctgtagggtccgggtggggggctggaaaggcacgttctttctttctaataaaactttcctttttcaaacctatactgttgtcagtaaattcttcctaccaacccatgagtcaaccccccctttttttttttttttttttttgagactgagtttcactcttgtggcccaggctggagtgcaatggcacgatctcggcccactgcaacctccacctcccgggttcaagcgattctcctgtctccgcctcccgagtagctgggattacagccacgcaccaccacacctgggtaatttttgtatgtttagtagagacgggttttcaccatgttggccaggctggtctggaactttggaaatcctgacctcaggtgatccacctgccttggcctcccaaagtgctgggattacaggtgtgagccattgcgagcggcgagtcaaccactattcgacgcggggctctgacaccttacccagcaccgatgactttataaataaaatgtcctatgtccgtgcatattatttggcaataaaaaaggaatgaagtatttatacacgttagtgaaagaaataaaaatatttcaccttaaaatatccttctttgacatattttgagacagctgttcaaagggccttgcaaacagaagtagccctgcaaagctgtctttggtgggagagatttgcatcagtggataaaatcttcacttatgtggggcttctctttagatttaggaacaattaactgaggctctgacacctttaaaggtcgaaaagaagtatttaccatcaattctttctgagggctgctacctgtgagatttcatctacctaacaagaccacttatgctagccaggcctcatcttttccccctcccataaggtgtcttgccactaaaacctgcttaccactataatctgtttttggccatgctctgagtccccattcattttgtaacctcaagatggtatgggccgagaatggtggctcatgcctgtaatcccagcactttgggaggcggaggcgggcggatcacttgaggtcagcagtttgagaccagcctggccaacagggtgaaaccccatatctctaccaaaaactacaaaaagtagccaggcatggtggcatacacctgtagtcctagctactcaggaggctgaggcaggaggattgcttgaatctaggaggtggaggttgcagtgagccgagattgcatcactgcactccagcctgggtgacagagtgagaccctgtctcaaaaaaacaacaaaaaaagatggtatgtaagctcctataccccactgggaggttagggtaactctgcagtactcccccgcgtgcatgttgataaatttatatgccttgtctccaattaatctgcctttcatcagttgttttttcagtgatccttcagagggcaaagaggaagctttcccttaagttatataaaataaactagacacaaaagaccacatattgtatggttacatttatgtgaaatgttcaggccaggcgcggtggctcacacctatagtcccagcagtttgggaggcctagatgggctgatcacttgagttcaggagtttgagaccagcctgggcagcaaggcgaaaccccatctctacaaaaaatacataaaaattagccagacttggtggcctgcacctgtagtagtcacagctactgggcaagggggtagagggtactgaggcaggaggattgctagaggccaggaagtggaggctgcagtgagccgtgattgcgccactgtgctccagcctgggtgacagagccaggccctgtctcaaaaaaaaaaaaaaaaaaaaaaaaatcggaacagggaacaggcaaatttatagaaacataaagtggataagtacttgtgtaaccacccaatggcttctccttgcctgatacgcagacagagcagatttatcaagacaggggaattgcaatgaagagtttaatttacaaaaacttggtgaaagagagatagaagctttattattactcaaaccagtctcctggaaaatttggagactggaatttttaaggataatttggtgtgtagggggccaggaagtggggaatgctgattggctgggtcagcgatgaaatcatagggggtcaaagtgggatttttcttcct

SEQ ID NO: 1880134 - DNA, 4001 bp, Homo sapiens
acttcattagattggtttgtatttcctagaaattcgtatgtaaatatgtaaataggatcataaagtatgtattcttttgtgtacagcttctatcactcaacaaaatgattctgaaatgtattcatgttgttttatataacaatagttggtttccttttattacagatactccactttaaggacagtccacattttgtttttccattaaccaactgatggatatctcagttgtttccagttttttaactcttacaaataaagctgctatgaacacgcatgtgtaagtctttgtgtggacacgttttcatttctctttggtaaatatctaggagtagaatggctatatcatatgtttaactttataataaatggccaaacagtgttccaaagtggttctaccatttcccattccaatgaacggtgtataagagtcccagttgttccacagcttaattaacacttagtattggcagtttttaaaaattttagctattttaatgggtgtgtaggtatatctcatgattttaattcgcttttccctaacagccactgatgttaagtatcttttcatgtgcctatctgccactggtataattttacccatgtgttgtcttcctatgattaaaaaaaaaatttttttttaattagcctgatgcggtagcacgcacctgtagtcctagctacttaggaggctgatgtgggaggatcatgagtccaggaggctgaggctcccgtgactgtgccactgcactccagccagagcgacagagtgagatcccatctcaaaaaaaaaaaaaaaaaaaaaaaaaaaaagctgggaaaagtggctcacatcttaaattgcagaattttcggacactggggcaggaggattgcttgaggccagaagtagtagcctgagcaacatgtgagaccctgagtctatgggtgggggggaaccttaaaattaagagatctttatgtattctaagccctttatcagatatgtgtattacaaatatttcctcccattctgcggcttgcctttttgttttcttaatggtgccattcaaagagcaaaagtttttaatttttatcaaatccagtatatcagttttctttgaaacttgctttttgtattccccaaaatcttttctgactccaaggtcacaaaggattttctcttacaggtttcactttttttatttattttttacatgaaggcaatttattaacagaaaatattttgaggaatcttgttcacagacggcgaccacggtgacccccttcctgagagtgctgtcagaggggatgggggtgacgtcctcaatcctcccgatcttcatacccgagcaggcaagggctctgagggccgactgggccccaggtccaagggtcttggtcctatttcctcctgtggcccggagttggatgtgtagggcaatgatacccagctccttgcacctctgggccacatcctgggtggtcaacatagcagcatatggcgaggattcatctcggtctgccttcaccttcatcccaccagtcacacggcagatggtttgtttgccagaaagatccgtgacatggacaaaagtgtcattgaaggatgcaaagatatggcagacaccaaatacattctccccttcagccacctgaggtccgaggttgatgacctgttcttccttcttttccttcccctttccaggtgccatttctgcacgtcgtctccagactccacacgggaaagctcttataggttttatagttttagcttttatatttaggtctacgacccttttaagcgaggctcatttttttctctatatggaaacctagtcgttttagcatggtttgttgaaaagattttcctttctccattaaattgccttgtcaaaaacgaattgaccatgtatgtatgggtctatttctggactttatcctactctactgatttatatgtccagctcttctccaacaccacactgtcttgtagctttactgcaagccttaaaatcagctaatacaagaatctcaactttgttctttttaaaaattggtttgactattttggattgtttacattttcagagtttaaaaatcaacttctcaatttctataaatttctttgagagctacttttcttgctggaaaaacagagataatataaacttcccgagttgctgggaaagcaaaaaagagataatagtgtaccaaatatgatggcacattaataggcattcaattaatgttagctttctctttctctcggcccttaaataaacaggatccaatctagcaatgccctaacatttcactagtgggtcagtggccatagtaaaaatattactacaccaaatgacttttataagtaaatatttgtgtttttacttggattcaatactgaaatgcacttgccaaagaaagcaattcagcatatttactaataaactgttacaggccacattttaggaaagcataaaaccacagccagaacaaaaatttaagtatgttttcaagttccacatagcgcctaattacattattctgtaatactaacagaatctagaaggtcacaatgttccattattcacattgctgccgcaaatggaaaaagtatttttggtcacattgtttaaatatacataaaacaaacaaaatgtggctacccaattcaacaattaacgtgtactaatttaaaacccaaaccaatagacaaccaaaagcatttgaagtatttaagtataacctaattgatatcactccatgaaatagagaggtatcagtttgcaaacacaggctaccaacaggcaatttttggtgagccaccaatgctttgtggtaacccacatctatcagatgaactgatacttaaagaaaaacaataatttgctttctttttccatgactattcaatggcctcttttagtatttttttaaacattaaaatggcttcaaacaatttaactagacttgattattgaatgaatacacaaaatctgctggttaactttaattctaaggcaagtcagcttctaagtcttttactgtcctactttttttctttctttttttttttggagacagagccttcttgttctgtcgcccaggttggagtgcaatggcctgatcttggctcactgcaacctcaccttcccaggttcaagtgattctcctgcctcagcctcctgagtagctgggattacaggcatgcgccaccacactcagccaatttttatatttttagtagagatggggtttcaccatattggccaggctggtctcaaactcctgacctcaggtgacccaccctcctcagcctcccaaagcgctgggattacaggtgtgagccaccgtgcccagccctggccatactttcgtaacaaggaagaagcaaggccgaatcctttcttttcataaagatgaatgcatgataaaccaataactttcatctgttaactgagctgcatataattagagacctatctcaagacatactagaaattaagaaactacaaaatgttattcccctctctgcctctcctatttgtcaaaagcaacaccatgctcatttatgtaggcttggcaccacctgactcctcccactcctgagcctgcatttcaagttctgtaaatataaactctgtactagcatcattatatctctcttttccactcctgctgctcccctcttagttcatgcttcctctcatttgatcagctcatctttggcaagattttgcaataatatactaagctagctccctgcccccacatcctagcactccagagagttattcattctcatcacatcagtgatctttctgaaatcagaaattcaaccacgtcacttttcagcttaccattcaatgaatttcttcgaatgctaaacatagaattgccacacaaccaagcaattccactcctaggtatatatccaagagagatgaaaacatgtccacataaaaactggggggctgagcaccatggcatgcacctgtaatccaagctactcaggaggc

SEQ ID NO: 1880135 - DNA, 4001 bp, Homo sapiens
ctagaggttacagaatccttagtggttttgtattcttccattaggagacacacacaaataacatgtggttgtgcttcttttagtgatgctggcagacactggtgctcatagcctaaaactgtcagctcaatacaagatgcaaaaacaatgatctaattttacaattctttataaagtagtatacttccataaataggaacttcccctatttggcaattcaacagtacagttcatatagaaaaaatatgatacatgcttgttcctaaggtgaggtaggtatcattgtgaattcacagatttaaatccaatttgatgtgattcaaccctcgtcgttattattattaattgatgcataaaactgtcccatgtttggcctatggaaccctcttcaatttggcttctaaatccttttgctacaaccctaagtagttctttacttctttgttatctagtttgaaaaaatattccaagctcttcttttaagtatgctgtctggataaactatttcaagatcacaatccaggcagtagagccactcattgctatggggttgttcactgtttttatgtcttttcagtggacagaaccgcctagaagtatgtatttttcactccaaagctaaaacacctcataacttattactgatattcccaattcaaactgagtacccttgtggattttacggaacatctattttacgtttttatttcctcctacaagaatcctgattctcaagcatacaaagtatagaatatcatatttaattgctttattccatattatgcacaagtttcagaatagcaatgtcagtatttcaccagtgaccaaaatgttttgttttttttggacatgttctccccatcttcccactttaaaaaagttatactatgtccagattgtgagatcatataactatcacatgctaactctcttttaaccctcatttcttcttagctctacaattaaccatacatttagtatttaccaccattccttttgtaatctttctggttagtttgtcagaagcttgttcttcagtagttctcaggaaaagtcttgggaacgatattccgaagttttttgttttttttttttttgaggcattttatttgtaaatatgtattgcatccctagaaacaaaatccaaggattttccctcctgtgtgttttcgtcttgcttcttcatggtccatgataccagctaaggctgtcaatatgacgaagtcaaatggttgggatagaagcagattgttctgccgtttttctagatctttgagttgcaaatcaaagctggggctctacacttgtttagcctgcctgtgaggttcacaattttcccagctctgttatcatcaatgatttcaaatttgccaatgtaacgatgcttcatcatcacagctagaagttggacaatgactttggagcatggcctagtaagaaccggcgtttccctctcttttcggcattggtgatactcttgagagcaacaggtaggatgttcacacacaccattgtggcagcgcgaaacaatgccggaaagagcaatattccaagtacttacacattgatgtttgtctgtgatctttataactgaacattagcttgacaaagcacaaaatctttggctcacattttctttattgtaattgttactccatttacttgttataaagctttgctgtcacagtctatctggttttctttctcttaacaactcagtctttatgcctgaatggccaaaggatatctttctttttttgttcaagtctagtattttgtaagagtatgtcttagtcatcctggctatcctttcaatttgtagattcaaatctaaatgtatttcagaaaaatgttcctgaattatacttttcagtattttttttttttttgagacggagtctcactctgtccccaggctggagtgcagtggcgcgatctcagctcactgcaagctccacctcccgggttcacgccattctcctgcctcacagcctcccgagtagctaggactacaggcgcccgccaccatgcctggctaattttttgtatttttagtagagacagggtttcaacatgttagtcaggatggtctcgatctcctgacctcgtgatctgcccccctcggcctcccaaactgctgggattacaggtgtgagccaccgtacccggccacttgtcagtatttaagctattcctttattttggttttctttctgggggcggggtgggaagatcctattatatatctatattagatcttttctgccaaacttttttttcccagttttaattttttacctatgtatttctccttcatttaaaaaattttccttcgctgtctaattcttgaaaaatattatttattctctttattcttcagtatttttctgaaattttttattattacttcttttcaagagttctagccccttattttgagttttcccagatgatttttttttttaaaccaacttcttaggatttttttttttttttttctgagaccaagtttcatactcttgttgcccaggccggagtgcaatggtgcgatcttggctcactgcaacctctgcctcccgggtttacgttctttaatgtcctggttatcttctccctaccgcttttatctgaacctttcctttcgtctctactaacttgtctctctgcagctcaatctggattatatttccaacagtttgtcctcagtgacgggctttgttctggaagggtatagtggccagctagcatgaacaacgatagaaccctgtgctggttaccgcttcttagtcacaaagtcatcccttctgcctgttgagcaaaaatgtgcctggacactttaaaacttttcctttgacagctggcatgttaacttctgccagcggagaacaatggagagatttttacttcctgttcctgtgtgtttttcagcaggctcccacagcacccagttcctcaaagccaggttctgacatataagtgagctcagagaccagcagcttccctcagcacctcatctgagtagttttgtagcagagtgacacctctcatgaaaagcctttcagcacgcttccccagagaagcacatcagcaattactctgccattcagtgagccacaactgagccctttctaaccaggtatgaatctcagccctggggtggtggtagggaaatgggggactcattcttggacacactgtcttagccctaagggtagtggctgctccttgtatgtatgcatatatgtctgtgtgtatgtttttttctttttttttgagacagggtctcactctgttacccagggtggaatgaagtggtgccatctgggctcactgcagctacgacctgccagactcaagcaatcctcccacctcagccccctgagtagctgggactaccaggtacccaccacgtccagctaatttttaaattttttgtagagacaaaagtttcaccacgttgcccaggctggtctcaaactcctggactcaagcaatcgccctgcctcgacctcccaaagtgctgcaatcacaggcgtgagccactgaactgtgactacgtgctatttctattttctttaaagatctttttactttgtactagtcaatccttcattactccaatcttgctatagttaaattccttatattaactttctctattcaaactactgtgtggtttgaactcttgactggtccagtcagatccttcataccttatcccagagcccctgtatttacttgttattccattacggaaaactactcccgattaactgctgctcttctcaaatatgccctacgagctttccagaaaaacggttggctctgttagcattctttatgctgtcaggtgctctgctgcttcccttcagttccccctgcacaaatgctagtattaaccaagcctcttatatagattttggtggtttgtccctatccctttacgggtatgtggggaaatatcattttgctttgacgtagatggcatctgtagattttgt

SEQ ID NO: 1880136 - DNA, 4001 bp, Homo sapiens
tcaggggtcgggctgctcccctccccacttcagagtaaacatcaacatgactgacattccacgtgccttccaatgacaaaaccttccctctgcctttcagagatgcccagtcaatgtcccactcccaggacgtcttcctagactgcagtctaccacataattgggttgagtttatcaatgctgtgtcccctccccagcttctggcagctctgctctgtgtggtccagccctatcccctccctacacgctcacctgcacctacctccaggcctcctcaccctcagaccctgcctcagtggactctgggtgctccagctgggccaggagtaggtggacacggtgctgcaggtccgggcaggcatgttgagctgcagataggccccagcacctcgagagggggcaactgtgggggctgatagaaatcactggcgtaatgatccatccaggtgcccagcatggaggagatggtgcagggggaggcaggtgagcagaacacatacaggaccagtctctccttccaccctgccctccaagggacatccctgggaaaacctctaacttggctcatgcctaaattcctgtgtgcagcctataggtctcctcttcccaccgacacttctcttaccccacccccatggtctccatctgtgatgtcagcgtgcgtgtgcgtgtgcgtgtgtgtgtatgtgtggatgctgagagctaacagttccacaggggatggtcaggcaggatggtgaatcaaggtccagttgggactgtcttcctggggaagacacaggtggaccctttcccgagcagctgtgcctactgtcaatgctcacacacacggggcccacgtgggatgcagacagggcaaacacgggagaccccctgcacagaacatgctcaaggcaccaatggttcctccaacatctgttcccacctgtcctgtcccctgcagccagaaagtggtattagcctcacttaaccatatggaattgcagggagtggctagttccctaaatggtaatgtaggcactataacaattagaagtgaacatggatgtgggccaggaaaaagctccggatcttcagaattacacaaagcacccacacccctgcctcttgtgtagaggaaataagttccagagaaaaaatcgtctggttcaagttcacacacagattcaatgaaaagctggtatcttggttaggattagttttgcctacacatagcagaaaacccagaataacagcaccacagagaagagagagaaagagttatttctttctccaataaaggagctctggaggtgggctccctgctgctcctggatggccccccaaggcagtcagccagcatgaatctttctgccccagcatcttcatagctggtttccatcctgaaggctgtctcagggcccacggtgactgcttttcagagggaaaggaggaggaaagaaggacaaaggggccgcacagctgtgtcagttccacctaagcaccctccccaaagaccctctcagtccttctgctcacagctcatcagcttgaactttgtctggtccctcttagctgcaggagaagttaggaataatagccttttagtttgtttggcaaattgttttcctaataaaactgagtctctgtttcgaagaaagagacaagaatgaaaaccgcgtgtacacgaacaaagctctctccctaccctaaactccaagctgaaggaggcaggagggattgacttcttttcggctgaattgggcattccttcacctaccacggcctctcttttcttggtgattattcattctcggagaggggacaaaagccgtgattccaaactaagacattggagtgggaaacccgctttcagttcctcagcagaatgatgagaacctctgtgtcgtctttcatctgtctgcgcattggcagaaggtctgagaaaaccctcttttatatcctaaatggaagagcggaggtggaggattgtggagaattttgggcaagcagcatgttcctaaaccgggtcacaattgaagctctgtaaatgaacgaagtggaatgctttgacctcaccatggcccccggaacaccttgacctctattgtgagtattacagcaaaaacagtccacacaaaatacaactaataatggttgaaaactccacatggtaaaatttatcactgacaaagaactgatgaaagaaaaaaatacttaaaaaacattttgacatgtattatttgaccccgggcacatgaaaaggtagaaagaatgattccaaaaaaacttaaaaagagagaatatatagtcagtaaattatgtggacaaatgacttacataaaacttaattgatcctgataacaatttcagttttctaaagtataaaaaatcaaattttagtaaattaaaaataaaagtgagtaaacgactttggtttactttctgtatgttaaaaaatcagtgagttaaaatatcttactgaagtttgctgtcaacaaaattttaaactgttgataataattctttttttttttttttttttttgagatggagttttgctcttgttgcccaggatggagtgcaacggcacgatcttggctcactgcaacctccacctcccgggtttaagcaattctcctgcctcagcctcccgagtagctgggattacaggcatgcgccaccacgcccggctaattttgtatttttagcagagacaggatttcaccatgttggtcaggctggtcttgaactcctggcctcaagtgatctgcccaccttagcctccccaagtgctgggattacaggcataagccaccacacccggcctgtgttgacaataattttgatttcaaaggttactgagcacagaataaaaatattttgagggatcgaatctctctaaggtagtggcagggtcagaatagcagagtcaaatggaaggcagcacttgcaaggccaaatggacttttgtcattttaaatgtgacacagagataataactatgtaagttaatcccacaatgaaatttttaagcaggtttattagtgagattacggtaatagccaaataaccgttcatattccaggggtgtaacactgtatttcactgccccctggctttgctggttgtgcactcagtttggggaggcagttctccctgtggtcactgaggaaccctgaattcttccacctggtgccttcaccatccctgggacttcaaccccatctgcattcagcagaagaaagagaagaagcatggagaaatacccgtggggggattttatgggcctggactggcagtggctcccataagtcccactccccttcccttggcaagaactggtcacgtgactacacataacacaagggagtctgggaaatgtggtacagctgtgtgtgcagagaaggggagaatggattttgctggacagctagagttctctgcaactgtgagtaactcatttggattaattgtgtttctcattttattttgttttaagacagggtcttgctctattacccaggccgaagtatagtgatgtaatcatggctaactgcagcctggaccttccaggattaaatgatcttcccaccttagcctcctgagtagctgggaccacaggcacgtgctaccacacccagataatttcttaactttttgtagagataggatttcaccatgttgcccaggatggcccccagctcctgggctcaagcaatccctccaccaactcgacctcccagagttctgggattacaagcacgagccaccatgcctgaccaaacgtgattctcaaatgtttgttgagtgtctactgtatgctaggccctgagctaacagctggacagagagctgcaccatagcctgagagaagctcccagtctgcagaaggagatcagacgtggtatgaagtgcttgctatcctaagaaggataaagtgaaagtgctagaaggctagtgaattattccagcataggaagctgcctgaagatgacagcaactgagctccatttttgtag

SEQ ID NO: 1880137 - DNA, 4001 bp, Homo sapiens
attgctaaattcttttactagcaaggaatataaatattaataccctgggaaaggaatgcattcctgtggggaggtctataaacagccgctctgggaatgtctgtcttacgcggttgagataaggactgagatacgccctggtctcctgcagtaccctcaggcttactagggtggggaaaaactccgccctggtaaatttgtggtcacaccagttctctgctcttgaaccctgttttctgttatttaagatgtttattaagacaatatgtgcactgctgaacatagacccttatcagtagctctgcttttgccctttgccttgtgatctttgttggactcttataagtagttctgcttttgccctttgtcctgttccctcagaagcatgtgatctttgttagacccttactagtagtaaggtctttttgccttttgaagcatgtgatctttgtacttttgtacctactccctgttcttacaccccctccccttttgaaacccttaataaaaacttgctggtctgagactcaggcgggcatcatggtcctaccgatatgtgatgtcacccccggtggctcagctgtaaaattcctctctttatactgtctctctttatttctcagctggccaacacttatggaaaatagaaagaacctacgttgaaatattgggggcgggttcccccaataaagatgtcagataggggtacagcttttttatattccatccctaccatcattgccttacttcaacttctgattatttcttgctggataattgtatcattggcatttctcccttcaggctcttaagcctcttattcacccttctcctactgccaaagccttcattttaaaatgcaagtatcattacttctctgattaatatcttacggcaaattccagatttggttaagtacatagtctgtgtgttccctaaaacattctctgtcgcaaagcagcagagcgttgggattaccagacagtggtgttcacatcagaccacccaggttcacatctcagtcttctagttaaaattgtgtgaccttgtagcaaattgtttaacacaggaagctgtaaaacagtaaaaacagtaagtactttatcatgttatgaatgcatgcagtgcacaacacctaagtgctcaataagtgttgcctgttattgttacagtatattattaatatattgtaattgtccccataataaactctaaatacagtacatgttaattattattgaggatgacattgtaattgattacgtctcagtctctccattatacctccaataacttcgggggtagaagctgaattactcttttttgcttccctagaggtttacatattatttggtactcaattatgtaggaactgagccacaggcagaaccaagaagctggctattgcttctgccctcgcctgaggtgaattgttagctgcactgttcctgggagtcaagagcttgcactcactctcaagcaaaatggcataactttggcttttcagaatattaaactagtgattctgcctttcccgcctctcaaataaatggtgtgtcaccctagaaagaaagataacacactccgcatacacaaacacgcacaccgcaaggaaccaaaggccaagagtatcaatgtaccagggcgcacacacttcgagagacaggttcggtgcatcgcaggatcccaatctttcttgcatcttcagctctaaaagtcggcacctcggggtatgccaggatcctcgagaaaacagatataaacacatatttacccacaaaacagagataaagcacaagcctgcgggataactggaggagttatcttacagttgagactttctgcaacctgcagattttgccgtgcccagggcacaagtttttcagggctcctgggcacccccgcgaccgtcatctcacttccccggcagcttcctcgccccgaccgcagtgttcccagcgcggctcctttaagccgagctacgcgcatgcgcactgactgcggaactgggcgaacccgggggttcgtttctgctgactccagtgtcccgagaggcgccgcttcttccgctttctcgtcaggctcctgcgccccaggcatgaaccaaggtttctgaactactgggcgggagccaacgtctcttctttctcccgctctggcggaggctttgtcgctgcgggctgggccccagggtgtcccccatggcggggccgcgggtggaggtcgatggcagcatcatggaaggggtgagtacagagcgaagcggccggggctgcagcctaactaaggaggggagctctcaccaccggtgtgcttacttctcttctccctgtaccccaacctttgcagggcggccagatcctgagagtctctacggccttgagctgtctcctaggcctccccttgcgggtgcagaagatccgagccggccggagcacgccaggcctgaggtaaatctggctggagggggagttgggccgtgaagctgggggatcggggggtcgggctgccgggctggggcatcgggagtccgagtggtggaacccagaaggtcccagacgcaggtatgggcgatccagggcggggcactctgcctgggcggtggcctgggttgtaaagtcttgaaagcctggaggggtgagtttagaaatggtctcgagttttctctgtttgactaaatagtgtcatttgctgaagagctagcttttaaaatgttttctcacctcaccgggcattccaaatatccgaacagcacgtatgagctggcaagatagatagggcagaaatgcttgtgacgccagaggaaaccctgttttataaccagtgcattctggttctgctgtcagttttagaatcataaaacaggaaagaatcctgagatgtgttatcccagccttcattcatacctccagagagctgttatgaccagaattatctgttgtggagagggaaacaccttgacatttgaccttatttcttctgtctgggtagctgggcatgccactagttgagcttcaggtacatgcacctgctagaagaggacccaggtttgaagccacactgattgctttgtatgtattctgtatttattacattttaataaatcagcggtctcagtcttttgtctacagttttgaaattaccaaaaggcaattactgatatgttaatgttaattgcctttgtcatagtttgcagccctccagttcaccaacaggggaatccaattcattaggctgtaggtgttgtattagtttgctagggctgccataacaaaatgccacacacagagtggagcttaaacaacagaaatttatttcctcacagttctggaggctggaagtccaagatcaaggtcctgacaaggttggtttcctctgagagccatgagaaaaggatctgctccaggcctgtctttttgcctcttcacatggtggttcctctgtgtaccttgcccctagcgtctctgtatgttctagttttttttttttttataaggacaccagtaagattgtatggtggccttattttaacttaattatctctttaaaggctctatctccaaatatagtcacattctgagatacggagggttacagtctcagcatattaatttagggggaacatagttcagcccatacaggcaccatagattgttcagtcaagtgcaagcgagactggtggcactgaaataactattagttttcttctttagcacacttctaatttgcagcaatatatcagggtatgtatttatagtcagaaataactggtctgcaaggaagtgttaaaatgatacatactagcaggtagtctaggtgcataaaaacccaaaaggaagctgacactgaagatgtggcacttactgtggttagaccttgctgttttcttgccattgcagttttataaatttgtcataaaatgtggggatgtaggcagtctgaatgcacacgttttgatgcagtattatgacctgaaggcctcaacatttatctggactgga

SEQ ID NO: 1880138 - DNA, 4001 bp, Homo sapiens; identical to SEQ ID NO: 1906

SEQ ID NO: 1880139 - DNA, 4001 bp, Homo sapiens; identical to SEQ ID NO: 1908

SEQ ID NO: 1880140 - DNA, 4001 bp, Homo sapiens; identical to SEQ ID NO: 1911

SEQ ID NO: 1880141 - DNA, 4001 bp, Homo sapiens; identical to SEQ ID NO: 1941

SEQ ID NO: 1880142 - DNA, 4001 bp, Homo sapiens
aaaacttgctatacctgtccttatatttcttttaatcctggatcagtaaagcctttgccacagatcggttataaactggactgttatagatgaaggactctagatgaattattgctaaagcttcttccagtgctagtggtctagtaatccagtgggagcacttgaggaataactctcatttgggtatgttgtgtttttcctttaaacatgaggtctcattaaacgctagttcacatttcacactatagtcctaaaatccctgagaaaatatagcataaagctgagtagagtatagtcaagttagtacccggctgggaatcaagaagcttatatttcattcctggctaagtcctttaactcacaatgggctgctattatccccttacaaaaccaaaagatacacctcatgcaagcacaatttcagcactgattacagtaacaactgctaggcgcttctatgccacacactatgctatgagttttacattatatcatttcatcctcacaaccaccctatgaggtgggtaatactattctcttcctatttttataaatgacaaaattgaggcataaagaaattaacatactcaagttcacacagttagatacttgtgggccgggttagaaattcagatttgtctggcttcagagtctaagctgttttaaccacattatatattttcttcattctacttacatcaaaaaatgcaccatatggcaaggaatattttaaggagagaataagtactgtgggtcacactcttttccttaaacaatcacttagccagtttctttcaagctcagccttaaggttcaattaattcaggctagcttggatatgtgggtcacctctgggaaaccctatctggcagtgcccatctgctgctggaagagcttgttctgggcccacactactatggagaaccaagattcaacaacagcctgacagctcagtcagtcaccttcatgtctgctttgacccaaggtttttaagacttgagttaaaaataagacattatttcaggattaagagagagcccagaaatttcaacaacttgttctctctaggtaatagttatttgggctgaatctcattgcacttctcattcatatttatatgcacatggattatgctgtcacaaacttaaatttgctaaccacagtgctcacagattgtgctgaaggaacatgaaagaccaccagctcttgggttctaaaataacaatgactaaatttctatgaatctagggtgccaaaagacatactagagatttagggatttctttgagaggaaaaaaaaagagtgcctccaaattaaatgtacacattcagtattaaaggcaccccaattacagaaatgttaaaatgaatgaattttttttttgagatggagtcttgctttgttgcctaggctgcagtgcagtggtgcaatctccactcactgcaaactctgcctcctgggttcaagcgattctcctgcctcagcctcccaagtagctgggattataggggtgtgccactgcacctggctaatttttttacttttagtagagacggggttttgccatgctggccagcctggtcttgaactcctgacctcaggtgatctgcccgcctcggcctcccaaagtgctgggaggccaggtgtgagccgccaccgcacctggccaaaatgtatggaattttaacagaaaacagtatgtcttagaaccaaggaaatgtgttagatgttgaacaatgtgctgcttctgtccaagtgaatgaaataatgcactggctttcaacagtcactaaagccgtagcttcttgactagctatggccagtactgctatccagttgtgcctctgagttataactcagagtgtatctttacacactgggcttaaaagactcatggcttttgttttaatattgcacttcttaaacccagctatcacaacacatcacaagcctttgacacaaggctaggatatagacagctcggttagtatcaagtgctgatcaagtttaaatctaaaaataagcacatctcaggtctacgcctctcaagaatacagtgatgtctaaggattgtaacttgacaactttgtggcaactcagcacacttaacaacatcgaaagagaacgttatcagctaatagacaccaatgatcagaggagtgtctggcaagttagagtgttttgaaaatgtaataccaattattccacaaaggaatgtgatgttatcattaagactaggcaaccctgtctgtttcttcctgttgcaaactaaagatttgctaaattctagtaataaaacagatccctatatgtcttcaagctttgtgctattcagcaacaaatattttgtaactgtggaacaatctatagcaaaaaaggttttacagatattttagctaaattatttctttgaataatcttgaggttttaaatctttaagagagaagaacccatgacaaaggggctctctgtgactggctgagtccatgatgtattcataacaggagaaatcattaaaactcgtgcatgccttaatactttgcaaaatacctggttatctctacaacatctcaaaagtgacaacaatatatttacagagtaaccttcaaaagatctcagatagcttttcaatctagcaaccgtggaactgcaacatttttattaaataccaaaaaaccacaatgaaaaaactgcattcaataatggggccttgaacctaaattctagctgagcaagcaaatataaaattggtctaatatgggagactcacagctacatggtcatagtgggcttaatatccatctcttggtaaataaataataccgtaaggattataaaaaatttacgcaaactaatagctaataaaaactcatgttctcttgaactcctatgtggtgttctctctagaggcttgtataaaagctggaattctgctaaacttttatagtacttaattcaaatataattatgtaattttttggtgtgattctgtctctcccactggatgacttgaggacagaaattatgttggttttgcttactgctgcaatctgtatgccaagcacagtaactggcacatagtaaacactcaatacatgttttgaaagaatcaattaatgaatttcaccacaattccattatctttttgagtaaatgtcttagtttaccatacttcttataaggagttgggcctgaatgtcttaaaattaacttagaagttaaactcaatatatatcattcactttcttcagttactgcataccttgcacggtttacacaactccatgtactcagggagagggaattaaccaagctaacagggcttccagtttgactggggcccacaggacccatgacctattaaaacccttcatttgagagaagtcacaaaaaattgagtgtctgtggtagacataagctttaaatgtgtgatgtcaccatgtgcttttaacagaaaaaaaaaatcaggatgaaagaaagtagcattgctggaaaacaaagcacaggagagggggtggaaaagtgagtcactggcaaaaatctttagtgtggcagccaaaaaagtaagacatgtatttccatacctcaattagtttgtctcctttgactacatccagatgtaaaccgggagggggcttacctgccctgaaaaataaaaatagaaaaaagcattttcaggatgggtttataaatgctatttacaaccattgtcccattcaacattgcagctctcctaccagcctataattagttcatgttcaagcagaaatgtcatccacttcactgttattacagctccattctacgtttgacacttacttccctagtgattcaattgctctgcaacagattttagtagatctgtatttagagcagcaccaagaaacctatattttaacactggatcttcacctcagagaaagaactgcatagagagtgcaagtacgatagctggggtggtctagtcacctggagtttgaatctgaaatccacccctact

SEQ ID NO: 1880143 - DNA, 4001 bp, Homo sapiens
tactaaaaatacaaaattagctgggcgtggtggtgcgtgcctgtagtcccagctatttgggaggctgagacagaagaattgcttgaacccgggaggtggaggttgcagtgagccaagatcgcgccactgcactccagcctgggcaacagagtgaggctccgtctctaaataaataaataaatagagtccccttccacccagactttccgacctattcacatatctgctgccaagtggctatatgaagtttcagatctcattatttagagtggcttaaggtggcagaggcatgactacctggataatcacattatggaggttgagatactaaacatcaaaaaaaggcatttgcttttaaaaacatggattcctagacctccctgataattctaattcagtatattccaggagtgtccctggaacatttcatgttctcttaatggacatatacatgtataaggacatactagacagtgtgtgtataacccttagcggcagatgctgtaccatgccgttagccctggggatacaagtgttggtagcatacaaaaaatgtcaagccggccgggcgccgtagctcacgcctgtaatcccagcactttgggaggccgaggtgggtggatcaccaggtcaggagatcgagaccatcctggctaacatggtgaaaccccgtctctactaaaaaatacaaaaatttagccgggcgtggtggtgggcgcctgtagtcccagccactcgggaggctgaggcagaatggcgtgaacccgggaggcggagcttgcagtgagccgagatcgtgccactgcactccagcctgggcgacagagcaagactccgtctcaaaaaaaaaaaaaaaaaaaaagtcaagccaagcctaaagaaaaacaaggagaggactggcgttatggcgtgcactgatagtcccagctactgggcaggctgaggtaggagaatctcttgagcctgggaggtcgagactgcagtgaactatgattgcgccactgcactccagcctgagaaacagagtgagaccgtttcaaaaaaaaaaaagaaagaaagaaaaactaaaaaaggggccgggcgcggtggctcatgcctgtaatcccagcactttgggaagccgaggcgggcggatcacttgaggctggagttcgagaccagcctggcaaaacatggtgaaaccccgtctctaccaaaagatacaaaaattagccgagcgtggtgacgcgcgcctgtagttccacctattcgggagacagagatgtgaggatcgcttgagccaaggaggtcgaagttgcagtgagccgatattgcggttctgcactccagtctgggcgacagagcaagaccctgtctcaaaaaaaaaaaaaaaggaacaaaagaaaaaagaaaaacaaggagaaatgggaaagtgggaggaaagtatatcagcggccaaaaaggcctccgcgaccttccagctccagggggaggggcagcggctcatttacccttggccaccgcgctcagcatccccgcccgccgccgccgttcacgtgctcgcccctacgccaccggcagcccgcagcccggtggccgtgcccagatcagaatcgcctcgataatcagtggccggggacaagcccggcctcgtctatctgatcaattcatcacttctgagcgccgggccccgcagggccagctccgggacctcggggaccacagcgtggccgccgcctaaggggcctcgctgcacagcgccccgagggggcttcgcaggaggagagcttttcatttcgggtcggcccggcggggctggggtcacgatccgatcaaataagatcaaagtgtaagcgggaggaggggcgcaggggtgggcgcacgcactcgcctaacacgctccaagcgcgcacactcacacactcacgcgtccactcacactcaccctgcacgcgcctcacacgcgacgccacagctccgcacacaacacccaggacccaggccgctctccctccctaaaacagcggaagtccgctccccccgcgacttttaagctctccgccccctcccgcgccttggaggattctgggagaaaccaccgagcacaggcggacgagtcctgaggaagggggtgttcctcagagtgcgcgcgttgctgccctcgcgtggctcggaggggaacataggtcccaggaaaaggcagtactaatttccaccttacagaatcgtggttttttttttttggagacccgttcttgctgtgtcgcccaggctggagtgcagtagcgcgaacacggctcattgctcctagatcaagtgatcctcccacctcagcctcctgagtagctgggaccacaggcgatggccacggcacttagccttttgacctttgtataactacatagttatatacatatctttagtttttctgtgatcgtgactttaatttgtcttcaatttctttctttctttttgaaatggagactcgctctgtcgcccaggctgcagtgcaatggcacggtctcggctcactgcaacctctgcctcccgggttcaagtaattctcctgcctcagcctccggagtagctgggattacaggggtccgccactatgcctggctaatttatgtatttttagtagagatagggtttcatcatgttggccacgctgatctcgaactgctgacctcgtgatccgcccgccttggcctcccacagtgctgggatcacaggcgtgagccactgcgcccggcccaatttctttcttttttttatagacggagtccagctctgtcacccaggctggagtgcagtggtgcgatctcggttcactgcaacctccacctcctgtgttcgagcgattcttctgcctcagcctcccaagtagctgggattacagacgcccgccaccacgcccggctaatttttgtatttttagtagacttggggtttcaccgtgttggccaggctggtcctgaactcttgacctcaggtgatccgcccgcctcagactcccaaagtgctgggattacaggtgtgagccaccgcgcccggccttaaatttttttgagacggagtttcgttcttgttgcctgggctggagtgccatggcgtgatctcggttcaccgaaacctccgcctcccgggttcaagcaattctcctgcctcagcctcccaagtagctgggattacaggcatgtgccaccacgccctgctaattttgtatttttagtagagttagagtttctccatgttggtcaggctggtctcgaacccccgacctcaggtgatctgcctgcctcggcctcccaaagtgctgggattacaggcatgagccaccgcgcccagccctttttaaatatgattcaacttcaggatattcataggtgagtgacttcttttccaagaagacatcaatctctggtcattaccatggggagcatcagcttccccagtagccccttctccctagggagaaggcaaacatcattttaccaaagggaaaggtaaggaatagagtacgtatgtatgtatgtatgtatgtatgtacttatttgagacagggtcttgctctgtctcctatgctggagtgcagtggtacaatcatgactcactgcagcctcaaccttctgggctcaattgatcctcccacctaagcctcccaagttgctgggaccacaggtaacacctggctactttttttcttttttttttttgaggagtctcgctctgtgacccaggctggagtgcagtggtgccatctggactcactgcaacctccgcttcccaggttcaagcgattctcctgtctcagcctcctgagtagctgggattacaggtgcgtgccaccatgcccagctaattttttgtatttttagtagagacgaggtttcaccgtgttagccaggatggtcttgatctcctgaccttgtggtccatcagcctcagcctcccaagtgctgggattacaggcatgagccaccgcatcaggcccacacctggctactttttaaaacacattt

SEQ ID NO: 1880144 - DNA, 4001 bp, Homo sapiens
tgaaaactgagaaatataccaatgctgatctgtatcatattgacccagtaagcttatcacatgtctgggcttcatcctgaatttattaaagcaaaatggaagaaagaagaaaggtgtcttgggtggtcactgactatgtacaagagagcctcagttctcatacattataaatatacattacatttcaaatgtcataaacctaggctcctaaaagccttgttacatggaaaatttggtcttttatatatctccctataagtattatttcaagtaatatcaacagaggaaaaggcttggccacagaaccaaagtggtaaagagtgttccaaagtcaacatacatggcattgacaggccaaattcccactctccttccaatcttccaccccccatacacaaaatcccaatttgagatctggggaattgggatttcttcatcacaaaggaacactttcaaaatcagttaatcccaaatctcttctttcttctccactagtatccttccttacaaaatcttaaaatcgttcattagaatgaacagaacagtggatttctaaagggcctagaaaagtatggctactcatttgacaactgtctaatgcaaaaactgctcagggtaagaaatatgggatttcagaaccacaaacaaggatcctcatacaattagttataaataaacccaggctggtattaaactcctgacctcaggtgatccacccgcctcagcctcccaaagtgatgggactactggcgtgagccaccgcgccgttgaaagctcatctctactaaaaatacaaaaattagccaggcatggtggtcccctgtaattccagctactcaggaggctgaggcatgagaattgcttgaacccaggaggcaggggttgcagtgagctgagattatgccactgcactccaacctgggtgacacagtgagactcagtctcaaaaaacaaacaaacaaacaaacaaacaaacaaacaaacccagctgtggctgctgtaagttgtagaagttaggggaggtaggtgggagcaacctctccccacaacttaacagcaaaacacacaacaggaaaaaccaagattttgaattcagtactaagaaggttaatacttagcagcagctttcctctgcaaatggttatttctgaactttggttacagccttaaaaaattacataaactggattttggagaaatcactttcttaatgagaaaatcttcacggaagctatctctgattagctccttcatatctaaagtattgaccttcactggtaaccctgaattcgttaagccaatgtggccccttagaagaataatatttcttttttcttttttttttgagatggagtctcgcaccgtcacctagcctagagtgcaatggcacaatcgcagctcactgcaaccttcgcctcccaggttcatgtgattctcctgtctcagcctctcaagtagctgggattacaggcgcctgccaacacacctggctaatttttgtgttttcagtagagacaggatttcactatgttggtgccaggctggtcttgaactcctgacattcagtgatccatctgcctcaacctcccaaagtgctgggattacaggtgtgagccaccatgctcggcaagagaagaataatatttccacattcattctacttcctggttgtaggttccttaaataagcaaataacacctattttcaaaactcgtaagatacctcaaaaaccagttcagacggatacagaggtaactttacttggttgcccatttaaaaaataatacagtactcataaccagcagatactgaataaaatggcaaggaaaccaagtatttagagtggcagttttaaaggctgtacggaggggaacgatcagacttagccagctgtcctaagccagacagagacctccatatatttatgtaggatcgctgcaatctgtagacaaaaggcattttttcatttgtccacatggctggttccagcagcttccatttctggtgtgcttcattattaagaagacttttgttaaccagtcttttatattccaattaactaactgcatcaaattctcatttaaatatacttcaggattcagataacaggaaaagaaccattaagaaggcacacttagcatacaaagtcaaagtgatccttattcagggagaaaaggctgtgaagaacatacacaagggaagaaggatttagatacaaaacaacacatacattcatcattcctttctcaatgctttccaaagtcttctcgccaactggccctaaacaacttgattatccttgtcacactgcactcaaatattctctctaaacactttcaacttgcagcacatgttaacagttaatatctctggatgatcttctgagtaaagcttgagaaaaatgtgcttacaatgacaagtatgaggggaaaaaaatgactggattgctgattaatactgagaagagctcctctgagcatagaaccgtgcatatttaagagagctattcgcaaatttcctccagactactctggtaaagctgattctagaattcagtactatttggggaataccatgttaacagaaaaagcaatacattcaaggcatggaaacctggatctgaattttggttctgcttaatccttttagacattcaatttctccaaatataaagcagatactcttaggtagaatctgtatgaagattcaaggaaaacacagtagagcattgttagggaccagaacacactacctccaaatagtcaccttggtatttgaaaaaacagcagaagcaggaagaccttctcccacacttctcctctgaagcaggtcataaaagaattctctgcccttccactgaagcaggtcataagactctcattccagagttgcctatccttacctgaggaaaggaatgcccttatctctggagacagagacacagagaagaagctcaacaaacaggtcttgctaagttgcccccagtttattaccattagatcatacccctttgtcctccaatcatacttctccatgagactattcatttcttcatcaaacctaagcataaacatatacaagtttacccattctttgggtcttcatttctgaagccttctgtgtcacgtaaaacttctatgtcatgtaaaacttacagaggtctccgtcatgaatcaagccaacaggtgagaaaaatcttttctcccttacagcatgtaaccaaagagtaactggcacactataggcactaaacaaatgaatggtagttgcttttactaaaatactatataaccttaatttctttacagttaaagggtagttatctcaagcaatgatagtactattagtatcatattagtactgtcagtatcacagtgtactagtagtaataatactagtgtattattctagtcagtatatttatgatcttatgaaattgataaaagtaggctctctgggttaggcagacttaaattttattctcactcaatctttaactcctctttcctagaaaactaagtagctcttactctggtagctgctggtgtttgtatttttttgctctccaagttgaagcaaggaatgtacctggggcaacactaatgaagcataacaaacaattcaagatgaatgtgaacatcagttggtagactgcattctataggttcatcaatagctgtgagaaaccagaaaccaaggagataaaatggttaaaagagggaaagagaagcagtgattgggctaaaaaatgatgagaacttagttaagcagaaataagaggataaggcaatatgaagaacaacatgaatacgagtttagaagccggaatgggaatagtatgggacaatgaagaaactttcttaatgaagtaggtgaactgtgttagaaaacagaaataaagttagatggatagcattatattagattattgaaaatcttgaatgtaatagtttagatacgatagtctaagtgcaaacacatgagatcaggaaatagagcag

SEQ ID NO: 1880145 - DNA, 4001 bp, Homo sapiens
acaggcggatcacgaggtcaggagatcgagaccatcctggctaacacggtgaaaccccatctctactaaaaatacaaaaaattagccgggcatgttggcgggtgcctatagtcccagctacttgggacgctgaggcaggaggcgacagaatcttgctctgttgcccaggctggagtgcagtggcgcgatctcagctcactgcaagctccacctcctgggttcacgtcattctcctgcctcagcccccgagttgctggcactacaggcgcctgccaccatgcctggctaatttttttgttttatttttagtagaaacgggatttcactgtattagccaggatggtctcaatctcctgacctgattcatccgcctcggccctgaaagtgctgggattacaggccaagattcacttttgtacagacttgtacaaaaccaaaggacttgaatactaaagagataattccgtctcctaattcaataatttctctttttttttttttttttgagatggagtcttgctctgttgcccaggctggagtgcaatggagcagtctcagctcactgcaacctccgcctccagggttcaagcaattctcctacctcagcctgctgaatagctgggattataggtgcctgccaccacacctggctaatttttatacttttaggagagtcagggtttcaccatgttggccagggtagtctcgaactcctgacctcaagtgatccgcctgcctcggcctcccaaagtgctgggattacaggtgtgagccaccgcacctggttttttttttaagacagggtctcactcagtcacccagtctggagtgcagtggtgcaaacacagctacctgcagccttaatctcctgggctcaagccatcctcctgcctcagcctactgagcagctgggattaaggtgtacaccataacacctggctaatttttttttttttttgagatggagtctcgctctgtcacccaggctggagtgcagtggcgcaatctcagctcactgcaagctccacctcccgggttcacgccattctcctgcctcagcctcctgagtagctgggactacaggcgcctgccaccacacccggctaattttttttgttttatttttagtagagacggggtttcaccttgttagccaggatggtctcgatctcctgacctcgtgatccacccgcctcggcctcccaaagtgctgggattacaggtgtgagccaccgtgcccgcctaatttttaaaatttttttggagagatggggttttgctatgttgcccaggctggcctcaaactcctgggctcaagtggtcctacgccttggcctccagaagtgttgggattacaggcatgagccaccgtgccccaattctacaatttctttaactaattataaagtaattactcctagcatttatctaaatccctcattactattaattacacccagttttctcttgctccttctgaatcactcctgactgtaccaacaagttgacaagaattcacatgtcccctgccctatccatccatacctgatgtaaatatacataggttcaaaagcttctcggccagatgctggctcaatgcagcctgaacctttgccccgcaggaagactttggcacctgtttcaatctgaatgtgctgcaaataggagcagcctggaccttccaccttctccttgacattaaaagtgggtacagcatgttctagacccacaaataatttatcttgaacataatgcatctgtaggaagaacagaatacttcagattaaacagaatatataattaaatcctcaatctttgaaataagtcaataagaaattatagcaaagacagtctcctgtaaaactggggtagagtgttgggtagtacagtcagccctgtgatactcttcagtgaaggctgctctctccaacccttttttctaggaggaatgtatcagcaaagtcttacttcatcagactcagccttcttagtcctccagttgtcatcaagtttacaaatacaaattaaaaccactaacttcaaaatgtacaacatgtataccttctgctctatcaatctcctttctagaatatatcaatatgaagaaatgtgtgatcaggtgttcattataccgtggagagctggataacacacaaacagaatacctatggcaggtaactttcgggattggaatttggaatttcacgatttttttttctttgtatgtattacttggcacttttttttttttttttttttttgagatggagtcttgctctgtggcccaggctggagtgcagtggcatggtctcagctccctgcaacctccacctcccggcttcaagcaattctcctgcctcagcctcccaagtagctggggttacaggtgcctgccaccatgcccgggtaatgttcgtgacggggtttcaccacgttggtcaggctggtccaaattcctgacctcaaatgatccacccaccttggcctcccaaagtgctgggattacaggaatgagccactgtgcctggccagcacatatcatttttatagaaatgataatgctattaacgatccctccccaaaacatacccctgactggaagggaggcttctggctaacagctggagacaactgagcgatgggtgctggctggtgatagacagttactgttgcaccattaaaagttggacttgttcctgtggcagcttttaccactccattggtgataatttctttgatccggtttacagctccttagaaaaacacagacagtaaaactgaatggaatgaactgactagtgcccaggcaggccagtgttcaattattcaccgtaaatctgctttatacgttacccaaatatgtggctctccatccctctaaactcccatacaaattcgtgtatagttcatgaacaagggttagaacagccatcagggacactttgccaacttgctatacagagccctgtactttgctcttcacaaaaagtgctacgtgagccaaaaacattacttactgtccactaattcccgtgtctggccctgaacatgaagatataatggacgatccctataaagagaaacaaaaaaggatgatctcaatgtggtcaaaaccaaaaaaggagtcaaatgggtcaccagatctaatttgtaatgtttcaagtttccaaataaccaaaagggactatatacattagaagggtttttgctagctaatgtctcagaacatgctttaacagctggggaacaaataaacttcttgattttaaaagtcaactggcccacagagttcagatcaaatctgttcttatggattcactaccattattttccagtctattgagataacccaatatttaagaacagaattcctttttgctggttgtctaataggttataaacaaatgtggtctcgtctatccaaatcaatggggcaagctgggtgctgtggctcatgtctgtaatcccagcactttgggaggctgaggtgggtggatgacatgaggccaagagtttgagaccagcctggccaacatggcaaaaccccatctctactgaaattacaaaaattagccgggcatggtggcacgcctgtagtcccagctactcaggaggctgaggcacaagaatcacttgaacccaggaggtggaggttgcaatgacccaagatcatgccattgcacaccagccggggcaacagaacaagactctgtctccaaaaaaaaaaaaaaaaaaaaaaaaaaaaccacacacacacacacacacacacacacacacacacacacacaaaattaatggggaaagattgatcatgcatatagagaaacctcttaaggtctacatcaactgataatttagattctaaatgtgaagaggacttaaattataataaagtgatcaataaccatatatagttaataaaaagtagcaggtaaaaataactttttaaagacaaagttcaaaacagcaatcaacacatatagaaagtttaaatacattct

SEQ ID NO: 1880146 - DNA, 4001 bp, Homo sapiens; identical to SEQ ID NO: 1949

SEQ ID NO: 1880147 - DNA, 4001 bp, Homo sapiens; identical to SEQ ID NO: 1950

SEQ ID NO: 1880148 - DNA, 4001 bp, Homo sapiens; identical to SEQ ID NO: 1959

SEQ ID NO: 1880149 - DNA, 4001 bp, Homo sapiens
gccaccagcaaagtcagtgtgctacagagcacatgtgttaagtgtggagaactgcaagaaggaaaggaactactagaaggaaaaagcaagatactttctgggtaactcagcctcctaatgataaatggcatagtttcttccagaccttagagttctaattaatctaacaagctcattagatcgtgagcttcttgagagcgggaatctaccatgctaattccttatggtaaccctgacagcttttatcccaacactgtgcttcttgtggtactcaaaaagacttgttgagaagtgagtcgaaacttcatgctgacttatgaaatctttacggaaaggtaacaatattgtgaaagcagagctttctgatcaaaacttcccatttctcagagtggctagtatcattttgttccaaccagcttcatgataagctataatgattcctgtgactttacctaagaagaagcaaagaaaggaaagagacttaccaaactgacactggggcccatagtaccccacatcacagttgcaggtgtaattattgatgatttctacacattctccatggccactgcatgaccagggctggcaagaagctttaaggaggtcagaaaaaaaatattttaatgtgattacattttagtactcaaagtcatttctttagacatagataaccttttgtctgagatgatttaaataatcaggaaaggtttatttgtaaattcatagcataaaaatcatatgctaaaatttttacgtataaaatacactaagcatatagtcataggcatttatttgcttttggaatgaaattaccaatactaatattctgtaacacttataggaaacttagtggcataccttgaaactcttgaaattacttgtttttaatgagtgagaaggttaaatgatgacctgacctcaatcatttctgcatgcaattatttcttggcaatccctttctttatagaaatcaaagattaaaaagtccaaatttgctaaaacggtagagtccaatttataagagaccaaattaactatggttcattattaaaacatcacttggaaaatgctggctgttttggaattgtagaagattttacagaaatattcatacaccaaagatagtgcaatttttatataaaattatataaggttagaccaagaaggaagcacgcagcaccacactctctacttcacaatgtgaaaactgaggtgatgtgagcctaagtttccaactggccccagctgtcagcttctcctcccctgccttattatcaaaggcactgattgtctagctcttcctctgtacttcctacgtagatctatcattttgatgtaacttgatttaggggtatagcttttgtgcacagggacaaatcttacacaccaaaaattcttaggagtgacacgatgcaagattatatagagggctagatgtattttagaatgaaccagaagctgttctcatccccccacctttccatggggtaaatctgagtattctcttaaccgtggcccttcctgagtctgaggcagcatagccgtcttgtcactccctacctgtgtaacagagggctgcctttagtttgtggcaggcgtcatcgttccatttgcctgcatctttgtttctcttgatatagatctccacgcagtcctccttgttcttcttgttgttgggctcaccatctccccagttctctgcttcttcagtaagagatttgttggttcccacccacgtccatattcctcctatcttccggattcctatccagtagtaagaacgactgaaaggcagagtcttctccagatactcaatttccgccttgttttgtatggcaactaaatctgtgtaattgtctcggcagaatcttctagccctttgccagttcatgggtttttcagaataatggtaagtccagcagtcggttccatgatgtgccaggaaatctgcaagacatcagtgtgacctatgcagacttacataatgttacagctaaaaagaacctagcactactccaggctgagctagacacttagagatgaggaaacagagcctaagagtgtatgtgaccatctcaggatcacagaatagttgtttgcagatttgaagtagaacctagaccttctggcttgaatataagatgcttttatctaaggttctatttgaaacaaatttagtggttttctaggtttattttcttattaatttttttctcaaaattatttcaggtgaaatttaaccaacatattttagacattcatatttctttttctttgtagctgttaatgatttacaactaattaccgtgtaatatcatataactatacaatttacgtatactttttaatcctggaatcatttcttgaaggccaacacatatgtacctatgggagaagcataataaggacaggaagaacagtgacatacttttaagtaacctcttttacataaaaaacattttattttaccataggaagaactgcttctggaaaagcccaatataccactcaactcttatatatctaactgtataatttttaaaaagaacaatttacaaagccaaatggtataggattatgaaattcattagatcatgttctatacacaaagagactcaactgatgatgtttaataaacatatggacccatcaaatatgagggctttgaagatatctaattaaacacataattacacaatgacttcataataatatatggcattctaagcatggtatgatctacatgaatcactatttaatacagtaaagaaacagatataattgatggtaaagagcatcataaaataaacattttgaacagagttttgaatgagcattccactagaatgcaagttctaagagggaaaaaactgttgtgtccactgctgtatccttagtgcctagcataaatttcacacattgtagggactcagaaaatacctgttgtatgaaaagagcactaagtttctatgtgacacagtgcagacatggcataaggaatgtgtgaacgggagagttagcatgtttgcttggctagagctgaaaatccaggctagggagaaagaagacattagtttacttaggaaatgaaaaaccaagttcaaagctattgctggagagtcttcaagaatcagatataaaatttgtcacaacaatgggagaaggaccaaaaaatgataaacccccgtcccttaataagctcgtattgtaattgtagaaatgacattaatgtacactgaactatgaataaaaaatagaaaatgaggtgctaaatatttggtacagattgtaagtaccttaacagagatttcttaattaacattattcctttataattgagggattttgtggggttattgggatttgaactctacagcatgggctattataggttaaaaatagtgttcaggagtttctggggaagaactaaaggtaagaagaaaagagatgtttacagaagggatagaattaacagctctgtgaaataattttcccttagactatgtataactagtggatatttaagaaaaatgaatataagtaaaatagacttagcgatatataaatatcataacataccacaacagagcattgtccacccccacaacttgaagatgttccataagtccctctgggtgctctgacatttccatggaaatatctgcaaatgaaatacaaaattatatttagatgtatactcttaaaccacacatttatagcctttgaggtggtgcttacaactttcttaataatcagaataaaacacatatgtctactaaccctgtctgaggtaacaggtttctcagacatagatgaaaaattacttcaaatttacatcagaactgatgcacagttttgttttgttctattttatttttacgctttagtctcaagttgctaatcggtactgccctgaattttttctatggtttggtaatttttatacctgcttttctgctgagctattagataaaactatttaatatttactatgtatattt

SEQ ID NO: 1880150 - DNA, 4001 bp, Homo sapiens
cagaaagggttgccaattcaagttgcagcaggaccaaggttgcttttttttttttttttaatacgtacgcagctcaggagggaaacgggcgggggcgggcggcgagggagaataactgtttggtcctgcaaagacatctgtttctcatctccgtttgctgtggcaaaggagaagaaagtcttttgcaaagggtgggaaaggcacagattttttttttaatcacacgcacacacaacaacaacaaaactaaaccaaatttaaaaagacaagatatctcggaaggttccagagtgaatacattattcggctggagccaagcccccagggctagggcgggagcccgagagcgcgtggggtctgggctgcgggctggagctgggcccgcgtgtccccgggcaccgggaggggaggggaggaaaaggaggagggagggcgggaagcagggaaggaggcagggggcgggctggggtgggggtgcgggaaaggcgccccgtgtgcagcctgaggagcggcggcggcggcctgagcagagggagggagggagagcgggcgcgcttgtcatgttccctctctcaccctgggggcatcctgcagaacctctcctcggaaatccacggggaaatggcaaacaggattgacgggtttcacacgctcctcgctagacagagccgctcattaccataaccgtctgcagcgacggcggcgcagcgccccagtcgcggcggcgggacctgccgggacccttgcccgccgcgcacccgcagtcaccgccgagcgggcggccgggccgggacccgcgagtgtgcaccggcggccgggctggcgccgagcccagagcggaccagcagcagctcaagcgctgcggccgccgcctccccgctgaccccgcggtaagagccgggctgggcgcgggccgcgggggcgggagggccgggcagggtggagggcgagggccccccggggctcctgccctcgcagacgggcacccacgcggcctcccgcgcgccctcttggcaccagggctgtgccgaggtcaccgagtggactcgcagcggccggagcggagtcggggcggcgtgggggccaaggcacagctgggcgcggaggcggcgcgggcttttccctgggctagcgtgcgccgcggcgccttcaccagggcgggaaccgccgcctcctctagggctgctcgggctgccacccgcgcgcaccgagacaactccaggggcgggtggggtcagaagctctggtgagacctcatggtcctccgtggccgcttagtccctcatcgtaggggaaggggttaagtaggaggggtgcccccaggtccggatgccgcggcgcttggcaggtggggagagagggattgtggatgtcaggagcgcgcgtttgcaagaaaaaggaattgatgcagtagctgacaccttctgtcccccgccacctccgcccccgcaccctcctcccaggcagcagagctgcgctgcgggcggcggcggctcctctgtcctcagctcacctcctcggcgggctgaggctgctgcccgcctggtccacgcctccgcctctcgcttcccttcctcccctcccgcctcttcggccctagcaactttccgagtgcccagctgtggtcgcagaagcagggaataggcgtcctcgccgccaggtcccacgggcgcagggcgctcccgcaaccgcgggcttccagcgggtttggccggcaagggagggagggaaggccgggccgacatctgctgcgggctggagcgcgggggcccgggccagccccgccagagccctgccagccgctgtgagtcatttccttggaatcctacctttggtgtttatttcccttagaaggaaacttggttttttttttaaaaaaaaaaaaggataagacataaagaataataatagctcttattcttcagaagaggcacacggctgcggcaccgtagaaagacaacttgcctttgttcccggacacttggggtgttgtttactttctcctgcggccagcggccgaccgggcgctgctggctacccggggaggggctgagggctgcggcaccgacaccccgggggtgtgtctgtgcgggagccaggatgtggttggtggctgccgcccgccttcaagaggtcggccctccaaacctcggaccccacccccgcaaccgccacacacacacacaccttgggcaccagggctcgggcatcggagcaccccttcgtgctctttaggcccagcacctgcagccccaaccacaggacccagcttcaagctcttggcctcgcggggctgcagctgagaaatgtacttcccagggcagacaggtgtactgcaggaacggcagaaaagcgacatctgtttgtttagaagggttgaagaattttgttccgcccatccagtcccttccactaccaccaccaggagccggacaagctattgagatcattttgggacaatgtggaggtcaggggcttgatgccatttaaaactggcagcatcgatcgggggtggaaatagccctttacttccctgctttccagtgctggaatcagactgctaactgctataatgatcttaatcaaatgctctccaattttcaatgacagatggaagaagaagtgagcaaagaatgacctggagccccttgttagattcaaggtgccgctgaattcatagctaccctgttttgtgtgccagccactcctattagcatcataattgcttctaggaaagaacaagcccaactcatctggaaaaaaacaaattgtatagaaatgcctggtaactttactacgaacatttgctggaaaagcttggcattctagccctcagtcttctggggatgctggaagtgtcattccactacatccacctgggtgtcaaaacagacattcaggagcctgaggatgaagggttagggcttttttttttcttatcttttaaacccatgcatagacaaaacacactctaacaccctcctgttgaatccatcacctctgatcttagaaaataaattttgccataatgtatatccttttctttatttaatattaatagaacacgaatttgtggacttgaattgctgacgtcagtagcagaattataaatcttatcagacagagaattatgacagtttagatctctacatataatacgaagaaagattcacgttaagcatttgtgcttaacgctgccctgtccaatttttcgtgaacattcaacttgccttcttaatttgttaacatccagtgtaagttttaaatagactaggaagactcaattgcaaaatctcctccccgctcccaaataatcccaactcattcatgttttattcagatttacataaatcacttgcagaactcagcctctctagtttagggttttgtgtgtaacagttctcaatttaaaaaagaaaaacttagtaaaattagatattgtgaacaaaataatagccaagataaatactgttatgccatgtttcaagttcacgtgcataataggatatgctggaaataatgctaacaaatagaaacgctgaaattcctcacaaccaaaaaaggtactaccaaaaagttattaaaatataaacaaactctgacaaacataaaacagcacagggcccatataatgtcctgttaaacaaaagtaattgctgccaggagcctgcaaatgtttttctttcttaaggggcatgagtttgacaacctgcttttgtttacatgaaataaaagtctgcataggcaaaaggcttgcatcttattcccatgatctaacacaaaagtgagtgtaaacttcaaactagaaaatgttgattctctcaataagaaagggctgctgactgttgaaaagctgtaattcatgtgctcttggcaatagtatttcctgatatgattgtctcttagaataggtgaagaaactggacaatttcatgagagtcttccagggaataaatcatcatgaagtttgataccctacttggatgaggagtttgagaaat

SEQ ID NO: 1880151 - DNA, 4001 bp, Homo sapiens
cccaatccatgaactctctgctgcccattattggacttagcccagcccatctgaggcccttcttgcccagtactgggtgtaccttcaaatgggctctggagctgctggcgccggcggtacaggtagcaacaggaacagaggaagcagcagatggtggtggcaaccacagcaacaaagaggatcacagctgaggcgatgcctgctatggtcttggggctttagacaaagaacaggtcctctcaccttccaacactcataggacggagtcctcattatgctggctccaactcctggccagcaggggggccatggcatgctgagatttggggttccttgtggggctctgcccagtccctgtgaaggagatcttagaggacctccacttcccagaaggctatgctgcctggctggctagtgtgaagcatacggggatttgcagtgcgcccccaaccattgcttttatatctacaacttaaatgattagacatacagcataacactgaaaggagccttagaaataatctagagccattttttccaaaccccgcttcaatcagaagtctctatatctattttatatatgatatattaaaaaaaagtttgacaaccactaatttggcaagcaatgacccatagaaggcaagtgtcttctccaagatcacacagctagtaagaagtggacctgggaatcaaacccaagtctcctgcctttgtgccagagcttcttccacaaagctacactgtcgtccgggtgttaaccttgaaccctccctccccatgacctggcaggaccaaagggagggctccagaaagaacctggaaaccccgggcccagtcaaagcctatgaaggtaactaacatgccttttctggaactcccaggcaccagcacctaagcacctagctctgccgccaggcttgagtcctggtgactctattcagctaagaatgtggaggtcgacaacggaggaggcaggagtccgggagggaggaagaggaggcctctggagaaaaggatagaggaggtggtgagggtgaggaggcaggaacccacctgaaggccaggcagtgcttctgctgcctctcggtgataagcaaggtcaggtccctgcagcagtaccgatggtagcaggtcccgcagcagaaggtgaagaactcgcagttaaaccccggatgccaggagccattccggtccaggtaccacaggcagtcctcgccggccagcactgcgggcagggattgggggtgcccagtggccaccaggccagttcatccccagccgcgctcggccccactcccccggcggtccccagcctgacggctcccgaacactgagggttgccccttgtctccaccctgagggtctcagccccagagcccccgaggcctctgcctgaagctgaccctgcaccccgggatcagcctcccatggcccagcatcctggagctccctcttcccgcttcttgaggacccagcaacacccaaggctcccgtggcagccggagggtctcggagaagccccgagcccaagcccctcggatcggtccctccccttcctccgcccccatcccactcctgccgcatctctccccatccccttacccaggggagcccccagcaccaacagagcgattgcggtgagcggcgcggcccggcggagccccgcgggtggcatggtgggggctgggcgcggccggggtcgggcctcccagagaagggaccgcaggaccaagccggccagctggagctgcggcggggcccagcccgcggccaggctcgggctcctcttccgcctcctctgggggtgggactaagcgccccgcccgcgctaacccagccggcgcggctccgcgcagcgcccaggagtccacccaccagcgacgcccacctagcctctggagctgggtgcccctcacccagcagagcactgccctgctccccctgtccccggctccgcggtggttcctcccatccgagccaccatgggcactgcgggcagttgggcactgcggccagggaagcctggctgtgtcctggacccgcccccggcctgggcccaatcactatgctggactccagaagccctgatcctggtgccacctccgaatgcccagacacatgggccaaccctggaggagcagggctggaccttcacttgtgggggacctcctctgccgcgtccagcctgggacatcctgtcgggggcggagagggaaagaggctggatgtcaccccgcccccattcccagaacacaagcactcattgagaggcattcagagtggctttgtccccagcggtgcccacaggcctgaaccctgccagctgcactggctccctacgatggacccttcccccttcaagtggacagagctggcatgcaccagcccatggcctcactagcagggaaggcaggctgctggggccacctggggcccatccagttaaacactcttcacagtgaaagcccttcacagagcaagcctgtactgcaatagccaccggagcatagggagggcaacagttaatttcaggtgggcaacagttaattccaggtggagacagtgttttaggatgggagaggtcagtcttcacaggtttatactgagtgccagtgactatgccccatgctacatgaggtaccctccgaggaactgcaaattaagccagggagatcatcaaaagcctaccttaatcccctgccatgtacaccctttcacacacttctgggcttccacatctacctcactggaatctttccacaactccatgaactaagcaaggttcatcagtgttatcaatcgcatttcacagactgagaaactaggactcatggaggttaaagaacttgttcaaggtaatacagccagtaaatggtagaggcatcaggaagacccaaatctaaatcagggttgatccccagccgcaacagcagacagtgtagacagtgagtatttcttgtgttctggggtgagagaatcaggacaggtccatggaaggcccagtagaatcttagtaggttagggaaggacagccgaaagaggagctaccccatcctgggcccctgtgggtgctggcacacctacccaagagagctggaataggagaggataggctcctgccccagaaagttgctggtagcctgatgggcaagagtatgtcctcacgcaggacacagtcataaatgcagcagcagggacaaagagaaacgcctctgaatccagcaccacctactcagtgtgcccattgccatccatctcctctttcctacactaaaagctccatgactgcagggaccacgtggctgtgttcaatgtggccatccagccctagccatcagtgttgtcattgttggttgaatcatcttcagataagggactgtctttcctgcccagagctgaatctcccatgtgtacccttgacccctgctgatttgtctcttcattatcccatctctttagtgtctttagcttctcacaccttaccagcttcttttccctaggaaatctcaagtctctcctatttaaagcaaagcaaagcaaagcaaaccaaaccaaaccacatccttcctaaaactcatccctctctagctactttcctgcttttttctccaactagccttcctcaaagtgtatacccctagttgacacgccctcctcaaagtgtatacccctagttgacacttccagcttgcaatgacacctagcacgcaccaacatcatcagtgattttctaattgcaaaattctaagaatgtgtttcagttcatgggatgggaggtgactagactaggacagagagtgaagagagggggctgtgggccaaccagaggggagaactggctgcactgggagaactggcacttcttaccttgacaagggatgctggagctcggagatggagagctggggctagcttatgtcgccataatgaacctgggtcttgaaagagtctgtagattggccaggagtgaggaggggcttgggtgggaggactgggggccc

SEQ ID NO: 1880152 - DNA, 4001 bp, Homo sapiens; identical to SEQ ID NO: 2002

SEQ ID NO: 1880153 - DNA, 4001 bp, Homo sapiens
cctgtttttactatttagttgtatgaacttaagcaagttactataaaaacactctgtgactctgtttattcagctgtaagtaaggaataataatttttcctcattacatttattgttggaattgattgaattattatatataaagtggtcataatggtgcctaataggtactatactataaagtataagtactacaagaaaattaagaatgataaagtatttgttcactcatcatttttagtatattgaattttattgtttaagagggataaaaagcaggggctttggaaccagattcaaatctcgactcataattttcattaaaacaaaaaagtcctcattgtcctcaagttttagttactgcttcctgctcctgctccctcaagcccaggcctggtcacaatccttttattttagctccaggatattgcaataggatttccctacaccttattcacacatttgtaaatgatcttttatttgaatgccccaaaatttgagcatttcaactttttttttttttattagaaccacgactgatgaggaactggtacttaaagtgtctcccagaaagaaaccctccaaatatgattctgaaattggttttcttatgtattcgaggagggcacagctaatgtatggatgcaatttgccaatatttgaggtacaaagattaactgcaagtgaggagtaaggtacagagaagaaaacaaaatgacttgtttgctatggcaaaaaatagtaattgtaaagactgtgcagtcctctaccttcttcagactaccctggaagacggacttaaggaaaaggggcaatttaaagttctaaatagacaactgagaacatgttcgaaaaacccagaggtctccatttcagctctgaaggagtccctcatcttctccctagccaaaagacatgcagtagaggacttttagttttcaggaacctaataggttagatgggcacatctataattaaagggacactcattcaccttgaagggacagatactctgttattggatctgatgtccctgccagcagcacttcttaatgcacaactcatatacatacagaatgccctttcattccatgatatcccatacaacagcagtccccaacctttttgataccaaggacagatttcatggaaaacagtttttccatggactgggggaagggaggattagtttggtgatgtatcaagtgccttaaatctattgggcagtttatttctactattatagcattgtaatatgtaatgaaataattatgcaactcaccatgatgtagaatcagtgggaggcctgacctggttttcctgcaactagatggtcccacctgggcgtgacagtgggagacagtgacagatcatcaggcataaggagcatgcaatttagatccctcacatgcacagtttacaataggtttcgcactcctatattaatctaatgctgctgctgatctgacaggagacggagctcaggaggtaatgtgagcactggggatgacctataaatacagatggagcttcgcttgctggccctgcactcacttcctgctgttggcctgatttctaacaggccatggagcagcaacagtctgtggcccaggggtggggacccctgctatacaacattgtctctcacaaacagaatcattttacagcaaatgaagcacagcaatgggcttaacaccatgacattctctagtctcaccacattcccacaactcagatacagctgacttcataaagcctgtaataggctcaggtaggacatgtgggacatgccttaaactagtggctaactacaggactgtcaagtccctggaaatgtggaatggagttccctctagatggcacaaagaagagagaggaataaaaatgaagaccatcaatgaagcaaggactatgtccgtaaatcttactaaatctactcacctacttgagccaggtgatccaaatcagttctctgttgtccctacagaatgagtctcaattgagtcacatgaatttcaacagtgcttcagcagttttcttgtagctaaggcaggatgtgccagagtgagatggggatcaggcaaactgcctatcaaagccctttcctctgctgtcaaactcagggaatctgattctgccagcctgattcttatgttccagtccaagggaaattcccaggggactggctgcttcaacctgtgggtagaactctttgttcagcttcagtgatcacagctggcagtatgaaagtactaacatgacacgcctcactctgaaggaaagcaagatgtaacctgatgtacatatttcatgtaattggtgctgaacaaaatggctgcgatgagtttattttgaatgctgaacctgtacctagaaaggaaaggagggaagctgtggaagcacaaataaaaggcactaaattcagattaagcattcaaggaaggtttaggaagctgataatggctgagaggagtcttaaaataaaattacccgctaagcccagttaagaaaggcttaactgagtagtctttccaggctaaggaagcaatagtttgaaagacacaggagaagatgggcaactcagaaattttcaagcagtttactgtggctggaatgggagttcggatgggagggaaggatgagaggtgagctgaagagagaaacaaaggtaaaatgatgaagagtgtaatttcaataaatatatgatatatatttcatatatttcatatatgaaatatgtttcaatatatatatttcaataaatatatgatatatatttcatatatttcatatatgaaagtaactatttatagataataaaggttatataaatgcataagtacagataacataggtacatatataagtacatgtataacatgtacaggtatacatgtgtaaaatatgtatacaatgtacacatgtacatgtacatatttataaatgattacgcatatttatgcatgtttacatatatgttcatatgcatgagtttatatgtacacaagtatatatattcatacagcacatgtgtacgtgtaaatggtgatccatgtatgtacgtacagtcatcctttggcatgctcaagtgattcgttctaggatccacgaggataacaaaattcgaggacactcaacttaatgtttgcacagaacctgcacacatcctcctatgtatgttaaatcatctctagattacttgtaatagctaaattgatataaaatactatgtaaatacttgctatgctttattattttttatttgtattatttttgttgtattgttcatttttatttttttgtatttctttaagttttattttaggttcagcgatatatgtgcaggtttgttatatacataaactgcatgtcatgatgtatctcaaccttaacctcacatcttaaacaaaatttaatatgagatggaaatttaaatgtaaaaattaaaatataatgtataaaccatagaagaatattatgaaaacatggggtaggcaaaaactgggggaagatacaaaaagcagtaactataaaaaaaaatgattcaaatctcatcaaaattaaagacgtcttattaaaagcaccattaagaatataataaggcaagacagaccatggaaatatgtgggcatcttagacatccaacaaagggcttatatccagaatatataaagaactcctacacctcaatattgattttgaaaacaacccaattttaaaagggcaaaagacttagacactttaagaaagaagatagagccaataaatacaagtgctgaacacactcactattagagaaatgcaaggtaaaactataatgagatttcacttcagaaccactaaaatagctgaaatttaaaaactgacaacactaaatgttggcaaggatgtggataactggaactctcatacatttaaagttgtgcctaagactggcagtttcttatacagttaagcatgcatctgctccatgacctaacaattccactctgacatgtatc

SEQ ID NO: 1880154 - DNA, 4001 bp, Homo sapiens; identical to SEQ ID NO: 2005

SEQ ID NO: 1880155 - DNA, 4001 bp, Homo sapiens
caatgatgagatcttggctcactgcaatctctgcctcacgggttcaaacaattctcctgtctcaacttcctgagtagctggtactatgcattacgcatggctaatttttgtatttttagtatcggcagggtttcaccatgttggccaggctagtctcaaaatcctggcctcaagtgatccacccacctcggcctcccaaagtgctgggattacagggttgagccaccacgccggcctgaaataaatactagttttattatcataataaccctgaggtaggtattatccttgttttacagagttgggagtgaggcttggaaaggtaaaatgacttgcctgaggacacagagctggtaagtgcaagaatcaaatttggaactgaacagatctggctctcaggtctatagtgtgaatctaccaccctatggggctctataagccttcttttgaggtttcctgggattcatcttatttaaccacttctcactacattccatagaacaggcccttatatatttacttctgaaccagactgaggatcctgtctctctaacttaattctccttaccatctacctgaatgctgctgccaccctagcactgctcttataagtcctagctgccccaatgacccgaaatgccttccctttctccgtgtttatcaaatgtaaaaagcaattactgtattactcactagtagtacttggccgtggatgccacactgtcttctaatatactgaactgttattggaaagcacatgggacctctcaggatctgatcctccaatctctactcttcttcaatctcaggttcttcatttgcaaaacagaaaccataaggcctacctcccagggttgctgtgagaattgagggggagggtaagtgagggggagggtaagtgagggggtgagtcctggaagggaggaagacacgaggggaagggcagggtcctggcaagcagcaagtgctcaacagatgttggttaatttgtgcctaagtctcccccaaaaacttgcaagctctttgaaggcaggggccttgcctcatatttttcggtatttctcaaaagtcctggacatcaaagacactccatggttatttgatcacttcaacacacacgttggttatgcggtcacagcggctattatgttaaaaacaggctctggagtgtgacttcaaatgctggccgctgacgagctgggctgtctggaaagttacttcacctctctgagcctcgggtcccttatttacaaaatgttcagggcagtgcccacttcacagggctgaggattagagaggataatccgggtgaggagcatcagccccagcgccgcctgccacaattctatccggccccacatatgcatcgtccataagcgtccggcctctgcattctcgcttttccacgtggccgaggtgcacaccccaacccactgggccagtctccccaccctcttacctgctcttctttcccgactcgtctttaatacccaccaggcgccaaccgccgcgggcctggctctatggtggcaagttgcatgggttctcccatcaggacctcccgatgagcctacgaggtcggttctactactgtcgccacttcagagggaggaaacaggcccggagggttggggaacttcccgaggtcactgaactggtgtcaggcccggattggaatccaaacacatcccagcccatgcccggctctacagcgccggcccccagcgtcttcccgggtgccagcggcacccgcatccattcaaatgctgcccattccccgctcctcagtcgcttcccgctactccgcacgcgcatctcccccacccgtcagggtcaggcctctcggtgacttttcctttttctctggcagaaactgaggggtgagaccgatggttgtgtcccgaacgagggcagattgcctagagctcgtcagacagggacccaagggcgagtctggcagggcgtggtagctccgcgccgctcagcaggggcgcagcgcgcgggtcggactgggacgccggtcacgtggcggggagggggcgccggcgcgcgcgggcgagctagagggcgcgcgcggctgaaagcgtgtggaggcgcgggctgcagttcggatgtctgtgtggcggggagggggcggcggccgggagagacgactccgccccctgcgcgcatgctccggccccggcgggttataaggcagcctcgctggcccggccagacaaagtggtgagctgcgacgtgactggctagctgcgtgggtactggaacaagcaaacgaggcagcgagcgaaggacgggagccggaccctgggccccgtggaactccagcctgcgccaccacgtcacgcacacgctcggcgctgcgatccgcgcatataacggttagttgggtaacagccggcggcacgcggcgcggaccccacggtgccctcgctgccctggtggggtcggaggggacctccggggttgggagactttgtctccggcggagggaggcggcccagcagagggcatcgtggtcacaggcagccgcgtggcctcggactgcagtgctggtgaaggagaccttgaggcgctggggtcagcgcctctcttagccgagccgcgggccccgtgctaagatgccggtcccaggcctggccgaggagttgggtcgtggtgcccggtgacggtggggaagtcccttcccccctaagtcttcaataggctcctcgagagatgctttgatctggaaaagggataacatgaggctgctgcatgtggtacctccagactctcctggccgcttctgccccaagggaagggactcggggcagaagttatttatgattcgtgacattgtccgccccaaccttcttggcccgccgatccttgccccacctggtgacttgcgagagtggtgcggagagccgcattccccacagccaaggcgtgactgcagggttcgagtagactttgcggaggggacggggcagcccgcagactcctgggagtggtgctgacgggggctctttgtcattcaacctgtggctgccagcgtccgccgcagcgcccttctactcatggacttaaggcggccctgttgagagaaatctggaggatagcgttacacttggtccgatgcaagttttttgttccaagtacgtctttttttttttccagcatgcgttttaacattttattactttgtcatgacatatttgatggaacaagcagttgccaaaactagtttgtaattaatctaaaccaggagacaaacttgttactactttagtctttctttgggtttccagtggctgattagaaactgggctgctactgataacagtaaaatgtttacacgctactttatttactgtaacttactaagctactttatttactgtaacttactataacttgttttgaatttttttttcaaaaattactctggtttcaacaatttttttatcccaaccaccagcccagtgaggtgatgcaaagactatgtatcttcagttttttagttaggtgttaaatagtacccataaattcaagtcttacaccctggggcacgactttgccttcagattgccatagaaatgaccaacaattcaagatatttagcacttaaaacacgtggtaagatttattatttacacagaagttgaatatatttcagtaattcattttggtcttaggtagatgctgttgtttcatcagattgcagttaccattgttaaatatgcaagttaatgatctgaggagcattttgtaagatttttatagctgaatagatttgaaggtttagttgtaagcttaacgggatagactgtaatgtccttaaacagattaaaaaggaaaaaagtcatatcactataggatgaaagcaaatgattagtatttcactagtttacatgttttagcctttaaatattagggcatatattagccctggaaaggatcctaatgaccagctgatcaggatcccttgttttacacataaggaaactggggctgga

SEQ ID NO: 1880156 - DNA, 4001 bp, Homo sapiens; identical to SEQ ID NO: 2014

SEQ ID NO: 1880157 - DNA, 4001 bp, Homo sapiens
ggataatctctacagaaagggcgaatcaaaggagataacacctagagaccctaaactacctaacattacttcctgttaagtattttttccttttaattgctgaaaagctattgagttaaagcaaccacgccaactccccaaagataatggttcaaacccccaaacgaaatgtttgcaatcctcttgagttgccaaaaagaagcagtcatttaaagagaactcagactgcatattaagtaacctctgcccaaaatgttaacatcttacacactagcattgtttgcacgcgattccccacttgacggaaatgtggacccactgtggctagagcggttcagaacttcacacctactttttcttcttcaggggttcgggcgcttgagccacgggagggcgaggcagcttgaaatagaccttgaccaggtcatagataaaccactgcagggccgtgagggtgccgatcatggggatgtgcgcaaagaggccgatgcgcgcaacgacgcccttccacacgcccgtgaaccccagtcttcggaggacgcccagggccgcgatgcccttctccttgttcagcacagacaccacggagtcggcgggatgggacacgacagcgcagaagacgccacgaaggtgatgcccagctgcttggccttggtgcactggctctggggcttgggcacggcatacctgtagaggtcctctaccgtgcgctcgaagcaggcgaacttcatcatggtgtaggggatctgcctcagccacagcggcgccacgcccttgtagaaggcccacaggccctcctcgccctacatcctggacgccgtggctcgcagggtgctggcgtagcccggtcgcgtctgcacgcggaccttgaccgcctccatgggctccagcgagacatcggggaagaactcggcgctggcccaggcgaaaaggtacaggccggctctccacccgtaggctttctctgggcccaggagctccgcggagcggatcttgaagacctcgtaaaggccgaacttgaagaagccctgcagggagtagccgaagaaggtctgagcgcagccgcgagccaggccgcacagcccgtcgctgtgcaccgtcacgccgaagccgctgaggacgcccttgtaccagccggggtccacctgcatgcggcacttgaccaggtgcagggacacgatggccgtgtgtgtcagccgcagctcagcatcccgcccaggccgcacagcagcaggtaccgggccgagccgtactccacgctggcctcctccacagccgccgcccagggtctgctgacgccttggcccacgcttctcgcctgcagcgctcggcggccgcgaggggatcatccatggccacgctgggtgcgggcccaccctgccctccgcccctccaggcgcactcactcaggggccgcggggcggggcagagcgtcgtgaacctccctcgcgagtccgcccacacaacggcccaggcgaggggatccctgcgggaccacagcgcttcagcctgtgcctgtgcagtccgcggtgtgaaggacggtttaagtaggcggtgtcaccccgccccttcccctccagcacgccccgccccttcgccccggcgccccttcgccccttctcgccccttctcgcgtcttcgccccttcgccccttcgccccttcgccccttcaggtcaatgggctcctggtagctgcaggaaccccgccccgctgagcctaggccagtcagtggtcagtggtcccagagctcaccttcggcggtgggccgggccttcaccaccctggtgactttggtccagcttggctgcctaatcctctacaaaaatgcgaagaaagtaaaccaacatgtacaaacacgagtaaacgcaggaataggcgagtacgtagatcaggaggcgggcgaaggggtaaagagtcgccatgcactgttgccttcctgagaggcctttctggagtcctcacccaactatgccggtttaggggaatggtcatctccatggcagtgacgttccacggtgcgaatgggcagagagagccagtggcttccggccttacataaccttctcacctggtaggtaggtgagtttcccccagctcacacaccactcctgtctcccaacaaacggttgtagtgggagcctaggaagtatggggacactcactgaatttaggggggggtgctgattactttcacttatcaggtattttcttttcattgactactgattttggagaatacgaaagtgagtcagaagccctcttcttttgggaagcttacagtttcagtggcctgaaaaataagaactaagtgattccaggtataaatcagtagcatacatcatccattcatttacccactttgtgctaggccctgtgcagggctaggggttcagcaaagaactagacatactcctgctaacttctaaataagattttttttaaaagaaaaaagtcagtattttgataagtattataacagaatttgttttttgagacagaatctcactctgtcacccaggctggagtgcagtggtgtgatctcagctcactgcaacctcttcctcctgtacttttagtagagatgggggtttcaccatgttggtcaggctggtctcgaactcctgacctcaagcgatccgcctgcctcggcctcccaaagtgttgggattacaggcatgagccaccgtgcccagcctataacagaatttgaataaagttctagatgaacaatgaaggagcaactaattttgcctgatgaggttcagaagatttccctgaggaagtgacaagtgtagctgggtcttgaaggataagtaggagtttgccacgtaaaaaagactagaaaggcaatttcaggtgaaaggaaacaaacctaagtgcatttcctactgaggagaggggcttaattcagtatgatggaaatcagcaagggttgagtctggaaaaataaaattgggtcaaattagggaaggccttaatgtcttgttcaggactttgacttttatcctgtagggcaggcctatcattctcacaagtgtgatccgcagaccacctgcatcagaatcacctggagtgctttattaaaaatctcacctcacactctagaccgtctgaatgagaatctctgtgcgtagaaataagtgattttaatacactcctaggtggattcttcactaagcttcactaaagtttgaaaactacacaccacagtatgggaagtcaagaattttttttaaggttttctgatccacccgcaagtggcatttgaccaggtccaggggcatgatggacatgtgtgtcagcccacagctcagcatccctcccaggcacatggcagcaggtaccagggccaagctgtaatgatacatattgatcagattttctgatcaataatttagtgcttatatcctgaactgggtgtattaaagagaataaaaaataatattccctcaaccctcgtaagttcacagttgggacagactcctgcaacaaaagacagattaacaagagaaaaacaagcaagtttattaacacatgcagtgcacataatgtgggagaaaagtaactctaagcagtagcttaagaatctggcttatatagcatgtctaacatagcatgatataatacattttagaaacgtaacaagacaaaagaaaagcagtcccaggctccttgaggtgagaaaatgtaggaaggtaaatttatggggaaactaatggagtaaagtctgctcagattcctctggcactgtctctaagctgataaaggttgtaaagaagaatttatatcccgtcttcaggcgggaaagcagggtgggtggatagaaagaccttttgtctttgtaattctctgtcctgcttttagtcagacagaaagaaggcagagaactccctacatctgcttcttaattgcctttaactaaaaaaaaaaaaaaaaattaagtcaaagaggcatattttgatgtgacaaattctggtttccttcagtattcacctgtga

SEQ ID NO: 1880158 - DNA, 4001 bp, Homo sapiens; identical to SEQ ID NO: 2020

SEQ ID NO: 1880159 - DNA, 4001 bp, Homo sapiens
aacaccaaatggtaaaggagagaaagatttccacttgggagaaccagggacacttcccggaggaggaaggacccatggtgctttttggcatggtgaggtcggggagggcttcccaggcagaggagacaagctgagcaaatgtgtggatgtgagttgctggtgtgaggggcgaggctgagcgtgtaaactggtgccatgaagaaggaccgtgatggccaggcttggcccttactccctccatgacaatttcagacagatgagcaggagagtggcagggtgcaggactggaggacaaaagaccagaggagatggaggccctgcagacagcaggggagggaaggaggatgaggtggtgtagacagcggagtcagcaggacttggtctgtccaggggtgaggagagaggtggcccaagctttccaggctgagcatagagagaccacaggaattgaagccttgggcaggggggtgcccagaatgcacctgccttctgtttcagggctccatactcaaccaaggtgcccctcagccagaactggacacattgccagagaactccaggggtcatctggtcggctcagcctcccggtttccgacagacagtaagcccaccatgactccctccatcgggaaagggaccctcaagactttgatcagacctttggactgggggtccttcccttcactgtgtctcaagtaaggcactggtctagaggaaataaggtgaagtcagatgatagcaataccactaccagtgcagtggcacatgcctgcactcccagctactacggaggctaaggtgggaggatcacttgagcccaggagtttgagaccagcatttatttatttactaacagactaaataaataaaccaacaataccaccaaccagtaaatgagaacttccatgctaaacacttcatgagcttatctggaaattgcacctctcctgatagcaatgagattggtgtgggaattccatttactcataagaagacagcctcggccgggctcagtggctcacgcctgtaatcccagtactttgggaggcgaggtgggtggatcacgaggtcaagagttcaagaccagcctggccaaaatggtgaaaccccgtctctactaaaaataaaaataattagccaggggtgatagcgggcgcctgtaatcccagctactcgggaggctgaggcagagaactgcttgaatccgggaggcggaggttacagtgagccgagatcgtgccgctgcactccagcctgggcgacagagcgagactctgtctgagaaaaaaaaaaattaaagaaaaaaacgaaaacagcctcactggccaggaactcgcccaggatcgcggccgggccagtatacagttgagctggttcaaacccgaggtctatcatgtccttaatgtcctatcatgtcagtcagttagcctgcctttcatattttccacacttacaggtcaccatagactcacctgaactgtgagaagtagaggaaggcgtcccagaggaggtgattttaaagcccaggtttgagatgggtatgcatttccaggcaagagagcccggccggtgcaaaagcaaggcttggctcacaaacgggaatgtggggggtggagacagggaagggagaagtcaatccctgggcaagacctcctggagtctctctaacaaataaatactactttccatgcagtagacgctgttctaaacactttacaaatattaactcacttggtctttctacaaccctacgaggtggtactgttactatccctagtgcaccgaagtcacccagcggccgagtgagaactccagtccagctttccacccgctactccgcgcatcccagcttgccttacagccgggtaccggctccaccattttgctagagaaggccgcggaggctcagagaggtgcgcacacttgccctgagtcacacagcgaatgccctccgcggtcccaacgcagagagaacgagccgatcggcagcctgagcgaggcagtggttagggggggccccggccccggccactcccctcaccccctccccgcagagcgccgcccaggacaggctgggccccaggccccgccccgaggtcctgcccacacacccctgacacaccggcgtcgccagccaatggccggggtcctataaacgctacggtccgcgcgctctctggcaagaggcaagaggtagcaacagcgagcgtgccggtcgctagtcgcgggtccccgagtgagcacgccagggagcaggagaccaaacgacgggggtcggagtcagagtcgcagtgggagtccccggaccggagcacgagcctgagcgggagagcgccgctcgcacgcccgtcgccacccgcgtacccggcgcagccagagccaccagcgcagcgctgccatggagcccagcagcaaggtgagtcgcgcgcccgcgggccctcccgccaggaacaaaggcgcagactcctgcccgccttacgccggccagggcctcccccgccgccccgctgcgctgtgcgcccggggcgggccgcgcgcctctccgagcctggctcggtgcgggtcccgagcgcagcgccccgccgggccgctggccgcagtggggatgggcttcggatctagcgggccggagggcgccgcgtgcgtagttggcgccggcactgagcacatggcctccttccgggggcgccgcgccgtccacgcggccctgctggggctggggacacagggcccgggagcggcacgtcgcacacgacctcggcagcagcagcccagcctcggcccctcccggtgcgggggagggggcccgagcgcggcgcccattggctgagcgggccgagcccccggcccggccccggccccggcgcgcggaggagtcaggagccgcccccgctctccgtctgctcccctagcccggacgcccctgtaggtgggcggcctggtgcgaggtgtcccaccggcctcccctactcctcccgccagtcccccgcggtgacgaggccgaggccgaggggagggcacttttctccaggcccgggctcgaacgcgggggttgagatgaacctccggtctcggaggctctcctttgcgaggagtgcaggccccaaagctttggcccagtctcgcggagatgtgttccgcggaggcaggtttaccctcggggccaggcggggagcgcaaccggaggggcgggggatctgggggccaggaaagagccccaggctgaagtctagcgggaagcgcgcacgccacggggttggggaatgagggatggggactctggggaccaacaactccctagataggatttctttttttctgtgtaagtgggcttgtcctgcagggcatctttgtagcgtccgcagagcgatttcttttcaacaaattgtttgtggagcccctcctgtgtgtagggcattgtttctttccacctcctttcctccccctagtctacaatattttcaagtcccctttttcttttgaaacggtccctctttatctattatactttgatttttccatctcgtcagctgggagggcacctggatggcccttgttttcttagctgggacgcgggggtagcactgaattttgaactgcccttcctactggctgtggaggtgtcccgctgagactgagcggggtggcgctgggccgcaccctcggcaggaaaaggccttccgccccacacctgttgaatccataaatccagacgacttggttcacccttcctgggccctcgcttgaggtgagaccccggggaagttcccggggaaggctcccaggatcttaggtgagccgtaagggtgggatataactaaacaaaagttcagtgagaagctcttctagctagtggcaaggaagtccaaatatctcagggctcttgcaggccacttaacttctgggcctcagtttttccatctgaaagagatcacttttgtcacttcctctagggaaggaactatctattcagcatactatgccagacatgggtatttatt

SEQ ID NO: 1880160 - DNA, 4001 bp, Homo sapiens; identical to SEQ ID NO: 2027

SEQ ID NO: 1880161 - DNA, 4001 bp, Homo sapiens; identical to SEQ ID NO: 2054

SEQ ID NO: 1880162 - DNA, 4001 bp, Homo sapiens; identical to SEQ ID NO: 2053

SEQ ID NO: 1880163 - DNA, 4001 bp, Homo sapiens; identical to SEQ ID NO: 2055

SEQ ID NO: 1880164 - DNA, 4001 bp, Homo sapiens
ccaaagactatacactgcattttaggggaggccctaaagcggcagagggggcaagacacagtcccaaggaagagctttttcaagagggaaacagagaatggaggacaagggaccaacagtgaggaggcacatggcctgcccagcacggaggaggctcccttccatggctggcagccggcagcttccctcaggctgacacggttgaaggtggcagcaggccgaggggcctgacttttcccctagctgagaaagctctcaggctcctgggctttgccttcctccctcagtttggccccaggtggaggacggacaggcccgagaccaggcgggcttggccacatgcttttcccatgtcccctcagaggtggctggtggagctgggcaagctggaagagaagatgaaggcgctgatgatggagaaggagcagctccagcagcagctgcagcagcacgggcctgtgtcctgcacctgctgtgtcctgtgagggccctggggagcaggcaggacggcacggcactctccacctgagacccagggatttcctgtttgagtgtaaggccaaccagtaaagcccatgcgggctgctgagaggcggacagggactccttcaacatggcacatgagcaggcacccatgtggcttcaaccctgacagacccatctgtgtagccaagaaactgctctcagccctgtccccaaatgaccttactttcagaaagaatgtgtaaaaccctgcccagagctcccctagggctaagctataagggattgtccttctccctaaaatgctcatttggcccaggctgaggtctgtgactccagttggctacacagtgccagaaaggaatctgtcatctcaggaaagcccctcaaagatggcgaggcatatttgatgactgtggttacagggcaagaggccaccctgcagcccccacccctgacttgctggaacttgtgactgtcaaagctccattaataaattacatgcacctgggacaagaatggttctttctaggacactgggtcagccggtcagatgctgcagggtcatgagtcccaggcccagcccacctctgtccaggaggcagaggacagacctgcaagggcagggagcccagcccctcagactccagtccagctctgtcttaaagaccagggaccgtggggcaaagtgctatgcctctgtgcttcagtttcttcatctataagacagtgacaatggccaggggcattttgtcaccatcgggccagtgccctgtgtctacgccagctgtggcacagagcagcacctcacactaagggtctcagttcctttccaagacccctctggtccagtaagaccgttagcttaaaacaaacaaaaaaaaccagactcctccagctgcttcctgcctctggccgtttctcctgctgtctccaccagctgagccagaggctgcaaagccagagtctgatcacactcacgccacacctgcacccatagccctccaaattcttcaagagcaaagcccaaacttgatggcctacatggttctccaccacctagcccacccaacctcaatgtcttccgccccttatgtaagccacttcagccacgcccaccaacttgtttcatttgcactcctgcctcggggcctctgcgctacatagcggcctatttcctttcctcttcaccttcaagtccatgcttaatttcccacccaccctattttaaagacaccacctcccagcactgccactcccctgctcacttccacccctggtctccatctatgaactaccacactctgtagcttatatttggtgcttcccccactgaataactgctctgggggacaggggtttgggtatggctggcatatggtagacacccaataaatacctgctggtgagacaattaaggatactcctaaatttggggtctgagccaccagaaaatcaccaaaccttgttgaacagggcatttcacaggactagtgttccacagaacacacttcagttgatcccctaaaacttgaagaccctggccacatccacagcagacacagatgagaactttggaacccccagcccctccactcaccagccaggtgacattttctgggtgatcacaactgctctgagacctggttttcccacttagcaaagagcacacaacccctgcctcggctgccattcatgctggttagggaccaatgtgatcacagacacctatatggtggcaggttaccaaactcctgctgctcaccccccgagctgccccaaggtcaccaagactgtttgaaaactacacaaatgtgttactcaagaaggaggagtggcatttctgagcaccttccacggtccaggtaccatgctaaatgctagtccaggcaccacaatcctcggaaatgtttttcgggggaaaagagcagatttctacaaaggaagggtgaagtcaggcttcagcccagctgctccagactgctaagaactgcccagatcccctggactgaagggaagttccctggactgaaggaagttactgaagggaagttacacatagctgtgcctattgttaggtcacattaagaaaggaacgaggaatgtgaccagctttcctccccatgagggagaagcctccggggacgggtcagtaaacactgggcacaggttgccctcctgtaaatccagcttcagccctatcctgtctgccacagccagcgtggcggggctgctcgagctttgcaagctctggagagccatctgggatctcttttttcagaaaccttacattatgtggccagcacttgacaagtgatcagccaaagtgatcttaaacataggggcaggaacttaattactgggaggctttttcacaccacccacacacccagccattgtgggggaccatgatgtcaacaacgggcgtgtcagaccctcagtttggggaatgtttgaaaaaaaacgggccagacgtggtggctcacgcctgtaatcccagcactttgggacgctgagatgagcagatcacggccagcctagccaacatagtgaaaccccatctctactaaaaatacaaaacaattagatgggcgtggtggcaggcacctgtaatcccagctacttgggaaggtgaggcaaacagaatcacttgaacctgcgaggtggaggtggcagtgagccaagatcacgccactgtactccagcccaggcaacagtgtgagactccatctcaaaaaaaagactattgaccaggtgcaatggctcatgcctataatccctgcactatgggaggatcgcctgaggccaggcgttcaagaccagcctggccaacacagcgagaccctgtctattaaaaaaaaaaaaaatttaattagctgggcgtggtgatgtgaacctgtagtcccagctacttggaaggctgaggtgggaggatcttatgagcccaggaggtctgcagcaagccgtgcttgtgccactgcactccagcctgggcaacagagtgagaccctgactcaaaaaaataaataaataaataaataaaatttaaaatgaagacaatctcctggtaccaccaggtgggagaagaggttagaattatgctcaatcagccacgttcaaagtaccataacaagcagttctgctggtgaagacagtctggcccactgctcactggctgtgtatatggggtacccacgtccagtgcctggcagaggaaaggaccaccttcctaaatcatgcttatccctcccctttctcagtcataaatagcaccataatagcacccatgcaccttttcatctcgctctacatgctgagaacctgtatttgaagctttatgaaaaattctggttcctattaaaaagaaagcctcatttcttagtttttaaacaaactctcaggttgtctgctgagtcaaggctgctcacctgcaggagcacccggcactgacaattcagctgactgcacacaagcaagccagcaacgtgctcagacgcttcccatctggccaatgacat

SEQ ID NO: 1880165 - DNA, 4001 bp, Homo sapiens
acagacataaatggctattaccatgattagtaagggggtaattattacaatttttattctggttgaaatctaaccaattaaaaaatctaaccaatacacgatcacactggtctttaaattaaaaaaaaaaaagaaaaatatctaaccaataaattttcggaaagaaatgtaggctatttgaggtaataggtagtaggagtgtctatccttgggcgctcatggtagaaagaaaagcagaaccccaccgcggaaatgagaataatccctcactaggtggctctctttgccgtgagtgggcggcgcgtcggggcggggcgggtgattgggggcattgtactgccgcaagcgctgcgtgtcacgccgcaccataccaggcgctggcagcatgaggggcatagtccactttctatttcgttaatgacaatctgtccttggaatttatttcaaagcaggttgtactttcgtttccgctaaacttatacctgatgtttcaactgaacattggtatagtcttattggtgcaggtctcagagaaggatcttgaaagtgcctcttcacctggcgtagaaaaagacagcaggaatcaggtagccaaaccagaccaaaccaaatcaaaatagcccattaaaatccttattttaactatcctatgagggctgcattcttggaaggttttatatagttacatatcctaaagtactttgggatagctccttaagtgactccacaatacgaaccgaaaatataacttgtaaaacgtcaatttcttcaagtcatggatgatgaattttccagctatttctcatacacttcatattattattgacttcgttctttatttcagctttttggcccgaaacctgacacaaaacacacataataaatatccaaaaagatttgttctaagaatgaaacttcttttcctagactcctttcaccagacagatgtatctagggttcgttcttcttgatcctcttttatccgatgttttcctctctaactcaacgacacagaatgacgacttttaaaacactgcagacccgtgagaagagaaaggttgcagagcagggaggaacttggaggtctgcctttaataatcaagcaggatccccactgcggggtgcctatcagagtgatggcgctagtcagccttccggcttgtccccggcttaaatgatagaaaaccacgtgttagccttctaggatgtgttcccaccctcaccctggcctcctcgcggcaggctcgcgacagctaggtcaggagggagtacgcgggtggggtggatttgggggaggggtcgactcgccagaagtcggctatccccgtcggcagggaaggcatcgcggctgtcgtgtgccgctctcctccctcagggaccccgtccaggcgggatcccgcctcccagagcccaaggcagttgtggggaaaccccttgcccttcctcgccgcttggcgctgtcgcctcgccctcccgactccagcccgccgcccgccagcctccaggccatgcatcctcttcgcaggcccagccctctccacgcccggctctgagaggaaactacggaggtggttcccgctcgcaggcgggtggaaaagcccatggtgaatgcctcggggtgtccccccagttgctgtgggaagtgggaagggaggaggaagtggacttcaccaccggggagaactatatcgattcctaacttgggggaggcctttagatggaagggaagccaacggggaaccctgggtggtttcctgggaatccattggccaaggggagggtgaccctgtccgcacacatcggttactatgacaatataaccacagcctccagttgccatggcagctgcctatccaatccgattgtcttctcttcctctccgggccccaccttatcccctccaagagtctcccagcgtgcatggggaggggctgcagcgaagaggagagggggtccttcgagtcactctctacgcgcgagggaagacaggcgttgagggactgctgggaggaactgtaggaggaaggggcggcgtttccggtggggaagagtggaggcgtgcaaaaaggaagagggaaatcggcaggagtgataagaagggggaagactttgagtgtaactcccgttcttttggcctgggtgttcccggtggtgggattgggattgcccccttgcgcgggaggagaagggtggattggcaggaagccgccaagcgccaccagccggtctctcagaagccgcacaggcgccacacagctcgttgatcccaaaagggagcgctacagagaggcggaaatcactgagggacaggcgctgctgaaatctcgcgagagggaccccctccctcgcccggtcgccgacttcctctgcttctcctctttcccccgcccctcctccctccccctcccccccgggtcggagtgtccctgcgccccacgggccagagcagcagcgagagcagctttccccactccctccccctcgcctcattcacccccacccccctgccgagcgaggaggagccggaggagaggaagatggcggcggccgccagcacccgcggtgccgcggggccgctccgaggagcctgagagacccacggaggcttcgcgggaagacgcggcggcggcggcggaggatgagcctgcagagcgcgcagtacctccggtgagtgccgaggccgggctggtacgtagggggagcgggccgcaggttggggcatggagcaacagacaccgaggtaagtccggggtggcgggggagttgctgcgtcctctcctcgccgggcaggtcggcggagactgcaaggggatctgcgggagggggcggaacgggtatgggtgcctagcccctaccgcccgggctgagctctggcgaagccggctcgtcccggtgcgaggagggaggttggggaagcgtgagaatgtgcgcgcgcgcccttggtctcgggtttgctagcgaggggtggagagaaacgtccggggaggcggcggcgaccccgagtggaggtgggtgtggaggagtctgatccccgtggcaggggactcgtggtgtggcgtgggattggttggagcgatgcatgagtagaggacggggaggaagtctgcacacctggggtgttggggcgggggaaccgcggagggcagacagggggagagggagaccgcaggaaactggagcttgttcttcattctcgggttgggagtattgaggaataatgtcatctgtagttagttggcggtgtggggaggcgtgaaggggaatagatggggaagtgaggaaagagggaggcactgtggacaaggttgggtttttcagaagaaactgggttagaatcagtgtagtcggaagataccattctgagagtcgtgtgtattcattaagagtggtgtaaggaacttgtatgtcagaggtagagtgacacatgggaatagtgtgtgtgtgtgcgagatgtgtgtctggggtggggggcgcggcgattgatgcacatttcaggatgaagatgtagataggttgaacttagtacctgatggcgagaacatattgaatggaaggacaccagcttttgtgtcagctgaaaggttccatggaagctgagtaagagcttggaggcagaggtaaagtgggtcaaaaatcttgatagagaaaagtaaggttgttagatcctgaaattaactggggagtgactactgcttagaaaaggggaagactttaaaattggtcctttttgtctttcaggagcagaactaagaaagggaggccttatggaaagatgttttttaaaaaattgtttcataccttgcggaggagggagttggatgaggtggaagtctgaaatgagtggaaaagtcactttagctgtttagtgacatgaaagtattgacgtgtgtggatccctatatgtatattgcaagaggtgtgtagttacctgatacatagggtggccattataatttttaaagtagtaaagttttattaagcataatagggagagaagagaa

SEQ ID NO: 1880166 - DNA, 4001 bp, Homo sapiens; identical to SEQ ID NO: 2075

SEQ ID NO: 1880167 - DNA, 4001 bp, Homo sapiens
accagtgttcagatccgatgggaaagggatcaggaggattaagctgatcaactttaccttaaagcacagctccagaaacaagctcacctcctcagtatcacacactgccaggaaacttgggggcaacctgcagaacaaaaagcttagcgtgaaaactaaactggccaggagcggtggctcatgcctgtaatcccagcactttggaaggggaggccgagtcgggcggatcacccgaggtcagaagttcgagacccatctagccaacatggtgaaaaccatctctactaaaaatacaagaaaattagctgggtgtgatggtgggcacctgtaatcccagctactcgggaggatgaggtaggagagtcgcttgaacccaggaggcagaggttgccatgagccgagatcatgccactgcactccagcagcctgggtgacagagcaagactccgtctcaaaaaaaaaaaaaaaaaaaaacccatctacattgaagttgacacatggaaggcttccagccctggtcctgaaacattataggaaagctgagtggcagcttgcaggtattgtactgacctgcgctgtcaaagtctttccaggttgctcttgcatgcagttggagatcccatggctatgaccagccacagcccttggaaacatgctgttctgtcccaccaggcagcccccagttagtctccaaaagaaacctaccaggtcccctgcatttcatcactgtcattaccccggaagtcctcgatcaccagaaaaatcaccttctgtcatcttaagagtcttcatctggacagcaaaatgagaacaactgtcatgaacaattttattgttcccatcatttggtcctcagaatgatacaaatctgaccagcctttggtcccaatactgatgccttaagctatcagttaagctgtgtcacatcccagctggattttcccagtacgagtcttatgctggttaactgtacatgcaaacccccaaccgttctgctgttctgtggaaacaagcccattttgataaaggtctctggctacagctgaaaggtggcaggtacaatggaactgtattttcccaaaatgttgcagatcagttacaacaaacagaacggcgaccgtcaaggaaaactgtcactctgggctcctttttgaccacagcagctatgcggaagcagctgcagcttcgataagggccaaggggcaattcagatcccagggcggccgcctaaagcctcacctgtccatcattactacctgcttaagtacgccgggatctctgtagactaagtcagtcatcctgtaggccccactgcccacgctgtgccaatagctggtgtgctttttctcagtcttgatgggaccgttttatccgcctattacaggtaagaggtttagaccgattaagttacttcctgaaggtcgcttagtcacttagcgaggctgaaagcaacaagctgggatgcacgcaagggtctgaatgcctaaaacccgtccttctgaaaaccgtgtctaccagggcgacctccagaggtctcgcgcgtagtcaccagtcccaaaatcacctagctggtaaatgtcacagattcaactggaggccatcctgacaccagcatgcggcctccccctgaattaagacacttcaggcccagggattcatccccgcatcccccaggagaccggttcccaaacccccaccccttccgtaaacccggccgcctgcctgcaacactcacctgtcagcccagagcgcagcgttgcgcagtccgaagcgagagaagggcgcggcccccgcgggctcccgcccctctcactgccgagggggcctttcggagctcgggcccaccgggttggaaggcccggctcctccgtgccacattcaccaccatctcgaggccgtgggaggaaaaacccggcgagtgcgcgccagcagcagcgactagcggggaacggcgcgcaggaaggcaggcagaggcttgcagctagtaagtcgacaccgggaatgcggcggggagaaagggcgctgaagccgcgagcaagagcttatataggccgcccctcgcggccacacccgacagtaggccgcccgcgtggcgcacagctgcctgggagttgtagtttgctcgccccggcgttgtccgcgcgtcacctccccagccctacgcgcgtgtccatcccgagcccgcgaagcgagaaccgccagaggctttcctccgagcggaagaagcgccttcacctttcagtgcccggcgctgggcccacgcaggaagccgacccgccttggcctctggagttgtctctgggatgtctttcagtctggaaatgaaccctgtgtgctgggaaagggctcgggctccgctccgagctcagtgggcgtgcgagcgagcagcgcctgagtgggtttcggggagggggtcatactccccgaaaggcgatttattcaaggcttgtctcttccactaatatgtaattttactgagcgcgtgctattttaactgtgtctgattatctgatctagttttcataaaaaccctgtgtacgctctgtggacaaataaggaaacttaggaatggatcacacagctatcgcaagcgaggagaggactggaatttggagcccaccccaggcaccacacatagcgcaatgttttgcccatggaatgaataagcctcagtatgaaaacttagtggtgattgccgagaattaaacacccatcctgtgcctaatctattaatttttattcttacatacacttttttgtttgagacagggtcttgttctgttgcccaggctggagtgcagtggcgtgatcaaggctcattgcagcctcgaccaactgggctcaagcaattcttccacctcagcctcccaggtagatgggactacaggtgcgggccaactttccttgcttacactttaaaaagtaggtactactgccgggtgcggttactcacgcctgtaatcccagcactttgggaggccaaggcgggtggatcacgaggtcaggagatcgagaccatcctggctaacacggcgaaacccggtctctactaaaaaaaaatacaaaaaaaaattagccgggcgtggtcgcgggcgcctgtagtcccagctacccgggaggctgaggcaggagaatggcgtgaacccgggaggcggagcttgcagagagccgagatcgcgtcactgcactctagcctgggcaacagaacgagactctgtctcaaaaaaataaaataaaataaaaagtaagtactactttagcaggtcgtgggggcgcatgcctgtggtcctggactcctctctttctctaacatcacatgtccaagccatcagcaactcctgtgtgctctacctttaaaatgtatcaataatctgactgtttcttaccccttccactgatgttaccctaatcgttgacccagatgatagcaatagtctcttatctcccagatcctgctgttgctcccgacagtctggtctccacacgccagccagcctgctaaaagttttttaatttttatgaagtctaagagtcaatttttttttttgtagtttatgcttttttttttttttcttgagacggagctgctctgtcgcccaggctggagtgcagtggcgccatctcagctcactgcaagctcccgctcccgggttcacgccattctcctgcctcagcctcccaagtagctgggattacaggcgcccgccaccacgcccggctaattttttgtatttttagtagagacagggtttccccatgttgggcaggatggtctcgatttcctgacctcgtgatccacccgcctcggcctcccaaagtgctgggattacaggcacgagccaccgcgcccggccgtttgtttacgctttaaaagcttaataattatgctgggcgcggtggctcccacctgtaattccagcactttgggagtccgagggggcagataacctgaggtcaggatttcaagtccagcctagccaacatggtgaaaacccgtttct

SEQ ID NO: 1880168 - DNA, 4001 bp, Homo sapiens; identical to SEQ ID NO: 1820

SEQ ID NO: 1880169 - DNA, 4001 bp, Homo sapiens
agtagagacggggtttcaccatgttgaccaggctggtctcgatctcctgacctcatgatcttcccaccttggcctcccaaagtgctgggattacaggcgtgagtcactgcgcctggtcgatagattagattagatagatagatagatagataaagatagatagatatagatataaatatatataaagacacacacacacacacacgtatattttggagacagagtcttgctctgtccccccaggatggagtgcagtggtgcagtctctgctcactgcaacctccaccttccacattccagcaattctgcctcagcctcccaagcagctgggactaccggcgtgcaccaccacacccggctaatttttgtatttttagcagagtgggggtttcaccatgctggccaggctgcttgaactcctgacatgaggtgatccgcccacctcggcctcccaaagtgctgagattactagcgttgagccaccacacccagcctcaattacctgtgaacagactgcaagattattctaaataaattttacaaaaacatcaaacaacaaaatatttctactcataaaaatatctcatccggacgcggtggctcacgcctgtaatcccagcactttgggaggctgagacgggcagatcatgaagtcaggagttcgagaccaacctggccaatatggtgaaaccctgtctctactaaaaatacaaaaattagcctggcatggtggtgtgcgcctgtaatcccagctactcaggaggctgaggcagaattgcttgaacccgggaggcggaggttgcaatgatccgagatcaccccactgcactcgagcctgggcgacagagcgagactcaaacaaacaaacaacaacaacaaaaaatctctagcattcatcaattaccatgtgtgaggaacaggactaaaactctacactataccattttacaaaaagggaaaactaaagcttgaagttacttgcctaaagttactgctgcagctaagtaattcactgtaatcattaggttgccgctaaatccagaaaaaacaattttagattgaaaatgatggagaagttattttgaaataacattcctccatttgtctaaaatgatagctcttgtttctgcaacaggacttcagggtttccaacggaagatagggttaatccattctttataactctgcatttgtaccaaagcccccagctgtcacccattttggcaactacaggacaataacccgaaggcagaatgaccaccagcatttatggaggagcatttcctatgtcagaaaacgtggaaggcaattcaaacatctcaaccttcacaagatcaacaagaggtaggtggcattacctgattttacaactacagaaattaggattcagaaaccccaaattatgccgctaacctggccctagaaattcaaggtctgaatgtaaaacagtattctattagtctgcctagtcataaatcaaattatgtctatatcccttccctcctaaaacataagaaagctggaactagatgtctgattcttagtgctagtaagatcagcgctgcagtcactgctcacacagggctactgaacacttgaaatgacttagtatagctgaattaaaccgtaaccactgttacttaagtaaacaataatcccttctttgtaccccttgggctttagtaacttacgtatcaattttaattccaaaaactaatttggctgaacaaccaagataagccaaaaaatatttcttattgcaacaaatttgctcttcaatgatgcgaatgaagattctccgaaaattcaaggtggatcacaacggttttcatgacacgattcccctctggtagacctctcttaaaagatgtcgcaggtatgaaataagactgagccacgggagaagcgcagccctttggactcccctgcaatttctatagcattcactcatatcttggaagcacttagaacgaagctaccaagagggtttaagaatgcagcaatgagccaggcggatcatctgaggtcaggagttcgagactagcctgaccaacacggtgaaaccccgtctctactaaacacaaaaaatcaccgggcgtggtgacgcccgactgtaatcccagctactggggagactgaggcaggagaagcgcttgaactcgggaggcggaggttgcagtgagccgagatcgcgccactgcactacagcctgggcgacagagcgagattccgtctcaaaaaaaagaatgcaacaatgatactgcactgagcatgcggatttagcctcagactaaaatttgcgacaaaaatgcacgactttttagttaagagtagaggtttaaaaagatgaacgacaaaaaaagagacaacctcctccccaggccacacacacccgagattgcaacagaaatcaagagtgcatttgcacggctaaagtgtctggggaaaacaaaacgggaaaaatccttcctccaaaatggaattcctacggggcactagagcccccggagcggcgcagccagcgccatcgcctattgagggccgcaccacgcggtcgccctgcgcggcccacaggctggtgggaggcaatgacccctcctgtgaagggcggcggccgaaggcagcaagcctggccaggggagagaggacccactcacgttctcgaagcctgttcttgaagttggggtcacttcgtcttttgcggtcgaagtagatgcagtacccaatgaaaagggccccgcatacaccggcggcgatggcgctgttccgacccaccatcttctctacaacgctgagcgtggacggtggcggcagggaccgcgaaggagcggtgggccacgaaccctcagagcggtcggcgcagctcacacccgacggccgcgggccaggaacacagaaaggccgagcacacgccacttccggtcccagtcaactaagggcctcgaggtcgtccgcggcagagcctgagcagaggcccagagcgcggctcctgcgcctgcgcagtgggcgaagccggcgtttcccctgcgccgctgggtgtacgcactggagtcgggaatttgcacgtgaccacggactttttttcatatccgccgaccatgctgtaacgaggcgtacgcgttactggcgtgcacgtactcagaagactagctgacagccttgtttgtggcagacagagatgcagggtcccagactgcgaatgcttcatcttgtctaacacaggcagcctgtgacttgtttgaattaaactgtactttcttttcaggttgccacaatccattgtgcgtagtggttccatttcaaaagaatgttacaggatagcctcattttatgataactggaataaaattaaatggagtaatttcttgaaaaatatacacaattgaagaaaaaatagaaaacgtgaattgttttatagccacacgaaaacatacacatgatcaggccaggcgcggtggctcacgcctgtaatctcaacactttgggaggccgaggcaggcggatcacttaaggccaggagtttgagaccagcctggccaacatagtgaaaccctgtctctactaaaaatacaaaaattagctggccatggtggccggggcctgtaatcccagctactctggaggctgaggcgggagaatcgcttgaaccaggaggcagaggttgcagtgagccaagatcgagccactgcactccagcctgagtgacagatcaggagtccgtctcaaaaaaacaaaatatatatatatatgatctaacttaagatattgacaaggaaaatcgtgggcagaaagcaggcattaaacagacactgtaagttgaggggtatcgaagtcaagcatcagtgtcaagagacattggaaccagagctaccttaccttgaataggggctgggtaaaatgaggctgagacctattggggcacattcccaggaagtttggcattcttggtcacaggatatttacagggaagggaacaagttaataatgtttacctaacagac

SEQ ID NO: 1880170 - DNA, 4001 bp, Homo sapiens
gggcacacgagggaggccaaatgtaaatgttactaagatgctaagactttctggcccggcacagtggttcatgcctgtaatcctagcactttggtaggccaaggcaggcagatcacttggggtcaggagttcaagactgccctgggcaacgtggtgaaaccctgtctctactaaaaatacaaaaattagccagacatagtggtgcgtgcttatagtcccagctactcaggaggctgaggcaggagaatcacttgaacctgggaggcaattagccaagattgtgccactgcactccagcctgggtgacagaaagaccctgtctcaaaaaaaaaaaaaaaaaaagctgtaactttgacacagacctaagtaaccttatagttctattaggttgactacttaggacaggatcccagatagttgagcactacctgcagctacacaccaagttgtgacaaagctttgggtagtcactaacttacccaactccataggtccatagtcacaaatgaggacagctttacatgtaacatgaatctaaaagaaaaaaacaccacccttaattaagaggcaaggaagctatgacagatccctcccaaatgcagtaataggtcagctattactataccaacctccagagcttcacacgcatccttcccttagcctaagattatacttcattttacaatttcagagatccaaccatctctgaaacctgtctgaaactagcccacatgccatataccagattacaacatttaggccagcttcactattacttttcctccttttacgaccaccaagaccagtgttcagatccgatgggaaagggatcaggaggattaagctgatcaactttaccttaaagcacagctccagaaacaagctcacctcctcagtatcacacactgccaggaaacttgggggcaacctgcagaacaaaaagcttagcgtgaaaactaaactggccaggagcggtggctcatgcctgtaatcccagcactttggaaggggaggccgagtcgggcggatcacccgaggtcagaagttcgagacccatctagccaacatggtgaaaaccatctctactaaaaatacaagaaaattagctgggtgtgatggtgggcacctgtaatcccagctactcgggaggatgaggtaggagagtcgcttgaacccaggaggcagaggttgccatgagccgagatcatgccactgcactccagcagcctgggtgacagagcaagactccgtctcaaaaaaaaaaaaaaaaaaaaacccatctacattgaagttgacacatggaaggcttccagccctggtcctgaaacattataggaaagctgagtggcagcttgcaggtattgtactgacctgcgctgtcaaagtctttccaggttgctcttgcatgcagttggagatcccatggctatgaccagccacagcccttggaaacatgctgttctgtcccaccaggcagcccccagttagtctccaaaagaaacctaccaggtcccctgcatttcatcactgtcattaccccggaagtcctcgatcaccagaaaaatcaccttctgtcatcttaagagtcttcatctggacagcaaaatgagaacaactgtcatgaacaattttattgttcccatcatttggtcctcagaatgatacaaatctgaccagcctttggtcccaatactgatgccttaagctatcagttaagctgtgtcacatcccagctggattttcccagtacgagtcttatgctggttaactgtacatgcaaacccccaaccgttctgctgttctgtggaaacaagcccattttgataaaggtctctggctacagctgaaaggtggcaggtacaatggaactgtattttcccaaaatgttgcagatcagttacaacaaacagaacggcgaccgtcaaggaaaactgtcactctgggctcctttttgaccacagcagctatgcggaagcagctgcagcttcgataagggccaaggggcaattcagatcccagggcggccgcctaaagcctcacctgtccatcattactacctgcttaagtacgccgggatctctgtagactaagtcagtcatcctgtaggccccactgcccacgctgtgccaatagctggtgtgctttttctcagtcttgatgggaccgttttatccgcctattacaggtaagaggtttagaccgattaagttacttcctgaaggtcgcttagtcacttagcgaggctgaaagcaacaagctgggatgcacgcaagggtctgaatgcctaaaacccgtccttctgaaaaccgtgtctaccagggcgacctccagaggtctcgcgcgtagtcaccagtcccaaaatcacctagctggtaaatgtcacagattcaactggaggccatcctgacaccagcatgcggcctccccctgaattaagacacttcaggcccagggattcatccccgcatcccccaggagaccggttcccaaacccccaccccttccgtaaacccggccgcctgcctgcaacactcacctgtcagcccagagcgcagcgttgcgcagtccgaagcgagagaagggcgcggcccccgcgggctcccgcccctctcactgccgagggggcctttcggagctcgggcccaccgggttggaaggcccggctcctccgtgccacattcaccaccatctcgaggccgtgggaggaaaaacccggcgagtgcgcgccagcagcagcgactagcggggaacggcgcgcaggaaggcaggcagaggcttgcagctagtaagtcgacaccgggaatgcggcggggagaaagggcgctgaagccgcgagcaagagcttatataggccgcccctcgcggccacacccgacagtaggccgcccgcgtggcgcacagctgcctgggagttgtagtttgctcgccccggcgttgtccgcgcgtcacctccccagccctacgcgcgtgtccatcccgagcccgcgaagcgagaaccgccagaggctttcctccgagcggaagaagcgccttcacctttcagtgcccggcgctgggcccacgcaggaagccgacccgccttggcctctggagttgtctctgggatgtctttcagtctggaaatgaaccctgtgtgctgggaaagggctcgggctccgctccgagctcagtgggcgtgcgagcgagcagcgcctgagtgggtttcggggagggggtcatactccccgaaaggcgatttattcaaggcttgtctcttccactaatatgtaattttactgagcgcgtgctattttaactgtgtctgattatctgatctagttttcataaaaaccctgtgtacgctctgtggacaaataaggaaacttaggaatggatcacacagctatcgcaagcgaggagaggactggaatttggagcccaccccaggcaccacacatagcgcaatgttttgcccatggaatgaataagcctcagtatgaaaacttagtggtgattgccgagaattaaacacccatcctgtgcctaatctattaatttttattcttacatacacttttttgtttgagacagggtcttgttctgttgcccaggctggagtgcagtggcgtgatcaaggctcattgcagcctcgaccaactgggctcaagcaattcttccacctcagcctcccaggtagatgggactacaggtgcgggccaactttccttgcttacactttaaaaagtaggtactactgccgggtgcggttactcacgcctgtaatcccagcactttgggaggccaaggcgggtggatcacgaggtcaggagatcgagaccatcctggctaacacggcgaaacccggtctctactaaaaaaaaatacaaaaaaaaattagccgggcgtggtcgcgggcgcctgtagtcccagctacccgggaggctgaggcaggagaatggcgtgaacccgggaggcggagcttgcagagagccgagatcgcgtcactgcactctagcctgggc

SEQ ID NO: 1880171 - DNA, 4001 bp, Homo sapiens
gaaaggtacagtaaaaatatagcattataatcttatgggatcaccatttttctttctcttggaatcacatttctctctctctctctctctctcaacatttctctctctttttgatgaggcctcactctgttgcctaggctggagtgtagtgacatgatcagaggtcattgtaaccttgaactcctaggcttattgtaaccttgaactcctaggcttaaatgatcctcctgcctcagcctcccaagtagctgggactacgggtgtatgccaccacatctggctaattttaattttttactttttgtagaaacgaggtcttgctctgttgcccaggctggtcttaaagtcctggcttcaaccaatcctcctaccttggcctcccaaagtgctgggattacagacatgagcaaccatgcccagttccatttttattttttaagagacagtccagacttgcattgtcggccaggctggggtgcactggtgtgatcacagttcactgcaaccccctaggctcaagagatccccctaccccagcctcccaagtagctgggattacagtcctgagccaccacgcctgtctgggactgacattttatatgtagcctgttatttttatttatttatttatttttgagacagagtctcgctctgtcacccaggctggagtgcagtggcacgatctcggctcactgcaacctctgcctcccgggttcatgctattctcctgcctcagcctcctgagtagctgggactacaggcgcccgccaccaggctcagctaattttttgtatttttagtagagacggggtttcactgtgttagccaggatggtctcgatctcctgacctcgtgatctacccgcctcggcctctcaaagtgctaggattacaggcttgagccacagcgcccggcccgtagcctgttattaaacgaaatgtcattatgcagcacatgactgtaaataagtgaggtggttcaatattgtgcagagatatttttcctgtacttaatttataagtaaatttaatataatttcaatcaaatgccaattgaattattttttggaactagaaacatttattctaaaatccataaatataagcaaataagaattgtttttttggtggggggagttaatggaacagaacctgtattatggatatcagcaactaaaacaagattatattggcaaagaaatggagagaaaagatatatatgagtatctagatatactcatgtatatatggattttaatatatgacaaaggtggcctttcagttccatgggaaacagtggtggtactgggacaggtagctcactatttagaaaggaaaaatgtagcaggctcctttggttggcagacttctatgatgatctcatgagcttgttaactgtcctcacacccttgtgtaatcccctctccttaagtgtgagctgtcctagtgacttgcttctaacgaacagactgtggcaaaagtgaaagaatgtcacttcatgagtaagatacaaaagattgtgacttctgtcttactagtagactcgctgtcttggctttgatgaagtaaggtgccatgctggagaagcctgggtgacaaggatctgagggtgggctctggccaacagccagccaggaactgaggctctcagtccaacataacttgacaaactgaattctgccaacatacatgtgaacttagaagcagatccttccccatctgacactttatatgagactcaacttctggccaacactccaactgcagctttgtaagagaccctgagcagagggcccacctaagccatgaccagattctggattcacagcaactaaggcaacaaatgcttgtcatttttcctcccaatggaatggtattttcccaaaatcttgcagatcagttacagcaaacagaactatgaccatcaaggaaaactgtcactcttggcttctttttgaccacagcagctacatggaagcagctgcagctttgataaaggccataaatgcttgctattttaagccaataaattttgtgatcatttgatatgcgtaattgaaaatgaatgcaggccaggcatggtggctcaggcctttaatcccagcactttgggaggccaaggcaggcttgggcccaagagatcaataccagcctgggcatcatggtgaaaccccatctcatctttaccaaaaatacaaaaaaattagctgggcatggtggtgcatgcctgtagtcccagctacttgggaggctaaggcaggaggatcacctgagcctgggaggtcagggctgccgtcagccacaatcgtactactgcactccatcctgggtgatgtggtgagatcctgtctgaaaaaaaaaaaaacccaaaacacaaacaaacaaacccaaatgtagttccttaccctcatcatacacaaatttcaatgtcgggcagtattgaataacgaacactgggttgactagtggcccccaaaaagatgtcaatgtgggccaggtgcagtggcttacaactgtaatcctagcactttggaaggccaaggaaggcacactgcctgatcttaggagtttgagaccagcctgggcaacatgatgaaactccatctctactaaaaatacaaaaaaaaacctagccgggcgtggtatcgggcgcctgttatctcagctactcaggaggctaaggaacaagaattgcgtgaacccaggaggtggaggttgcagtgagccgagatggtgccactgactgcactccagcctgggcaacagagtgagtctctgtctcaaaaaaataaataaaatataaaataaaataaaaataaaataataaaataaaatataaaataaaataaaaaagaaaaataaaaaaattattttggggctcaagttagattttcttggaataagaacggtgttttgttttgttttgcttgttttataaaaatgcagctttgagtggaaggaaaggtttacactgccaaaaaaataaaagttttgaaagtcatgccgactcttcatttttttcctctttacatggaaacttagctgtaatgaatatttagttaattcttccactctgcacttttttctttttagacggagtctcactctgttgcccaggctggagtgcagtgctgtgatctcggctcactgcaacctctgccctcctgggttcaagccattctcctgcctcaagcaattctgcctcagtctcccaagtagctgggattacaggtgcccgccatcacgcccggctaatttttgtatttttagtagggatggggtttcatcatgttggccaggctggtcttgaactcctgatctcaggtgatctgcctgcctcagcctcccaaagtgctgggattacaggcttgagtaataaactaacaaaagctctgagctacttataatttgtagaaagctttgataggaatgcctgctttccagaaaattagtattaaggcttaaacccaagtaatatggccgtaattttggtgctggaatggcctatgttagaaattgcaagatctctatatcgagagatctttatgagttggaaaatattttcctttcttaacctgggtatttatcttactctctctcctcatcctgctcctattttcattaacccaactcagccaaaccagataaaagctgaataactggccatcatccctctccctaatcgtcaaggttttttgtttttttgtttttttttttgtgtcatctcggctcactgtaacctccgcctccagggttcaagtgattcttgtgcctcggcctccctagtagctgagattacaggcacacgccaccatgcccagctaattttttttttttttttttaagtagaaatggggtttcaccatgttgatcaggctgatcttgaactcctgacctgaggtgatccgcctgcctcggcctcccaaagtgctgggattacaggcatgaaccaccatgcccagcctctatcttccattctttaaaaataaatcacctgtcttc

SEQ ID NO: 1880172 - DNA, 4001 bp, Homo sapiens
tgctgagacatgctacttactgtaattacatttccttggctgtgcattcttttttttctggagttattattaccttgtcatttagaattttccctgagcgtctgaggccttcccacactttgaaagacatcaaagtccctctcaatataagtttccataaagtcaaactcattggataattttctaggcctagtagagtgactaatgaaggcctctttgacaatgtgatatataaggagacctgagtgaagagagggagaaagccatgtgactagctaaagttttccaggcagagggagcagtaattctaaatgctctagagtaggaatatgcttgctgtgtctgaggaacacaaaggagatctacatgatgaaacacaatgaacagggaggggaaccctacaggagacagtgtcagaggtaccataagccagataaagttgggccttgtatgtcacggtaaggagcaaccagaagaagaaagatgatgtagaaaaaaaaaggaggagcaagtttgacaggaggaaattactcgattttggatatgttaagtttgacatctaggtagaaattattcagtagggagctggagaaatgagtatgaggcttcagcaagaggtcaggactccataaaaatggagatactgggaatctatttcttatgctccttgtttgtgattttagacagcagggggtgaaaatatttattcttaagactatattaatttggctttcatcctcaccattctactgtaactttcatatcaaaagtcagtaagtaaataactccatgttgtcaaatccaatggaccttcttcttttcttgaactctacgaaacattccacagtaaaccactccctctcaaatttatatgtacattcccagcttcctccctgaacttctgactctcatgtccaattcgtatacttgatacctctacttgaatgtttaactgtgtcagaagttaacctgtaaaaacgtaactctttatttgactaccttaaatctcttcctctcctcctccttattctcatttcagtaaacagtctcatcatccagcccgttgctcaaacttaaaaattaagaaacccttaattctttccttcctcttgtttctcaaaaccatccctgagcaagtacaaaaggtatctcaaatctgtctacttccttccaactccactgcctccaccataaagccatcattctctcttgggtgaattattgcaataactggtctccttgctttcttctacaagcatctctctacccagcaaacagggagatatgtttaaatgtaatcccctacttagaatccatcagtgacatccactgcatttagaataaaatcggatctccttatccctacgtgatctaaccccagtctgcatctccaacctaaccttgtcctgttttcccctcactctttacagtcaagtcacaccaaccccctttctgtttcttgaacactctgaggtcttcaaggctcccaggcctatatccctgatgctcctctacctagaatgctcttcctacacctctttccatagctggctccttctcatccttcaagtctcagtctgaatgtcatgtccttggagaggcctttcctcactagtctacctaaagcaccctcttcctttactctctaccataacctacttattttcttcatgatgcccactaagagtttgatattcatttagtttattgtttgtctccccatcaccaaaacgtaagctttatcagggtggggtcctatcttgtatttctagcacaaatattaataggtactcatttatttgttgaataaattaaccagacctctacataaagatgtacatacaataacgtttattgtaccttttttcattttgtaggctggggataaatgaatagaataatagtttctatccaatcattttccctagccagtttcaatgttccaaagtttaattaacagagcagggaagctaccctgaactgaacttaacactttggaattttgcagcatttttatgctagcaaaaaagtagacacactgaaatgtttaccaataggtttttattacagagtattccatgtaagagctatgcagtaaatagaaagatggcctgtgtgtcagatatccttagcctctttagagtcactctccttcctcttctccttgctctttctctcccagtgtccagtttgcatagaatgagtagaacttgaccaagtgaacaaacacagaggaggcattctagcccacatgcacatagatctagggataaaagtgtatggtgtgctggagaaacaataagtgtgtcctcctctgctcccactacagctggtccccttgtctgttacaattactatgttgtagtattgtagccattctcatgtgtttcttctaaccaggctcctagactcacactttcagacaacagagaagcatgtctttacatctctataccctcagtacctaacacagtaagctctcttatagtggctgcaagaagaaatctgcttttatctatattttactagtttaaaggttacttttttttttaagcgatggggtctcgctatattgcccaggttggtcttgaactcttgggctcaagagatcctcctacctcagccttctgagtagctgagattacaggtgcaagccaccacacttgaccaaggttacatttttaagactgatttatatggtcattatatagaccaaatttgtctgtagaaaaattagtcaaacagtgagtgacttaaaactgtacaatactgtggctgagggcataattaaatctttattaaaactgctaccatttctttttgtttttgttttgctttcttgagacagagtctcgctctgtcacccaggctggagtgcagtggcgtgatcttggctcactgcaacctccacctcccgggttcaggcaattctcctgcctcagcctcctaagtagctgggaatacaggtgtgcaccaccacacctggctaatttttgtatttttagtagagacggggtttcactatgtgggtcgggctaatcttgaacttctggcctcatgtgatccacccacctcggcctcccaaagtgctgggattacaggtgttagccatcatgcccagttttaaagatatatgcctatgatgatctgaatctgaactaacttccagatgtctcactaaaggcaatgcattttttcacataagaataaattttggccgggtgcagtggctcacgcctgtaatctcagcactttgggaggctgaggcgggtgaggtcaggagttcaagaccaacccagccaacatgatgaaatcccgtctctattaaaaatacaaaaatcagccaggcggggtggcgcatgcttgtaatctcagctacttgggaggctgaggtgggaggatcacttgatcctggaaggtggaggttgcagtgagctgagatcatgccactgcactcctgcctgggtgacagagcaaagctccatcttaaaaaataataataataaataaagaataaatgcccatttctaataaatgagatacttcaataaaaagtgtaagaagtaaattccaagagaatttgaattagtaatacttaccaacactagcatgatcaataatagtgtcaatatcttgtagaccccatttcttataagctaatggtggtggttgtatgttctcattgcctgatgctgcagctaccaaagataaaataagacaatccaaacttattatggataaaatgaagttttacaaaaaaacattaaaaccatactaatttgttattctaaaatttcagctaataatgacacaaagtaatgaaaacaaggcataaggtgagatttattcacaccaagacaatgcacgtaaaatgcaaacatttaaaagactaagttggctgtcacaaaagattctggaacactccagtaattaaagaagactattaaaaatcctagactactactaaaaatcaaagggaattcaggccgggcatggtggct

SEQ ID NO: 1880173 - DNA, 4001 bp, Homo sapiens
ctacaaaaaaatacaaacacaaatatacttttattagtctttttattcttcttttattgatcacctctgaagttcagtagcacactgcataattttttgcattagcatgctgttgtttctacctaaaatgaccggggtccttgccttctgcttcccatagagattgtcctgcaaaggaagtgtaagccattgtgttactaattcccagatttcccccacccagacattttcctaggagctggtctcagtcccatatccgcatttctcatccatggatgtccactcaaattaggtttcatcctggaccagtcattctaaatacagtgtgtgctacatggaaccccttgtttctaccccactctcaactctccctaatgctgagagacgtcccaccaaagaatgcatcatgagctccagccaccactgaacatttgtggctaccaggccttgtggcccacggtgccctctgatgccttcaatgcattttagggtgggtaaatcatgttctaaccatctttgccctctggtaatgaatagctaagggcacacgagggaggccaaatgtaaatgttactaagatgctaagactttctggcccggcacagtggttcatgcctgtaatcctagcactttggtaggccaaggcaggcagatcacttggggtcaggagttcaagactgccctgggcaacgtggtgaaaccctgtctctactaaaaatacaaaaattagccagacatagtggtgcgtgcttatagtcccagctactcaggaggctgaggcaggagaatcacttgaacctgggaggcaattagccaagattgtgccactgcactccagcctgggtgacagaaagaccctgtctcaaaaaaaaaaaaaaaaaaagctgtaactttgacacagacctaagtaaccttatagttctattaggttgactacttaggacaggatcccagatagttgagcactacctgcagctacacaccaagttgtgacaaagctttgggtagtcactaacttacccaactccataggtccatagtcacaaatgaggacagctttacatgtaacatgaatctaaaagaaaaaaacaccacccttaattaagaggcaaggaagctatgacagatccctcccaaatgcagtaataggtcagctattactataccaacctccagagcttcacacgcatccttcccttagcctaagattatacttcattttacaatttcagagatccaaccatctctgaaacctgtctgaaactagcccacatgccatataccagattacaacatttaggccagcttcactattacttttcctccttttacgaccaccaagaccagtgttcagatccgatgggaaagggatcaggaggattaagctgatcaactttaccttaaagcacagctccagaaacaagctcacctcctcagtatcacacactgccaggaaacttgggggcaacctgcagaacaaaaagcttagcgtgaaaactaaactggccaggagcggtggctcatgcctgtaatcccagcactttggaaggggaggccgagtcgggcggatcacccgaggtcagaagttcgagacccatctagccaacatggtgaaaaccatctctactaaaaatacaagaaaattagctgggtgtgatggtgggcacctgtaatcccagctactcgggaggatgaggtaggagagtcgcttgaacccaggaggcagaggttgccatgagccgagatcatgccactgcactccagcagcctgggtgacagagcaagactccgtctcaaaaaaaaaaaaaaaaaaaaacccatctacattgaagttgacacatggaaggcttccagccctggtcctgaaacattataggaaagctgagtggcagcttgcaggtattgtactgacctgcgctgtcaaagtctttccaggttgctcttgcatgcagttggagatcccatggctatgaccagccacagcccttggaaacatgctgttctgtcccaccaggcagcccccagttagtctccaaaagaaacctaccaggtcccctgcatttcatcactgtcattaccccggaagtcctcgatcaccagaaaaatcaccttctgtcatcttaagagtcttcatctggacagcaaaatgagaacaactgtcatgaacaattttattgttcccatcatttggtcctcagaatgatacaaatctgaccagcctttggtcccaatactgatgccttaagctatcagttaagctgtgtcacatcccagctggattttcccagtacgagtcttatgctggttaactgtacatgcaaacccccaaccgttctgctgttctgtggaaacaagcccattttgataaaggtctctggctacagctgaaaggtggcaggtacaatggaactgtattttcccaaaatgttgcagatcagttacaacaaacagaacggcgaccgtcaaggaaaactgtcactctgggctcctttttgaccacagcagctatgcggaagcagctgcagcttcgataagggccaaggggcaattcagatcccagggcggccgcctaaagcctcacctgtccatcattactacctgcttaagtacgccgggatctctgtagactaagtcagtcatcctgtaggccccactgcccacgctgtgccaatagctggtgtgctttttctcagtcttgatgggaccgttttatccgcctattacaggtaagaggtttagaccgattaagttacttcctgaaggtcgcttagtcacttagcgaggctgaaagcaacaagctgggatgcacgcaagggtctgaatgcctaaaacccgtccttctgaaaaccgtgtctaccagggcgacctccagaggtctcgcgcgtagtcaccagtcccaaaatcacctagctggtaaatgtcacagattcaactggaggccatcctgacaccagcatgcggcctccccctgaattaagacacttcaggcccagggattcatccccgcatcccccaggagaccggttcccaaacccccaccccttccgtaaacccggccgcctgcctgcaacactcacctgtcagcccagagcgcagcgttgcgcagtccgaagcgagagaagggcgcggcccccgcgggctcccgcccctctcactgccgagggggcctttcggagctcgggcccaccgggttggaaggcccggctcctccgtgccacattcaccaccatctcgaggccgtgggaggaaaaacccggcgagtgcgcgccagcagcagcgactagcggggaacggcgcgcaggaaggcaggcagaggcttgcagctagtaagtcgacaccgggaatgcggcggggagaaagggcgctgaagccgcgagcaagagcttatataggccgcccctcgcggccacacccgacagtaggccgcccgcgtggcgcacagctgcctgggagttgtagtttgctcgccccggcgttgtccgcgcgtcacctccccagccctacgcgcgtgtccatcccgagcccgcgaagcgagaaccgccagaggctttcctccgagcggaagaagcgccttcacctttcagtgcccggcgctgggcccacgcaggaagccgacccgccttggcctctggagttgtctctgggatgtctttcagtctggaaatgaaccctgtgtgctgggaaagggctcgggctccgctccgagctcagtgggcgtgcgagcgagcagcgcctgagtgggtttcggggagggggtcatactccccgaaaggcgatttattcaaggcttgtctcttccactaatatgtaattttactgagcgcgtgctattttaactgtgtctgattatctgatctagttttcataaaaaccctgtgtacgctctgtggacaaataaggaaacttaggaatggatcacacagctatcgcaagcgaggagaggactggaatttggagcccaccccaggcaccacacatagcgcaatgttttgcccatggaa

SEQ ID NO: 1880174 - DNA, 4001 bp, Homo sapiens
gagcaatgtagtgagacctcatctcaaaaaaacaaagggccaggcgcagtggctcatgcctgtaatcccagcactttgggaggccgaggtgggtggatcacgaggtcaggaattcaagaccatcctgaccaacatggtgcaaccccgtctctactaaaaatacaaaaatcagctgggcgtggtggcacacacctgtaatcctagctactcaggaggctgaggcaggagaaccgcttcaacccgggagacagagattgcagtgagccgagatcgcgccactgcactccagcctgggcgacagagcgagactccatctccaaaacaaaacaaaacaaaacaaaacaaaacaaaacaaaaacaccaaccaaccaaaccaacaaaaaaaacaaaacaaacctacaaataggaaaaaaaaggatgtccctgggtggggagggaactattcagaagaaccagaaagcctgggttctgctgcagtcactgagtctaggtcagggttctggcacaggatttaccccagaccaactaagtcacaacctctaaggtatctaggtgttttctttgagtccccaggtgatgctaaagttctgaaacactatgatatggctaataataaaaccaggaactcaaagatgtttcctgatacctggtggatagctactccgggtaaccacaaaacatcttgagagtagtactgagcaatttattttcatatctcatatgcttcaagacctcggtggacaaactctaacaagctcttaccaacgtcaggataacacttttggaataccacgtgtggacaggagtcctaaaatgttcaggtaaccaatgactgccaccattaattcaatgagatgaccagctcagagataggcagcctagattctagtctcacttgccttcctgaggctcaatttccaagaaatactccaaacagctacaaaaccacaggtctactggttcaggcagtcttttcccacattaagttcatcattcacaaatggcattcttcctaatagacaaggttattcactgtcttctctggtgtgactgtcattgttttatgtcttagttaatggcccagagagcctcctgaagtggaggatagggaagtaaagaagtgcatcactccataactctctaccaatgagatgggccagtaaggtatgtgaataaaaatgccacaccatcataatgaaaatggggacaattcaaggtatggctcttctgctctcttaacaaatgccaacttgactactaggcagataagcaaggatagaagatcactccttacactgatgagggccagtcaaggggggggtcatagcaaaaacgaaagggtaagaactgggcaaacccacagttggcctctggccaactccctactacaactgataacattgctttccacattcccaggttgggagcaaagtccactaagagccagggcagggccactaagcccttaccagcccacgtggcttcccttctcatcaactaaaggattttgtggcatctggtacacctgtttagcaagaccggcgtctgcatccggccataactcaaaatgttcagatggcaccagtttccatcctgctcccaaagtgccaaggacaagcagtacaccatccccatgtagtcagcattctcttgttcaaggactaaaattccttatctttaaaatgaggttcctacttaccctgctaacttagttgatatgattatcaaagaaaatcaagcaaatgatgcacactacgaaacatagaaaaaccttccactcccctttcctctctttttaagaccagggtagaagttcccaagcccacctccaaaatcttcaaaataccttcattctcaaggagaaaatgtggcagagctgtagagacaggccccaagacaaatggaaaacaacctgtctggatttcctctgctcattctgtagcaccatctgtccccacaccggcacgaggcagcaaggaatgggaaagattcaggtgctctgagttggcaaggaggggctgggtcaaattcctctccagactccagtgcttgggaaacagtgtaatgttaacctaatgaaatgtcattctccagaatgcatccagaaattttgctagaaaaacgtagtagctactttcagaaatgaacataatttaaatgctattccttcaatgggacaaatgccaataagcctataatggaataccactgctttcaatccccagatcgcagtataataccttagcactggtaattgatccaaaaggagaaaattctttccttaatttctcatcatcaatagtgtcatccaagttcttaatgtagagattcaccccctgaaggaaaaagatcactgttaactacacttctatatcacaaatattccctaagaaagtggttccccaagggtggccccagaccaggagcaccagcatctttgggaacttgttagaaatgaaattctcggccggacgcggtggctcacgcctgtaatcccagcactttgggaggccgaggcgggcgaatcacaaggtcaggagatcgagaccatcctggctaacacagtgaaaccccgtctctactaaaaatacaaaaaattagccaggcatggtggcgggtgcctgtagtcccagctactcaggaggctaaggcaggagaatggtgcgaacccgggaggcggagtttgcagtgagccgagattgtgccactgcactccaacctgggcgacagagcgagactgtctcaagaaaaaaaaaaaaaaaagaaagaaatgaaattcttaggccagaccccaaacccaatgaataagaaaaactctggggctggagcccagctatctgttttaacaagctctgctgatgaatctgatgcaagtccaaagttgtgaaactactgccctgaaactgacaggatcatcagtgcactcaccttttgtcacctctccccacagctgttctggtgaccactcacccaccccagcaggggtcttcttgaagccatgccaaacaaaggagtctcatttaagtaaaaggaacctacatggctaaaagcaacaggctgaggcttccaaaatagagagcttcttgatgaataaacccatctcttgtttctggttctataataatcagtcatatgtagtaggtatatatccttttaaacctcatctttttaggtaaaatgggaagaagaacacactccaagtcctcaaaaagaaagcccgctaaacataggggtgttctgcaaatatttcacagcaaatcccattgctaggctgggccaagaccaccttacctgatatcgactaattctctcctgtttcaactgttcaaatttccgttttaactctgcctgccgttctactttcttttgtgcacggcctacaaatatgattttaccacttatttcttttccattcatctcttccacagcctagagaggaaaaatatgtctttaaaataaagttgcagcgatggggtcttattctggaggtctaagtcccaaaaaatattctttctactataggactaaaaactaaattcactccacctctgaagtctgtcacacaaatccaaacttcctcatctgtaaagtgaggttaatatttaaatgggttattgatccagataatatagaaatagtacaggtgtataaacacaagtgtgctgacatgagcctagggcgatataatattccggctgccagtaaattctgcaggtgcttttgtgggtatttaagtgataaatattgagggtctggcacaatgctttgcccacaagtagctgccgtgctgttatcaaatcagcactcactgggctttagttctctcacctttgcagcataacaaacgtctgtcctattctttcaacaactgatagctgaggtgacaggtatgtgccaagtgctttgtaaacacctacatgaagttaacatgcggaacccaggaagatgatcccagagtatagtaatggtacatctactaccagatactcagaccgtcccag

SEQ ID NO: 1880175 - DNA, 4001 bp, Homo sapiens
acctttaaaaattatttcccataatctaaaataactccctgcctcacaaattaatacgatttccatttgtacttttcctcatgaggatttactttccctcattccttgacaacttccccaaacccgactccggttctgcctccatcgtcagctgagagctgggcctctttcctcctggtgggtctgcgctgtgtcgggagcgcccatctcagcagcggggcttcaggagtccagctccagctgctctcggttttcgctgagtcttaacataagctgctgttcatagtagaggctctttgcgtagtttatttcttgtgacaacttgacagcaaggacctcagatttcacatggacctaaggaggagaacaggatgggtcacctgtccccaggatggggaaatccaggaatcagatccacccaggtggcggctcccagcccagctgcatctcaggatgggatgtacacgtcaaagaaacagtgatggccagggctgctcctgcttcactcgcactcacaagtctggggtgggtccctgcaattttttttttttttttgagacggagtctctgtcgcctaggcgcaatcttggttcactgcaacctccgcctcccgggttcaagcgattctcctgcctcagcctcccgagtagctgggactacaggcatgtgcacagctaacgatttttttttttttttttttttttaagtagagatggggtttcaccgtgttagccaggatggtctcgaactcctgacctcgtgatccgcccgcctcggcctcccaaagtgctgggattacaggcatgagccactgcgcccagccggtctttttaaacattccccaggactgtacagccaacccatactcacctgacatttgggaactcccccccacggccataactgatctgcagaggtaagaccaagagcaagaatgggggattcacatctaaggtctggtgatggctgatgaaggaagaagaatcagcgaacaaaagcctctaggtctttcttaccacaaacacctctctgcccacctgctttgaaaggggcagaagtatagtgggcgaggctgcccacctgctacagtgaagggatctggagaaatactcacactttgaggtgctcgccctcttcatcagccagctctaacttaagccaatgaccccacgggagccttacacaagtccaaacaggcccaaatgcattcatgagcagggggaggccaaaggactccggaggagagaggcccaataaggctggcgctatttccgatccatagagagagcagaggtgggcaggcccttttgattaatgtatcattcttgaatgcaagcttcaaaatccgggtatgccgggtgagaatgagcaggactaacacctgggtgtcatggcaagcctccagggccgactggccagagacagatccgcaagaggctctgcagccagctctggtgccaagccactcggatttgaaccccggctcctcaaggtcagctgtgtagccttgaatgaatcacctgctatgaccaatagtgaggaggggatgacagcaacacagtgatcagacaacccacaagacagccagccctctaggaacgttagctattcgcaggagctttattatttaaaagccttgtcataacaataccttgtcccctttggagggaaagtataacttttatttacaaataattattgagcatgctagatgctactagaacaaaagttacggtttccactgttaaggagaaacaatggagaaaccagcgtgagctccagtgctttcttcgatttggtgcactgaagaatcccattttgggagcagaaaaaccctgtgtgttgtgttagctgttccttatcaccaacgagagtaagtattgttaccctcactacatctacgggtaactgaggcacaaacgttgtgaggcagttaatgttcccagggtcacccatgggccagctgggagggcagcatcgccccgtgaacataccctgggcccctcccatgttcaggactgagaggcagcactcctgggaagggcccagcctcaacctcctaaatgagctcctgctgaggacggggaagcagggcagaggcatcgaggccctggccccgcccctcaggagcctgagaacagccaggcactcaccatgggcttctggtgggaggggccggggatggacactccactgctcgtgctcacggctttcttggtcacctgcacatacaccttcccatggtctttggagacaaggcagtggtagaggtcatcgtatttgacttctaggaaaatggcttctcgatccacgtagtctccacttttcaggaagtaaacagctttggaggagatgagcacgcagtagctgtcaatgttctccacagcgatgaagctgcaaagcgagacgggaacacaggagtgacacctggggcttcgcccagcatcagggggaggcccactgcgggctctgtggccccagggcctgagtgcgaatcccggcccccttgccgggaaatacttctaaatcctgaaattctatcttgtgggtgtttgttgtttttctgtgagcatttttggatagcttaaagcttacagaaaactgtaacaatactctattggacaaaacagaaaacacgatgcctttcaatgtgaaactgaaggagcagctgagaaagttcactgcctggcagaggagagggaaacatgaaggggcgagaagacgcagctgggggcgctgaaagctgaggggggaaaagcagaattaaacaggttcaccaaatggcacgccatgaagagacagcctggcgttaaaacacctgcacctccccatccgcttcctccctctctaagctcagcacctccagggacagggcacccccccatccacttcatgttcagaaaactcaaagagtcagaaaacgctttcttaggtaaaactgtcatcttccttttggaaacttctagttgttacttcaggagctttagggccactccaacaaaactgaattcctctatcatggagctcacacattcaaagtggaaatttatgcacatcaaacctctctggccactgaatgaagagcagtgaaccttgggaacagtgtgacagttctcccgggcctggctgcctcccctgcatcttgtgacagcccttcacaatggggctgcagtgtccagggacagcagacaaggatggacagtggcaggaatactaaaggctgacgacggagtggcagtcgagctcctgctggcaaactgaattgctcagagccaggctccacctggaagtgttctgaaacctgggtccagaacggcgttgttcccaggtcctctgaagggggcagaagcctgggggcaggaggtggcctgcctgtcgaggggagcaggctgccgggccctcgctcacttggggtccgtgcaggacgcacacctgctctcccaacttctctagatcccatccccctccccgcaaggatcacaggttctaacttctctgtgaagcatcccccacatactccagcccctcctccacttttgagcatttaattgtgatggcccccaaagcatggccaagcacaaactcattctttccacatgtcctggataagtctctttgctgactacgaggtgagccctctaagtggagtccatatctcacagccccgtgtcttcctgagcaccccacagagttggccaccccatcagcgctcagtaagtgactgccttgttccagttgccattttaattacagacgcccatgacaaaaactgggatttattgttctattctaactggttggcaatgccaagaatgtggacttgtaaagtctcaatgctgaaattagaaagacccgcagccttcagtgtttaggccactcagcacagacgttctcacatcttgcgctctaaccgcattgagagcggcagcatcactgaacagagttgaatggaatctgaaatagctggtccggggaagaaaggagggcacagggaaagacag

SEQ ID NO: 1880176 - DNA, 4001 bp, Homo sapiens; identical to SEQ ID NO: 1880175

SEQ ID NO: 1880177 - DNA, 4001 bp, Homo sapiens
gtttgggattatccaaaactgggatgagcagcttgggataattcacacactaaagcctgagttcaaggtttctcagttgacaggtaggtatgtaaatcagggttctctggagtatttgtaggacctgccatatttgagtcctaacttggtgcaagtctggcagctaggtagaaaaggcactctagcaggtgtggtaggagcacgccccagaaggtagaatgtggtggggtgtgatggaacaggccagttggcctaagaattagtacttgctctaataatgggtttcatctattttcatgagttgcagcatctgcatatacaaggcctggatcactttaggatcaatattttgacacgggagaaggcagctcagaaaggattaaggaagatagctcaaagccaaagcagaccctccgtgtgaactttatactgctcacttccgtgtttcccaagtaaatggggaaactgtccaaccttgtcatgtgttgggacttactgcttgaggcaaagcattcatcctacatcataaaaaatctccaaagatctctttaagggctgggcatggtggctcactttgggagatggattgcttgagctcgggaagagaccagttcggtctctacaaaaaaatacaaacacaaatatacttttattagtctttttattcttcttttattgatcacctctgaagttcagtagcacactgcataattttttgcattagcatgctgttgtttctacctaaaatgaccggggtccttgccttctgcttcccatagagattgtcctgcaaaggaagtgtaagccattgtgttactaattcccagatttcccccacccagacattttcctaggagctggtctcagtcccatatccgcatttctcatccatggatgtccactcaaattaggtttcatcctggaccagtcattctaaatacagtgtgtgctacatggaaccccttgtttctaccccactctcaactctccctaatgctgagagacgtcccaccaaagaatgcatcatgagctccagccaccactgaacatttgtggctaccaggccttgtggcccacggtgccctctgatgccttcaatgcattttagggtgggtaaatcatgttctaaccatctttgccctctggtaatgaatagctaagggcacacgagggaggccaaatgtaaatgttactaagatgctaagactttctggcccggcacagtggttcatgcctgtaatcctagcactttggtaggccaaggcaggcagatcacttggggtcaggagttcaagactgccctgggcaacgtggtgaaaccctgtctctactaaaaatacaaaaattagccagacatagtggtgcgtgcttatagtcccagctactcaggaggctgaggcaggagaatcacttgaacctgggaggcaattagccaagattgtgccactgcactccagcctgggtgacagaaagaccctgtctcaaaaaaaaaaaaaaaaaaagctgtaactttgacacagacctaagtaaccttatagttctattaggttgactacttaggacaggatcccagatagttgagcactacctgcagctacacaccaagttgtgacaaagctttgggtagtcactaacttacccaactccataggtccatagtcacaaatgaggacagctttacatgtaacatgaatctaaaagaaaaaaacaccacccttaattaagaggcaaggaagctatgacagatccctcccaaatgcagtaataggtcagctattactataccaacctccagagcttcacacgcatccttcccttagcctaagattatacttcattttacaatttcagagatccaaccatctctgaaacctgtctgaaactagcccacatgccatataccagattacaacatttaggccagcttcactattacttttcctccttttacgaccaccaagaccagtgttcagatccgatgggaaagggatcaggaggattaagctgatcaactttaccttaaagcacagctccagaaacaagctcacctcctcagtatcacacactgccaggaaacttgggggcaacctgcagaacaaaaagcttagcgtgaaaactaaactggccaggagcggtggctcatgcctgtaatcccagcactttggaaggggaggccgagtcgggcggatcacccgaggtcagaagttcgagacccatctagccaacatggtgaaaaccatctctactaaaaatacaagaaaattagctgggtgtgatggtgggcacctgtaatcccagctactcgggaggatgaggtaggagagtcgcttgaacccaggaggcagaggttgccatgagccgagatcatgccactgcactccagcagcctgggtgacagagcaagactccgtctcaaaaaaaaaaaaaaaaaaaaacccatctacattgaagttgacacatggaaggcttccagccctggtcctgaaacattataggaaagctgagtggcagcttgcaggtattgtactgacctgcgctgtcaaagtctttccaggttgctcttgcatgcagttggagatcccatggctatgaccagccacagcccttggaaacatgctgttctgtcccaccaggcagcccccagttagtctccaaaagaaacctaccaggtcccctgcatttcatcactgtcattaccccggaagtcctcgatcaccagaaaaatcaccttctgtcatcttaagagtcttcatctggacagcaaaatgagaacaactgtcatgaacaattttattgttcccatcatttggtcctcagaatgatacaaatctgaccagcctttggtcccaatactgatgccttaagctatcagttaagctgtgtcacatcccagctggattttcccagtacgagtcttatgctggttaactgtacatgcaaacccccaaccgttctgctgttctgtggaaacaagcccattttgataaaggtctctggctacagctgaaaggtggcaggtacaatggaactgtattttcccaaaatgttgcagatcagttacaacaaacagaacggcgaccgtcaaggaaaactgtcactctgggctcctttttgaccacagcagctatgcggaagcagctgcagcttcgataagggccaaggggcaattcagatcccagggcggccgcctaaagcctcacctgtccatcattactacctgcttaagtacgccgggatctctgtagactaagtcagtcatcctgtaggccccactgcccacgctgtgccaatagctggtgtgctttttctcagtcttgatgggaccgttttatccgcctattacaggtaagaggtttagaccgattaagttacttcctgaaggtcgcttagtcacttagcgaggctgaaagcaacaagctgggatgcacgcaagggtctgaatgcctaaaacccgtccttctgaaaaccgtgtctaccagggcgacctccagaggtctcgcgcgtagtcaccagtcccaaaatcacctagctggtaaatgtcacagattcaactggaggccatcctgacaccagcatgcggcctccccctgaattaagacacttcaggcccagggattcatccccgcatcccccaggagaccggttcccaaacccccaccccttccgtaaacccggccgcctgcctgcaacactcacctgtcagcccagagcgcagcgttgcgcagtccgaagcgagagaagggcgcggcccccgcgggctcccgcccctctcactgccgagggggcctttcggagctcgggcccaccgggttggaaggcccggctcctccgtgccacattcaccaccatctcgaggccgtgggaggaaaaacccggcgagtgcgcgccagcagcagcgactagcggggaacggcgcgcaggaaggcaggcagaggcttgcagctagtaagtcgacaccgggaatgcggcggggagaaagggcgctgaagccgcgagcaaga

SEQ ID NO: 1880178 - DNA, 4001 bp, Homo sapiens
gggcccatcttagtatcacgcagctgactgagcccttcaaaactgacatcttaaggcccaatcaagatccacatatcctgattttgaactatgtgaaagtgggactgtaagtgcaagactaaaataaattatagcagactttttagtaataactttccattttcaaacagtatatcctgtgggccaaagggctatttcttaaagaggcatgtaaatgtatttatttatctaatgtttttttccccatgtaaacttgatatacaaggtttagtatttgctcctctttcatattattttcacacgtatactcagatttggcatgtacctttcaacatctccataaaattaaacaccttttggagaaaagaaccactattttctgctcaaaggtttcgcctacctaaagtggaacatgttaaaaatctatgtgaccatcactggacagctttctctcaaaactttccttcaacgccatggattagcaccagttttgtttactttaaggtacttttcccattcatcatctggttataataaatggatggaagaaatatttcccactgatggttggtctgttgcttgccaaatttttagggagagctgttcatcatacaacataagggataatgactcctgtcaggtaaaacagaagcccaagaaataacaactttttttcttaaaaagttagttacacttgttttcttggagaaaaaaacctgtcaactcctttgcttttccaaaatatttcagggtatttcctataaggttcataagaataagagcttaacacagaaatagttgctgttcataagtttattatctatatctgaaaaaatcatagaaaattgctgggtttagctctcagcagcccgctcctgagctctgaggaagcttgccttcttttgagctacccgatccttcttctgagcaagggacattttgggacggttccacctacaaaagataggaatatatattttttaaactataactgaagagaatagaatatttaatttaaaattttaataaaatttaattttgatagagaatatttaagactttgcaatcagaaggttaaataatccaagttcaaatacatttacttatgtatgatcttaagctaactttcccaaaccccaacttctgtgatgtcctactaccatagggccaaaagtcaaatagaagacatgttagattcagtaataccacttctaggtatttgcccaaatgttttgaaatcagtttgtccaagagagtggcactcccatgttcattgcagcactatatattaatagcaacagataaatggataaaggaaatgtggtatacatatacataatggattattacccagtctttaaaaatgatggaaattctgtcatttgcaacatgaatgaagtggagaatattgtgctcagtgaaataagccaggcacaaaaagacaaatacttcatattcatatagaatctaaaacaatggaactcacagaagcagagagcagaatggtggttacagaggctggtgggtgcaaagaatgggcagatgatagtcaagtataaaatctccaacaggaggagtatgattttgtttttagttctattgcacagcatgatgaatatagaatatcgtacatttcacaattaagagaataaatttcaaatgttgttgccacaaagtgttaagtatttgaggtgaatatgttaaatacattgatttaattactatacattgtatttgtgggccatcacatcactttatgcttacatgttcattaagtattactttctattccatttaaagatcaaaacatgaaagatcaacaaaaagcaacttgtcagccaataaaaaaatgcagtaaccagtacttagactgtactaggatagaaagaaccacctcagtagtgtctgaggctaacacatttccatcaccacagttacttttgcaaacctggttcccttcgcttctgccacatcacgcagagctagtgatcgagtttgcacaattacaccaacagtctgccccacgtgggaaccattcccaacctgttttcttgaaaagacaaaaaaaaagacgacatacctcttctttttaacttctttcttgggcttcttttcatagactggattctctcgtatagcagcatgagctttcttatacatctcctccatctgaaacaaaggaaagcaaacagtacttggtttcatttcatgtgccctactatattaatgcaaccataacttatcttgtccttctaagccagattctcaaaaggaactaaactaaatcaatgttggtaaacactttaacttctaaatgtaactcaccttttcctaacaaattcccaattttcaccttatgcaatgtgaattatcactacagaactccatcttactcaagaaaaaaatcaggccaggtgtggtggttcatgcctgtaatctcaagcactttgggagtctgaagtgggaggatcacttcagcccaggagtttgagaccagctaaggcaacacagtgagacctgtctccataaaaaaactaattagccaggtggcaattattaatggtggcatgcacctgtagtcccagctacaggactacacgtgagtccaggaggtcaaggctgcagtggcacaatcacagctcactggaccccagcctagatgacagaatgagacctcatctctaccaaaaattaaaaaaaaaaaaaaaaaattagcagggcatggtggtgcacacctataaccccagctacctcgagaggctgaggtgggagaattgcttgagcccagaagtctgaagttgcaatgagctataattgtgccattgcaccccagcccaggaaacagaacaagatcctgcctcaaaaaaaaaaagtaagaaaacaaaaagaaaaatctgcatgtacttctgagaaattcagccacacttcttgagtcactctaaatcaaatttttgtctgcagaaacaaatattgcgcttctcattttaaatactgtctgacctagattctttcattcaagaacaagtgccaaaagtattaagatattaagatgatgaacgtatgggaccaagagtcacaacactgacatagcttaactgagaccaaggactggacacaggccaacaagcaaattcatctgtcatcccacaatccctagacttttgttttccatctttatctcacaggcctttaaaagtaattcccagcattatgtaccaaggacctctcttctgtctttcactaccaccaatctatccctagtatctagtggtaatataaggcctctagaccagaaagatgtcagaagttttcctgaaaagccaaccgatcagatattttattgggcaattttttgttttttgacatgaagtctcgctctgttgcccaggctggagtgcagtagcgcgatcccagctcagtgcaacctccacctccagggttcaagcaattcttctgcctcagcctcccgagtcgctgggattacaggagtgagccaccatgcccagctaatttttgtatttttagcagagacagggtttcaccatattggccaggctggtctcgaactcctgacatcaggtgatctgcccaccacggcctcccaagtccggggattacaggcgtgagccaccatgccccgccagggcaattttgttctaaaactcactgaaaaaaaaaaaaaaaaaaagctgcaactctctgaatatctaataattatagcccactacagactatgtcacagtaatccaggtctctaaaattattcaatcaatgtggagatgtgattactacatgcatttgcataaagattattaaaggaaaataatgcaaaaatgctcactgcatttgaaacctcaactacctatacccattttgaaagttaatttccctacctcttttagcactctattatagctagctgttcactaacaaataacaaatccatttgatgacttcatatatagtcattcaacaaatctaagcaacccagttccttccaa

SEQ ID NO: 1880179 - DNA, 4001 bp, Homo sapiens
ggaggctgaggcaggagaatcgcctgaacctgggaggcggaagttgcagtgagcaagatcatgaaaagcaaaatactcaaggacttttaatataaccaccaacacagtgtgccttctggccaagcagagtcacttctgtggttcttaaagtatgaatgaggtgaaagaatgtgcattcctagctaaatgccaaattccaaagcctttagtacaaaaacagcagactttctgcaaaacaggtcgacttttaaaagaggtatgagggctgggcgtggtggcttatgtttgtaatcccagctacttgggaggctgaggttgcagccaagattgcgccactgcactacagcctgggcgacagagcaagactctcaaaaggaggcatgaaatgcacctcaatcttttgctccaagtctgccaaagattgtcaaaccctccctgttaaaaaaaaaaatcagtttacctactctcccttctatataaaggaccctaaaattaaatgtcaatgccaaaatgcgaagtgcagatcgtcttctctcctaaaagaaaagaaataatgattagactcctgaagatcctacttcaacttaaaatctagtatactagatatgtttcctgcatggtttgtctccccagtcattgtccacaggactctgggaagctgtaggaatatgcaggcgcagacacgaggcccagcttcatcttcaacgttgtggaaagggactgtacatcatggggcagagccctaagctcccctatgccacttggacagagcctggggagagtgacctcccagggtatccacgttggaatgctcattagtgaggaattggagtaaccgacaaatccaatattgctaatcacccacagtattttcaagggctagtatctttctcagctcaggctacacatgtagataaagccaattaggcttcctacagttcactagggcagcttttactactttgcacttttaatgagctgactaaaaaaagcaatttttacagaacagagcatatgttgaagttatgtcaacatgcctacaaaaatgcagcaaagtcgatatttggctattgctctgagaatgattaaatgcctcagaggtaaatcctgaccaactagaataaaagtctcttcaatcctatttccattacagaaatcattgacaaagagctgataagcaaaaaacaattagcagatttactcaccaaataagagttacttggaatccttaacaaatcctgcaaaacaagatattaatctattagtacagcaaaaccctaaactttttcaacgaggggcctcatgctatcgcctggggttggagtacagtggcactggagtataggtttgagtataggtcactcctgggctccagcgattctccttcctccagctacctatcatcatgcctggctactttttagccaatttttcttaaacatgtattaagacttcaatccagccaggtgtggtggctcacgcctgtaatcccaacattttgggaggccagaggctggcggatcacaaggtcaggagtttgagaccagcctgaccaacatggtgaaaccctgtctttactaaaaatacaaaaattagcctggcgtggtggcgggggcctgtaatcccagctactcaggaggccaaggcaggagaatcacttagcataatcacttgaacccgggaggcagaggcaatggagtgcgccactgcactccagcctgggcaacagagcgactccatctccaaaaaaaaaaaaaaaaaaaaagacttcaatccagattcagtgctctagaaggctgtttcctgcatggtttgtctccccagtaattgtcgacaggactctgggaagctgtaggaatatgcaggcgcagacacgaggcccagctttatttccaacgttgtggaaagggacttgtacatcatggggcagagccctatgctcccctacgccacttggacagagcccggggagagtgacctcccgggtgtatccacgttggacaatcagtgtaacgcataaatttacagaatccaataggaaacaatttcatccattcatgttactacagatcttaaacaagaaagcaaacgagtttccaccctgtccacagtggggtgttaaaaaaaaatcggtttctagactggtaacatgcatattcagctattctaattactttacaataggcggttagtactatgtggaaggtaccgcagaagcaaagacaacaattaggcccagctatcctaaattcaaatgaaacacgtggacttgttaattacccccaaatcggccaggcacgatggctcacgcctgtaatcctaaaaatataaaaataaaaatgacccaaatcacaaaaatacgagaaagcataattacgaaacgcaatgcttccaaattatgaaaatcttcggcctggcgtggcggaccacaaggtcaggcgttggagaccagcctggccaacatggtgaaatcccgtctctactaaaaatacaaaaataagccaggcgcggtggtacacgcctgtagtcccagctactcgggaggctgcggcaggagaattgcttgagcccagcaggcggaggttgcagtggtgcgatcaaataaaaagaaaaattgagaaaattcttaaaggcaaatgaggatccagaataaaactgtgtgcaattatattgagaacgacaatgtgcctactatgaggcagtaagataaacagtgggggtggcggtgcaccttcagaggctcgctgggtcgggcggcagccctgcgggtcccgaggtctccatggcccacttctggcccaggcccgtctaacgcgtactttagagttgggaccgatgccgcctaagacacccatatatagttttaaattacatgatttccggccaggcgcggtggctcacgcctgtaatcccagcactttggaaggccgagggtggtggatcaccggaaatcaggagttcaaaaccagcctgaccaacatagcgaaaccccgtctccactaagaatacaaaaattggccgggcgtggtggcacgtgcctgtaatcccagctgctggagaggctgaggcacgagaatcgcttgaacccggcaggcggaggttgcaacgagcactgcagtccagcctgagtgacaaaccgactccgtctcaaaaaaaaaaaaaaagtaaataaataaaatactatatgatcttcctagggaagctcggctactgatctatagcattagacccacaactccggtggcaagcatctgatcacacttaccaaggatcacacttaccaaggagaagaagcgaccactgcgaatctgtctccaaaaaggagagagaaaacgcgaagcatcctttttaaaccttacgaagtgcccggaagtcctggaatgtctattgcgcgtgcgcagaagcatgcgcagttagagaatcagaaactcactgaggcttctgggaatctactgcagattgagccccaccccttcctggctgggaggcctctcgcggtagtggatccttcccgcgggaccttgctggggaatgtacgttacagaaataggtttgtaggtatgtagctgcagaggacgtttacttctgtgcaatcactggactcagtctgtaggatatgcccttagataaactggccaaaaagtttttggaagagtcgaacgcggtggctcacgcctgtgattacagcagctctgaaggccgtgaggggcggatcgcttgaggccaggagttcgagaccggcctgggcatcatggcgaaaccccgtctctacaaaaaatacagaacataagccaggcatggtgccgcgcacctccagtcccagctactcgggaggctgaagcatgagaatcgtttgaacctgggaggcggtggttgcagtgagccgagatcgcgccgatgcactccatcctggtcgacagagcgaaactctctctccaaataaataagtaaaacgttggaataataagaatgcagaatgaaaaaaatacatatagagaaat

SEQ ID NO: 1880180 - DNA, 4001 bp, Homo sapiens
ggtctcagctcagtacaacctccatctcccgggttccagcaattctgcctcagcctcccacaggtgcacaccaccatgcccagttattttgtatttttagtacagacagggtttcaccgcgttggccaggatctctagatgttgtgatccgcctgccttagcctaagtgctgggattacgggtgtgagccaccaagcctggctgcatttaacatgccctcttaaacactgcctcactcctcttagcttgtaagaaaaatcaagctgtgttcccccacaatcatagctagtaactagcttccattctcaaaccaaccctgacctcaacaccttggcaagcaagctctacagtccaccaaactccaatctcacccacctccctcaaacctgtctccatcaagttccaaatggcttaacggctgtcccacctcccctatgccagtaggtaactttaccttctagatgatcccccttcagtcccatccttcagggtactgaacatttatgttggcagccagtgcagggggcttgacaaagtttccattgtgactcacgtcatgaggcaagcaattctggcaatcttcaggcggaggtgcgccaggtagtagaggctcatacaactcatcagctagggatacaacctcccgttgctaccatcgatttttcctccactacactgcaggaagctaaagaatcggtctaactcatcttgcactcaacccagacttacggtcctattggtcaggacctaatatccattttcccaataaactgccaatataaagtgaacccaagggggacccacctgagactaggtttcagggcctttagaactgaagctatcatgctagtttccttcaacagtaccattcagattcttggctgatgtcaccacagccacctccacaaaaatgaaccacaaacatgcagtcgtatttattttaattcataaatacattaacatagcagattaggcaatttgttaggtaaattacaaatacattagaaatcatacaaaagtggccgggcagggtggctcacagctgtaatcccagcactttaggaggctgaggtgggcggatcacgaggtcaggagttgagaacagcctggccaatatggtgaaacctcatctctactaaaaatacaaaaattagccaggtgtggtgctacacgcctgtagtcgcagctacttgggaggctgaggcaggagaatcgcctgaacctgggaggcggaagttgcagtgagcaagatcatgaaaagcaaaatactcaaggacttttaatataaccaccaacacagtgtgccttctggccaagcagagtcacttctgtggttcttaaagtatgaatgaggtgaaagaatgtgcattcctagctaaatgccaaattccaaagcctttagtacaaaaacagcagactttctgcaaaacaggtcgacttttaaaagaggtatgagggctgggcgtggtggcttatgtttgtaatcccagctacttgggaggctgaggttgcagccaagattgcgccactgcactacagcctgggcgacagagcaagactctcaaaaggaggcatgaaatgcacctcaatcttttgctccaagtctgccaaagattgtcaaaccctccctgttaaaaaaaaaaatcagtttacctactctcccttctatataaaggaccctaaaattaaatgtcaatgccaaaatgcgaagtgcagatcgtcttctctcctaaaagaaaagaaataatgattagactcctgaagatcctacttcaacttaaaatctagtatactagatatgtttcctgcatggtttgtctccccagtcattgtccacaggactctgggaagctgtaggaatatgcaggcgcagacacgaggcccagcttcatcttcaacgttgtggaaagggactgtacatcatggggcagagccctaagctcccctatgccacttggacagagcctggggagagtgacctcccagggtatccacgttggaatgctcattagtgaggaattggagtaaccgacaaatccaatattgctaatcacccacagtattttcaagggctagtatctttctcagctcaggctacacatgtagataaagccaattaggcttcctacagttcactagggcagcttttactactttgcacttttaatgagctgactaaaaaaagcaatttttacagaacagagcatatgttgaagttatgtcaacatgcctacaaaaatgcagcaaagtcgatatttggctattgctctgagaatgattaaatgcctcagaggtaaatcctgaccaactagaataaaagtctcttcaatcctatttccattacagaaatcattgacaaagagctgataagcaaaaaacaattagcagatttactcaccaaataagagttacttggaatccttaacaaatcctgcaaaacaagatattaatctattagtacagcaaaaccctaaactttttcaacgaggggcctcatgctatcgcctggggttggagtacagtggcactggagtataggtttgagtataggtcactcctgggctccagcgattctccttcctccagctacctatcatcatgcctggctactttttagccaatttttcttaaacatgtattaagacttcaatccagccaggtgtggtggctcacgcctgtaatcccaacattttgggaggccagaggctggcggatcacaaggtcaggagtttgagaccagcctgaccaacatggtgaaaccctgtctttactaaaaatacaaaaattagcctggcgtggtggcgggggcctgtaatcccagctactcaggaggccaaggcaggagaatcacttagcataatcacttgaacccgggaggcagaggcaatggagtgcgccactgcactccagcctgggcaacagagcgactccatctccaaaaaaaaaaaaaaaaaaaaagacttcaatccagattcagtgctctagaaggctgtttcctgcatggtttgtctccccagtaattgtcgacaggactctgggaagctgtaggaatatgcaggcgcagacacgaggcccagctttatttccaacgttgtggaaagggacttgtacatcatggggcagagccctatgctcccctacgccacttggacagagcccggggagagtgacctcccgggtgtatccacgttggacaatcagtgtaacgcataaatttacagaatccaataggaaacaatttcatccattcatgttactacagatcttaaacaagaaagcaaacgagtttccaccctgtccacagtggggtgttaaaaaaaaatcggtttctagactggtaacatgcatattcagctattctaattactttacaataggcggttagtactatgtggaaggtaccgcagaagcaaagacaacaattaggcccagctatcctaaattcaaatgaaacacgtggacttgttaattacccccaaatcggccaggcacgatggctcacgcctgtaatcctaaaaatataaaaataaaaatgacccaaatcacaaaaatacgagaaagcataattacgaaacgcaatgcttccaaattatgaaaatcttcggcctggcgtggcggaccacaaggtcaggcgttggagaccagcctggccaacatggtgaaatcccgtctctactaaaaatacaaaaataagccaggcgcggtggtacacgcctgtagtcccagctactcgggaggctgcggcaggagaattgcttgagcccagcaggcggaggttgcagtggtgcgatcaaataaaaagaaaaattgagaaaattcttaaaggcaaatgaggatccagaataaaactgtgtgcaattatattgagaacgacaatgtgcctactatgaggcagtaagataaacagtgggggtggcggtgcaccttcagaggctcgctgggtcgggcggcagccctgcgggtcccgaggtctccatggcccacttctggcccaggcccgt

SEQ ID NO: 1880181 - DNA, 4001 bp, Homo sapiens
cgcgcccggccatgccattcattttctgacaatggtcctgatctagggcctcaatcaactctaccatccttatccctgacccctaagtaacaaggacaaaatcaaaaggaattccctttagccttcatgaatctggtagaataatcttagaaatatctatctgcttaatgccaagggttaatctaccaggaatgaaggaaaggtgctgattccattaactggacttcattttcccaggagggaagatgggaaagtaggcagaatgtgagtgagacagtccttttataaagcttcctgagaagccatgagctgtttagggctagtttctggatccagatcacagtttgagcagaaacatcactgcttcctcacattattcagttttagttccctgggactgaggagcttgaacctgcaggaggagagggtttacacttggggtgggtgcgggggttccagctccatggaagaagggactgtagagacaccttcttcagtgcttattggagttacaaggtcccaacctccacaattctagtctctaagttttctaacacctcccataccaaagcactgcgatgagaatgacaacaaagatcaacgtggaggtggcagggggttttgttagaacccagctgaggctgaagggctgatgttgggagcggacctcagggatccaggatacacgttagcatcattagcctcatcagcttccagagtcaggtgcatcctggatggcgtgaatttggtcactgtggcatcttgaacatgcctcactttaggctttaatgccattttggcccaactgcctcatgctccaacaatgcggaaaggtagtatacctaaagctatgtaggcagtgaaaccaaaaagaccttgtagagaggggcatagtcaaggaaatagaaattggtagtggagggcaaggaagacccataaatctcagcctcccaggacagaagactggaaaggagcaaggaggtactggactgagggaatcttggctaggagaaaagaaatcacatagtagaagtggttgatcctgaagaaaaacaaagcaaagacaggttattttggaaagagcagacccaaaggaaagcactgggggctttagagatgggagccaaaggcgccaggttctatgggtacttggagtcagcagcctggagtgtggggtggggtagggagtgagcgtggggattctggatgcctggatgccacgaggcactttgtgtaggtcccgctggaaattttctttctgagaggaggaacttgagagagggaaaaggaaccctagcgtttccctacctagcccttttccacttttctttttcttcttttttttttttttaattcagctcttcatataacatcccttgtaaaaacaaaagaataaaaacaaaccaaaaaagaggggcagggtaaatttttttttaaaaaaaggaaaggaaagagaggaaaaggaaataaaataagacgatttattgtttctcctcagcatcctccttggtctcctccttcactgagagaccttcaagcttttctgccactttttcggcatgattgtttttgcctgatcctggccaagccgtctcctggagtttctcttcttgaaactcaatgaccaaaggaagccaagtggatgcatccaagcaccacctagaccatggtcaggctgctcagtgacatctggtcacttgccaccacagctgcagtccagcctcacagcagaggggaccaagccctctgagagacaaaccaaggaccactgtaaagcaccttctggtgagctccaggcagtgcccggactccaatgcctgcccaattggatgtgaggccagcaacacggagaagtgctcagggctccccaggaagcacctgtgtccccagggagctgcatcgccctggataggtgaggcagccacagcaccctggaatgtttctctggcagacagaaaaagcacctgcctggaagtacagtcaggtgcatagtgagtctgcaatccacttttcttcttcttttttttttttttttttgagacagagtcttgccttgttgcccaggctggtgtgtaatggcgcgatctcagctcactgcaacctcagccttccgggttcaagcgattctcctgcctcagcctccagagtagctgggattacaggcgcccaccaccacgtccagctaatttttgtatttttggcagagccaaggtttcactatgttggccaggctggtctcgaactcctgactttatgatctgccagcctcggcctcccaaagtgctgggattacaggcgtgagccaccgcacccggcctcttttccacttttctatttgttgtcttgcctataggggataagttcctaccaggtatatagtttagaatattcactccatctatctctcctatacactaacgaggtgggattgactggggaacttcttttctttctcttttttttttgagacaactctcaatctgtcacccaggctggagtgcaatggtgtggtctcagctcactgcaacctccgcctcctgggttcaagcgattttcctgcctcagcctcccaagtagctgggactacaggcatgtgccaccatgcctggcttgtatttttagtagagacggggtttcacctaaggcaggggatccacctgccttggcctcccaaagtgctggattacaggtgagaaccaccgcgcccagtctttttttttttgtgagacagagtttagctctcgttggccaggctggagtgcaatggcgcaatctcagctcactacaacctctgcctcccgggttcaagtaattcttctgcctcagcctcccgagtagctgggattacaggcatgtgccactacgcccggctaattttggatttttagtagagacgcggtttctccatgttggtcaggctggtcttgaactcccgacctcaggtgatccacccaccttggcctcccaaagtgctgggattacaggcgtgagccaccatgcctggccgactggggaactttctaaaacatttgcaaggccagttttagacagtgaaacttattttgaagatctctagccaatcagcagagagaaatacgcctgttttctggagaccacccttgagatcttggaatttacagtgtttttgaaatggaaaatctcaggattaaaacaataaagctatggggggtgagagcaggggaagacagaattatcaatgcttagatcagcgcattcacccaggagaaagtagttacaattgatgcatggaaagtggaaaaaataaaagttattgtggggctatagacaggggacataagagcagcaggggtggcttctatcccatttcagaaattgcaagaagggaagaggcttgaagaaattattgcttcctccttgtcaggaagcaagtctgaatcctgcaaaagatgctcagacatcaagagactattgtcatttttacacatgaaaccatcagattccccaccatggccttacactttgaatgggggagatataacaaggtgagtttcttttacaaagacccttccagatagcatctattcctataatggcagtgtgaggaagctatattaagtgaatgctgggtatgttggcatattgatattgtctaactccttccttctgaagggtagggaaaaactgagcatttcccaccctggggtcaggtctagtgcttgcaagagaccttatgctgaagcttgcccatttgatagagggtggcaggctgggctttagggtcaacccagagctaaaggactatgctaatagtgtcccatggtctaggtcatttgactcctctcctctcagaggaccccacacagatccttttgcgtgtctgtcctgaagctgaggatctagggctgcccatcagtagtgagcctttggaagggaagagatgctggccgacaagaactgctaccctcccaacaccttccaagatgggaagctgcttctcccaagggaaggacagaccacta

SEQ ID NO: 1880182 - DNA, 4001 bp, Homo sapiens
aagcaatttcatcttccactcccttagttatcactaagctactatgtcaagattaagtctaatgtttgaagatgttgttccaaaaaggaataaggggtatcagaagacagtatatattacagaggaataggcaggtctgaagagaaaactctatacagccatgcattgcttagcaatggtaatacgtgttttgttttgtcttgtttttgagacagagtctcagtcttgctctgtctcccaggctggagtgcaatggtgccaactcggctcactacaacctctgcctaccaggttcaagcgattctcttgcctcagcctgccgagggactacaggcacgtgccaccatgcacaactaatttttttttgtacttgtgatccatctgtctcagcttcccaaagtgctgggattacaggtgtgagccactacgctgagtgggaatatgttttgagaaatgcactgcaaggcaattttgtcatttaacaaatgtgtacttatacaaacttagatgaaaatagcctactacacacctaggctatacgatatggcctattcttctaggctacaatcctgtatagcatgttactgtactgaatgctgtaacacaatggtaagtatttgtgtatctaaatgtagaaaaggtacagtaaaaatatgctactataattttacaggacaagcatcatatgtgcagtctatcactgactaaaacgttgtaaggtggctgactgtattaataacacagctaacgtttactgacagattggatcatcttacttaatccttgcaaacctctgagatttttatcactgtgcccattttacatctaaggaaaaccaaaccctagacagggcaagttacatcccaatatcacacagctcaaaaatgggaaagcaagatcaaccctgtcaatctaattctaactcccagtttttttttttttttttttttgagttttgcttgtcacccaggctggagtgcagtgatgcaatctcggctcactgcaacctctgactcctgggttcaagcaattctcctgcctcagcctcccaagtagctgggattacagatgcctgccaccgcgcccagctaatttttgtatttttagcagagacagggtttcaccatgttgaccaggctggtcttgaactcctgacctcaagtgatccacccgccccaacctcccaaagtgctgggattacagctacatgagccactgcggctgccttaactccctgcttttaaccactctgctgtattgcttcccaattacaaaggactgaccttcaaaagtagagacctacagagctgtctaaatataaaaattaaaataattttggctgggcacggtggcttatgcctgtaatccttgcaccataatcctagcattttggaagtccgaggctgcggatcacctgaggtcaggagtttgtgaccagcctggccaaaatggtgaaaccccatctctattaaaaatacaaacattaggccgggcgcggtggctcacgcctgtaatcccagtactttgggagtctgaggtgggcggatcacgaggttaggagatcaagaccatcctggctaacaaggtgaaaccccatctccactaaaaatacaaaacaattagccaggcatggtggcaggcgcttgtagtcccagctactcgggaggctgaggcaggagaatcgcgtgaacctgggaggcggagcttgcagtgagccaagatggtgccactgcactctagcctgggtgacagaatgagattctgtctcaaaaaataataataaacaaaaataaaataaataaataaaataaaataaatttgactagagaccacaaataaaatttagttcatagcttttttgttacacactgtgcaacccccttcagtgctcacagcccacaggtaaggggactgggcaatggttcgaggctgccatttgctatggcatgggtacactatgagaggcccacagagaaggacccaccataaatccattaccatgctctcattaagtctctcccctgcctccaagaccagtatatataatccatccagattattatccagacatctactcttttcctaaaattctactttcatgatttaagaaattgtggccaggtgcggtggctcacacctgtaatcccaggacttggggaggcagaggcagttggatcatgaggtcaggagatcgagatcatcctggctaacagtgaaaccccgtctctactaaaaatacaaaaaaattagccaggcgtggtggtgggtgcctgtagtcccagctacttgggaggctgaggcaggagaatggcgtgaacctgggaggcggagcttgcagtgagctgagatgcgccactgcactccagcctgggcaacagagcgagactctgtctcaaaaaaaaaatttttttaagtatacatttcttaagttataaaagaaacataccagcatttataatccttacatttgaaaagtttatatatctcttacataatgttgctttttaaaattttttttgagacagtctcactctgtcactgaggctggagtgcactggcaccatcttggttcactgcatccatgacctcctaggctcaagggacccttccatctcagcctcttaagtagctgaaatacaggtatgtgccaccatgtccagttaattttttttgtagagatggagtctcactatgttgcctaggctggtctcaaactgtgctaaagcaatcctgcctcggcctccccagatgctgagattatgtttccttctaagatttgaaatgctaactcagttccaattactgagaggtgtggtgaaggtagccccattctccttgaggactttgttaacactgcaaaggtaaggttaggcaaacaatggccaagggtatggcaaactatgactgtggcctgccacctgttttgtaaataaagttctactggagtacaacagctatgcttattcattgaggtattatccacgggctgcttctgcactacaaccaccgagtgtgatagttgtgacagagaatgtatggcccttaaagcctaaaatatttgccatctgaccctttatagcaagtgtgcccaccatccccactttaaacagctatttggtgtgcaagacttgtgaaaatataaacttcaggatgacatacacacatacacactaatccaaaatattcaggtaggttggtggtaggaacacagaagacagcaggaaaaagacattccacatcacatgatttatttctggaataccactacttcccctctttccccagtttttcctaaattcagtaatatgttgttgcatatcctgacatcctacctgtccagtgctagctggaggctgcacttgtgttatcgggtattgtgttggcacaggtgggactccagtaggtaatgccggcaagactccaggtgctaatgaaacagctggtggcactatgcttggtactccgtagggaggttgaactggctgctgaggagggggaacaacagggtaaccagactgatagccattggatggataatatggtggttgaggagggacactacttatagcagagggttgtgtatagcctgagggggaagaaaaaaagtgtttaatcagctgcagcagaatgagacaatttagctgaatattaaacttaatatctagggaagaaaaatactgaggcatgaatggctttccaaattaccctaaattaaagggaacattaatagtgccctggcacagtctagcctcaagtatcatagttacacataactatcactagcaaaatattttttaaacacttcaagatgtacacacctggtaaaggtacagcagtattaatctgattcacaaatctagagtattcagcatgaacctgaaagagagggggaaacaaattaacatgggacagccgaagctgtgcatttacaagggtctgattacataattctaggaccaaagccattaggaattaaaatatatctaccaatgttccaatca

SEQ ID NO: 1880183 - DNA, 4001 bp, Homo sapiens
tatttcgggtcaccagaatcctgagctcaccacttgaccctgtctctccaggtcacagtggatcacagaaagctaatcaatgacaagaagagaaatgatgaacatcatgagctggtgtgattatccccatcttactgacagaaaacatgaaggcacagagtagttaagtcactcagccaaggttgaatggctaacaaaggacagcacagatagctgagcccaaactgtgtggctcctccacgaatcaggtttctccccactgtgctctcaaggcacgcccgccacaccagcctcatccctcaggctctccgacctatgctctgagtcacttctccaagcattcctttctgttcttccttccctgggctgatcatttcaagaagtcctacattccagaaaacttgagaggtgcttcttctctggaagccccttttcttttctgtgagctcagggagcattctacatacctcagctgtgtctgctatcttttgcttaattatcaatctttccatataaacagtaaaggaccacagtttattcatcagattccccatccaaacctgcacctgcatacataaacgcactggataaatgtaccgcagtagacagaggctctccaggttgagagctccatgagggcaccaatttttgtctgtttagctgtgtcctcaaagcaaggaagggttgatccggtctagaaatcacctgcgcatgcttcccaggacacagagctgcatcgggtgtcacattcccactttggagcctacaggggaaactggctggtggcaaacagtccttggttccagtttcacctcccttaaactcacctgtaaaacggcgtatgcaataatgctatactttcctttcagttgtaatactatgttactaatgtttctgtcatgagaacttgaggttcaagatccccttgcttttggtagctttccttttagaaaataactgaaatccaatccattcctctgtccctggaactggctgctgacaagtccaggcacttcacctttgtacttccccagaacaaaacaaaacaaaaaacccctaacaagccacacacacacatgttgaactccattttttattggatttaacaagaagtgaaacgttaattacctgcttctctccttatgtcccttttgctgaaaaggataccacttagtaatggaagagctgaaaaactaagagggcttctcaggactctccccgtcaactccctcagccaaccaactgctaagccctaccaattctagcaccctattctgtccacttctcttcaatcccaaaccaccaccatctggtgccttgacggcctcccatgtggtctcatcactgcctccctcctctaaactacaaaggccacatggcagccaggacaattatttgaaatatacgtgtgattttgtcaccacactcctcctccactgaacttgttttacttcttcagatacaacacggtctggtctctggcgtccaagtcttcacacaccacgttccctcttctggaaagggtcatcactctattaagtatcactccgttagagagcctcctctgtacccacacgttatagaagacaccctgcccattcctggacaaccctttcccctgtatttctccagtgtcccagtaactatctgtgcacagcactatcacgtttaccaatacaaccctgctgagaatacgacctgctgtacaacaggtgtttagcactgaatgaatgaatgaatagacatgtcttaagctcctacttacctccaacattccctctgccttcaccagcatcctgaaaacttacaactttaagaacctgggactcccccagccttcaactgccactgccaacaccagtgcagtggtttggattggtttagcttgactcaggggtggtgggtgtcttgtctggctcagaacttgagtccattaacaaagattctcattaccgaactttgttctcagtgagggcaagtgggtcatcattgccagacaatggccaaccaacccctcaattgagaagggctcagtgagttcagagcccaaaagctgcaggctcagatgagaagcaccggaggctggaggcactgcccagcacaaacacaactgtagcacaccctgcctgtgggtctgttttgcctcctgggccctgtggtgtctgcagtgctcactggacccacgccgtgacttgtcaagaagctgtgggcctgttcaggtgacttctctttcagttccccactcacagcacctaagcattctcatttctgttccttcttccctgtctaactcttctttagccttgccttctcctgcaaagccggccctcagggactctgggaagggtgaggggtccttctcatgtcctcaccactgctcaccaccatggctcttccccaccagaatgtactctgtgggcagggatcaggtgttagtcatctctgtgctgatgaagtctggcacagagtgggcttcaggtcaatgtaccaggctatgcaccatgctgggcaggcctttgttcaatagatgttggtgggatgaaagaacagaagggaggagtgagaaaaggaaatgaggcaagttgatttgttggactcataagctgattctctagagatcagggatggaaatatttcaaaaaatgtagcttaagattctcataccagtgtggctattgataagggagggttggcaaatgtgtaaggacaatggtgactccacataaaagaaaaacagaacacagcatgggacagaggtcagtgacaaactcttcaaaaacagcagggcacccaccctcctttgtgtttcagaaaggaagccaaggccttgcacactttctctgagaccctgcccagcccggcctaccttatgcatgacgatcttccgctggcctggctccgccacgtcaatcatcttctggaccacgtagttggcatactggtccttcatcatggtgtataaggcactgtggggaccgtcgttcatggtgcacacctcatcgatgagcacagcgcgctccgtacgtgaggcgtgagtaacacacttctccacaacattgctgtaatgagataaaaccagggacaactcttacaagagaggcccctgttagtgaggctgtgcttgcctagcttctgccctgacctccggaccagcagggagagagagctatttaacatttgaggaagatgagtcgccaactgtctgactctctcagtctctgactctccacctgtgccatctgtggcatccaatcgtaggaaagggggaacgtggcattaaatcagattttttctccaatccacggggactatagagggtgatcaaattatacactgccatactactgcatactgaccacccagagagaccaggtcttcaaggacatgggacccggccctctaacgggtaagggtaaggagcccaggtaggtgaggagacttaagcacaaggttcaggacactggttcaccaccagctggttattattttaacacttaccaaaatctgtccattctttcctcgcctttgtcagttcaccaaggccaggaacaaaccttacttatgcctatctccctgctgccaagcagggcatggtggtgcatgcctgtaatcccagctacttgggaggttgaggcaggagaattgcttgaatcgggaggcggaggttgcagtgagccgagattgtgccactgcactccagcctgagcgacagagcaagactccatctcgaactcctgacctcgttatctgcccacctcagcctcccaaagtgctgagattacaggcatgagccaccatgcctggcctcaaataagtaatttttttttaagtaaaaatagaaattttagaaaaggaaaatataacatcagaaataaaatttactgtatggctttaatagtggattagagatgacagaagagtcaatgaacttgaaaatagatcaatagaagtaaacaaaaaaatacatcagtggctttcagacatttattttttattttatt

SEQ ID NO: 1880184 - DNA, 4001 bp, Homo sapiens
tatcagtaaaccaaactgtcaacaatacattatcctgaacaccccacctctgctggtatataaaagaaactgagacagaggggcttaagtcacatatttcaaactatggatagaaagtgacagaattagaattctagcctaagctgtgactccaacacctatgatcttactactaggtcacagtgactgcagagtcagcaggaatggttctcaattaatgaaaagtgtgcaaacaaaggaagtaaatgaaatggccagaaactgagtctgtgagtaggaaatgggtgatggtgacaggatatatagaaagagagacactgggattttgactggagcccttcccccaaactcattgccccaggtcttaggtatcttgaaattaaatgcctgcaccatggctatacctggtgcctcctgcccagtttccctgctgtctccaatctctgtacattggctaaactgtgctgccagtggatttatgttagaagactgcaagtcacatcaaaatagtgatgttaatgaatacaatgtcttaaatgcccaaaatgttgagtacctcaaagcaactaagatatcatctaattaaattaaagattacactggcaggggctaaagaagcaaaaggcaagagacacagtgattaaccaagtgtcagaagggaataaattttttttttttttttttttgaaacagggtctcttaggatctgtcacccaggctgctcactgcagcctcaacctcccgggctcaagcgatcctcctgccttagcaccccaagcagctgagactataggagtgcaccaccatgcccagccaactttttatagagatggggtttcactatgctgcccaggctggtctcaaactcctgggccctagcaatctacccaccttggcctcccaaagtgctgggattacaggcataagccactgtgctgggcccagaagagaataatttactctgaaaatacaattataggaatgatgggaattgtgggaataattatgacaatgaagcttatacaaaaataaagtcaaagaatacttataaacaaaatgaaggagagatggcttccctggatatttttgtgatccagaagaaataaaaattccaacaaagatgagttaattttacccaaaatggcaaatttgcatctagagaagagtaaaataataaagggtaggaagcataagtcaggcccagaacaagacaccacagagaaacatgaccagaaaaaatatgtgcaaaaatataacacaggaaacaacgacagctgggtatggtatctcacacctgtaatcccagcactttgggaggccaaatcaattgaacccaggggttcaagaccagcctgggcaacgtggtgaaaccccatctctaccaaaaatacacacattaaccaggggaagtggcgtatgcctgtagttccagctactcaggaggctaagatgggaggaccacttgagctcaggaggttgaggctgcaacaaggacaattgtgccactgcactccagcctgggtgacagagtgagaccttgtctccaaaaagaaagaaagaaaaacaagaaaattaaagaagaacaattcaactatctatgaaaatccaagaaaaattaaaattggcaatgatctgaacattaaaagaaaatttaaaatagcttcacacttgcttctaattacttatactttcttattaatgctacatctctagtactaagcactgaataaatgaactccagacctgctctatctccaacattcctttctcccttcaccagcatcgtggcacatacctttgaaacttatcactttaaaaactttggacttcttcagccttcaactgccactgccaacaccagtgcagtggtttggattggtttagcttgactcaggggtggtgggtgtcttgtctggctcagaacttgagtccattaacaaagattctcattaccgaactttgttctcagtgagggcaagtgggtcatcattgccagacaatggccaaccaacccctcaattgagaagggctcagtgagttcagagcccaaaagctgcaggctcagatgagaagcaccggaggctggaggcactgcccagcacaaacacaactgtagcacaccctgcctgtgggtctgttttgcctcctgggccctgtggtgtctgcagtgctcactggacccacgccgtgacttgtcaagaagctgtgggcctgttcaggtgacttctctttcagttccccactcacagcacctaagcattctcatttctgttccttcttccctgtctaactcttctttagccttgccttctcctgcaaagccggccctcagggactctgggaagggtgaggggtccttctcatgtcctcaccactgctcaccaccatggctcttccccaccagaatgcactctgtgggcagggatcaggtgttagtcatctctgtgctgatgaagtctggcacagagtgggcttcaggtcaatgtaccaggctatgcaccatgctgggcaggcctttgttcaatagatgttggtgggatgaaagaacaggagagaaggagtaaaaaaatatggaaggtgggttggatgaaagtttgacttgttggagaaaatgatggcttattagtattttacctgctttattcatggaaaaaaaaaccacctataaaattgaacctattaaaggctaagttctagccaatggaagagtattggataccacaggttttaatacaagatacttgatctgcaacaagtttaaattatttgcacagttcatgcttgccatgcacaaaaaggcagccataagcaacaatgcaaaaccataaaagaaaactgaaaattgacagaattacagggttcactacatgtaccatggagaaacatcaaacaccaagagaaaagttaaaggggaaacttacaattacctgctggtctgaaggaataaactcaagagctttctggataacacggcagccatacatctgtagtgccaatgacaggacgtggcctcgaatccgttctgccaaagccagcttctgttcaagactgccaaactagacataatgtgtgggtaaacaccattacttaagtagaaggaaataaaccagagaaagcaaagcattcattattctgcatcaaccactggcataacctcttttagccctgatacccatgattaactaaaccttttatttaaagagccattgcttcttcaagccagtagttctcgatctcttaattatgagtaaccctttttaatgttaagaagtttctcggatacccaacaataggtagtttcactattaatatctgctaagcaaacacataattcctcaaagctgtcattaattcatactattaaatgaatctggccaggtgcagtggctcacaccggtaaacccagcactttgggaggccaaggagggtggatcacctgaggtcaggagtttgagaccagcctcgccaacatggcaaaatcctgcctctactaaaaacacaaaaattggctgggcatggtggcacgctcctgttaactccagctactccggaggctgaggcaggagaatcgcttgaacccaggcggcagaggttacagtgagctgagatagcaccactacactccagcctgcccaatggagcaagactgtgtgtcaaaaaaaagaatcctacactcttactgccaaagcacacatggacacactgttttgaaatagtattctacatcattaagagaattgatttttttttctcctatttacacaaggtaacagagttgggaggggaaaaatcagtagaatcaagaagtgaggctacacaatgttaaaattctacttagaatgattttccatccttggcttattattttcatttcaatcacataatcgtgagattggaggagactttatgaattctcagcccatccaacctcctcattctcccaagggaaactaagatccagagaagttctcaagcttggtccaaatcatatggctataatc

SEQ ID NO: 1880185 - DNA, 4001 bp, Homo sapiens; identical to SEQ ID NO: 1880183

SEQ ID NO: 1880186 - DNA, 4001 bp, Homo sapiens; identical to SEQ ID NO: 1880184

SEQ ID NO: 1880187 - DNA, 4001 bp, Homo sapiens
cctccagggttcaagcaattcttctgcctcagcctcccgagtcgctgggattacaggagtgagccaccatgcccagctaatttttgtatttttagcagagacagggtttcaccatattggccaggctggtctcgaactcctgacatcaggtgatctgcccaccacggcctcccaagtccggggattacaggcgtgagccaccatgccccgccagggcaattttgttctaaaactcactgaaaaaaaaaaaaaaaaaaagctgcaactctctgaatatctaataattatagcccactacagactatgtcacagtaatccaggtctctaaaattattcaatcaatgtggagatgtgattactacatgcatttgcataaagattattaaaggaaaataatgcaaaaatgctcactgcatttgaaacctcaactacctatacccattttgaaagttaatttccctacctcttttagcactctattatagctagctgttcactaacaaataacaaatccatttgatgacttcatatatagtcattcaacaaatctaagcaacccagttccttccaagacgtcagacaagcagacatgtagataatgcctgaattgaggtaaagaccacctcctgttggagacacatcagatgtctgcacaggatttcagcaggcacacaggaggatagaggccactgtagataaaattaatgagccagctagaaaaatacattagccaaaaagtagtctagctgaaggaaggcacatatacaggaaagcattaggaagtaaacatctgaaagcacaaactgggagtctgaaaagttctgagcaagtatgacatgactacataaagatataggttaggaagtaaattttgcaagactagtagaatcataatccaaaagtaaatgacctctttaccaggatgaagtcataagtaacaaagaaatataacgcagtaaaaattaacatgcacctacattattgataaaaaactactccttttcctaactcagaaactcaagctatttgtttattcagcctttacactgtgtccaaagcatagaaataacagaaagtggtcatttcccaactactgtttttaaaaattttcctaaccaatagctatgccaaaatagaagctactacacactaacgaaaaagaacctgggtcaggaatggctctcatctgtaagcccagcactttgggactcattcttgcaaacatggctcccctcatttctacaacatcacgcagacccagtgatcaaatctcttttcctgtgtacatgtctgagataatgggaaagtccagaatatagcacacatatgctatgaagagctttcctcccagatggtatcaaaataagtgaagtttattatctagcacctcttatccaacaaagcagattacaactatgattacagaaatgacatctacaaatacagaacagccaaagcataaaaggtagccaaatcttcagatgcttgaagtctcccacacttgagcatctaaaagattactaaaagaatgttgacaagtctagctcatgttgtcaagaaacacacctatataagaatgttacctgcccccaaaacaagtaataaacctatttccataaattaaccaatataggcatttttaggtaaatgttttaccatgtctggagttacgctgttctttatgtattgagagaactgtttcttgtaagcatcttcatcttcttccattaagtagcgcatgtaatctgcaacattctggcccatgatgtgcttccgatgtacttctgcattaaattccttgctttcagaatcataaccagggaatcgtttggtactaaaataaagttattcatattttagtatagactcacttaacttagtttactagtaagaatttactttagtagctgccatcagtcccgtcttgaaacaattatcgcatcatatgcaaccaaaggaccaactactgactgctcagttagtgggatatcatcattcagcagctcatctctgaattccaggacagaaaagaaattcatgctacaaaaacctttaaaagccattaccaaggctttccaccactacaaaattagtcatccagcacatcagcacaggaaggagtttcaaaacttatactctaaatcctttaattttcagtgggtacatgggaataagtgatttgtccaagatcacagttaatgaaattgtcaagtgagaatgctcttggtgtacttgcaactaactccccccacccacctccacatcataaaagcaaaatttcagttgggttgtattttaggcttaccaaaaattactatttcttggttaaatcaccaaatgctaaaatattcctaagaagttaataaatcaagatgcacagactcaacaacaaaaaatatcattaaaccaatggaactacaaattaacctacttaacttcccaaaatggcctacaatcttattcctagttgcaggtttagaaatctttcataagccttttcctcaaacttcttataaaattctaggatccacctttttgcataattcagtaaatcatttttattctgattgaaaaaagaaagtgcatggggaaagaggatggagttgctcatttctaataagaattaagtcatatgcaaaaggtagtggtttcaatcccatctctttcaataactggcccgaaaaacttgggacaaataactctgggcctcagactcttaatttataaaatgggctataattccttcctgccctactaggttcctcctgcatggtacctaggcatacagcaggcattcaattgatagctactttaattcggttatctccacagtccaactagttaaaaacagggaagtaccacggtccaggcaccaaggtcttaaatagtattcttacctgtgagggatagacaagcctccatccacagctcccttcagggcaccaaaaactttattgccagtggtagttctggcaaggcctgcatccaaatagcaggtgaaggcacctggctgaccatcaatgctttccacattgtattcatcaccagtcacctccacttggccttcatagatcttgtccatgccaaacctattgagaagctattcaagaaaccaatgtaaatgctggtttcaattattcaaactgctctaaaattaaaatagcttatgtcataaccgtaaggaccactgacatctggaaaagaaaatttccttccacacccaccctttcaccagatccacttgctcatgaatttttaaatgctatttaaaaaaaaaacttaaaacattcaatttcacttgaaacaattttgttttatgacttttgcatctttgctacatgtccacacttgacttatgcagcaatcaatgagaatgcataaacttgattcttatacttacaatgttccctccattaaaacatgtttataaccaatgagtgggttgtcatcaaccttgctgcacatgcttaacaattccattgcaaaacaaggtaaaaaactcagataataaaaacaaggcaaaatcccatcttcatctaccaggaaaaatgtttaaaacaaaaatgaatcttcccgtcaatggccactctccaaaacactaagattctcatttttttttttttttttttgagacacagtttcgctcttgttgcccaggctggagtgcaatggcgtgatctcagctcactgcaacctctgccttctgggttcaagtgattctcctgcctcagcctcccaagtagttgggactacagacacacaccatcatgcctggctttttttttttttctacttttttagtagagacagggcttcaccatgctggccaggctagtctcaaactcctgacctcaagtgatccaccctcctcggcctcccaaagtgctgggattataagtgtgagccaccgcgcctagccaagattctccagttttaatgtgcatataaatcacttggtacatactatcaaaatacagattccagaaggtctagagtggagt

SEQ ID NO: 1880188 - DNA, 4001 bp, Homo sapiens
cagactctgtctcgaaaaacaaaaaacccaagtgcaaagctgggtgtggtggcttatgcctgaaacctagcgctttgggaggcaaaggtggtaagattgcttgagcccaagatttcaagacctgggcaatgaagtgagaccctgtctctaccaaaaaaaataatttaaaaaaatgggtataggccaggcatggtggctcacgcccgtaatcccagcactttgggaggccaaggcaggcagatcatctgaggtcaggagttcaacaccagcctgaccaacagggaaaaaccctgtctctactaaaaatacaaaattagctaggtgtggtggcgcatgcctgtaaccccagctgctcgggaggctgaggcaagagaatcccttgaacccaggaggcagaggttgcggtgaggcgagatcacgccattgcactccagcctgggcaacaagagcaaaactttgtctcaaaaacaaaacaaaaaggggtgtagtgcctattgtctcagctacttggcaggctgaggcagtattacttgagccccgatgtaaaggctgcagtgaaccatgatcatgccactgcactccagcctgggtgacagagactgtctcaaaaaaagaaaaaaaaaaaaaatccaagtgcagatgtcaggcaggtcaggactaaagataagtgtttgacagggcaagtttaagtcaaagaagtgacccttggagaccaagcaaggcagaaatcactgttaatcttacaatgggtacaagatccttaaaattttttataagcaatatagcctgagattctaatcatgactcagccagcacaatattactgaaccccaaggttgggataccccctcatagcctctgccacatccctatccccaccaaaatgtggtgagaaatgttcccactatagacatagcccacataataaatctggccttcagggacatggagttgagaacagggactttacagtgtggtgagcctggctcaggacagtaggaggcagaggttaaggcaaggggttgcagccacccacccagatcagttttgcagggcaaggaaataaagcagagaaaacagtcatatattcaggcaacataaatgtgggaacaaaacaataaacacctttattacatgggtgaagacaaaacaaggatttatttgcctttgcgggccttgattttcctaagatagaactccaactctttgccctctagcacatagccatctgctcggccacactgtcccggccttgaagcgatgcacgctgcaagagagtaggtgatccttagcacaacgacaaggtggccctacccaaacctctccacccgcttaagaatctctgtgggttcaggtaccctgggggcaagcatgaagccagctgtctcctcagacacactttatcttcacttactgtcagtagcagaactggacaaagttttcatcactgagacagccccctcagcctgggcagagacttccccaaatacaaagactccaagcacgggcctatgcagactcttctacccaatgcttcccatttcagcttcatacgaatagggtgaccaaacgttcccctttgtgctcgcagcctgttatcagtgaaccctttagactgcatggctggcagtcaaaggaactgagacaagggaaaagtgcctcggcacactcaatctctgcgactccccacctccaacacaacagccttctcaccaagaagcttgccctgctggaactgctcctccaggagactgctgattttggcattctttttcctttcatcatatttcttctgaatttttttagatcgttttttgtttaaaatctcttcttcctcaggagtctgaaaaggggatacaaatatatgagctcagggaaggaaggcaggccctgggagctttctcgaaccctgcacaccccagtgctggccttcctcagcctaaaaggctctcatctctctcccttcagtagcagaactggacagagttttcatcacgagaaggctggagtcaggctgccctccccacaacccctacagggaagtaacacgcaccagcttggctcccttcttgcggcccaggggcagcgcatagtgggactcgtaccactgtcggtacggtgtgctgtcgatgagcacgatgcaattcttcaccagggtcttggtacgaaccagctcgttattagatgcattgtagacaacatcgatgatccttgttttacgagtacaacctgctcacaggagaaatttggcatcaagtaaactggaggacaaatggccctggcacactcctccaggttcttcagccccatgaggccttaaggagaaataagggaactctcagcctttacaagccatggggcatcagttcgtcttccacaaccccctaacccacgtttctagttatgtttggcaacccgcagtctttaccagccccaatctctcaggctgcagagttcagaaagatcagagcaggtcgggcacggtgactcacgcccgtaaccccagcactttgggaggtcaaggcgggtggatcacttaaagccaagaatttgagaccagcctggccaacatggtgaaaccccgtctctactaaaaatacagaagcagccgggtgtgatggcacacgcctgtaatcccagcttcttgggaggctgaggcaggagaatcacttcaacccaggaggcggaggctgcagtgaaccaagatcacgccactggcactccagcctgagcaacagagacccaatctcaaaaaaagagattggagcaggacagcctgggtggagagaactccccagctaccttaagatctttcagcaaggagaaacttcaaatgccttggtctaagccacagactacttgctaaaagcacttgaatctttttttttactgagagtctcgctctgttgcccaggctggactcgaactcctgacctcaggtgatccgcccgcctcggcctcccaacgtgctgggcttataggcgtgagccaccgcgccaggcccacttggtgaatcttaagaccgtttaggtgcgttttcccacccactcccaaagggcctcactcacactctgagccccaggagaaattccccacgtccaacctcagggcacggtatttcttgttacctccccgcacacggactgtgtggatgcggcgggggccaatctggaaaacacaaggttacaggaactaggttaccaaggagagcaaggcaagtgagggagaggaacctgggccgggaggaggcaacagtcagtgtaactatgacaagtccttgcattggcaagtggcacacaggtgaccaagacggccacaaccacgcctaaggattctttttcatcaccctacttgcctccaagaggaaagcctgaccccaaatgctgaaaattaagcctctgtaaaaaaaacaagactaggcttctgactatgacgcgaggcgccaccctctccagaagctcaagtccccacacagtatccttctctctgaaatcctaagctccaggtttgggggcctgagggagcattccctctttggtacttacttatccaacagctaaagggggacaggacacccaggccctactacagagaaatcagagcccaagaaagaacgcacaactgtcacacggaaagacccgagcacgctggagagcgggggaaggcgacctcccaggcggacaggcccacgctcgcacccaccttggtgttggcagctgggcgccccaactcatacttccgcttcttgtggtagggctttctcttgcccccggttttgcggcgcttgtgccagttgtcccgagagatgcctgcatgtggaagcggggaaggaagcttgagccactgtgactcggtgctagcgactcgccagctcccggagacccccgcgccgggccggtcgcacgctcagctctccaaggttggcttccccaccgcgcactcgggagtatgcagcattaccgagttgtcatcatacacgtgcggccaggccggggcctcct

SEQ ID NO: 1880189 - DNA, 4001 bp, Homo sapiens
gcatcatggaccatgaagcaagacgaaaacacacaggagggaaaatccagggattctttttctagggatgtaatacatatatttacaaataaaatgcctcaaggacaaaaaaaaaaagtgagctgggcatggcagtgcacacctagtaattccagccgctcaggaggctgaggcatgagaattgcttgaacccaggaggcggaggttgcagtgtgctgagattgcacaccactgtaatccagtctaggcaacggagtgactatctaaaaaaacccaaaaagcaggccgggtgcggtggctcacacctgtaatcccagcacttcggaaggccgaggtgggcagatcacgtgaggatgggagttcgagaccagcctgaccaacatggagaaaccccgtttctactacaaatacattatctgggcatgatggtgcacgcctgtaatcccagctacttgggaggctgaggcaggacaatcgcttgaacctgggaggtggaggttgtggtgagccaagatcccgccattgcactccagcctgggcaacagagccagactctgtctcgaaaaacaaaaaacccaagtgcaaagctgggtgtggtggcttatgcctgaaacctagcgctttgggaggcaaaggtggtaagattgcttgagcccaagatttcaagacctgggcaatgaagtgagaccctgtctctaccaaaaaaaataatttaaaaaaatgggtataggccaggcatggtggctcacgcccgtaatcccagcactttgggaggccaaggcaggcagatcatctgaggtcaggagttcaacaccagcctgaccaacagggaaaaaccctgtctctactaaaaatacaaaattagctaggtgtggtggcgcatgcctgtaaccccagctgctcgggaggctgaggcaagagaatcccttgaacccaggaggcagaggttgcggtgaggcgagatcacgccattgcactccagcctgggcaacaagagcaaaactttgtctcaaaaacaaaacaaaaaggggtgtagtgcctattgtctcagctacttggcaggctgaggcagtattacttgagccccgatgtaaaggctgcagtgaaccatgatcatgccactgcactccagcctgggtgacagagactgtctcaaaaaaagaaaaaaaaaaaaaatccaagtgcagatgtcaggcaggtcaggactaaagataagtgtttgacagggcaagtttaagtcaaagaagtgacccttggagaccaagcaaggcagaaatcactgttaatcttacaatgggtacaagatccttaaaattttttataagcaatatagcctgagattctaatcatgactcagccagcacaatattactgaaccccaaggttgggataccccctcatagcctctgccacatccctatccccaccaaaatgtggtgagaaatgttcccactatagacatagcccacataataaatctggccttcagggacatggagttgagaacagggactttacagtgtggtgagcctggctcaggacagtaggaggcagaggttaaggcaaggggttgcagccacccacccagatcagttttgcagggcaaggaaataaagcagagaaaacagtcatatattcaggcaacataaatgtgggaacaaaacaataaacacctttattacatgggtgaagacaaaacaaggatttatttgcctttgcgggccttgattttcctaagatagaactccaactctttgccctctagcacatagccatctgctcggccacactgtcccggccttgaagcgatgcacgctgcaagagagtaggtgatccttagcacaacgacaaggtggccctacccaaacctctccacccgcttaagaatctctgtgggttcaggtaccctgggggcaagcatgaagccagctgtctcctcagacacactttatcttcacttactgtcagtagcagaactggacaaagttttcatcactgagacagccccctcagcctgggcagagacttccccaaatacaaagactccaagcacgggcctatgcagactcttctacccaatgcttcccatttcagcttcatacgaatagggtgaccaaacgttcccctttgtgctcgcagcctgttatcagtgaaccctttagactgcatggctggcagtcaaaggaactgagacaagggaaaagtgcctcggcacactcaatctctgcgactccccacctccaacacaacagccttctcaccaagaagcttgccctgctggaactgctcctccaggagactgctgattttggcattctttttcctttcatcatatttcttctgaatttttttagatcgttttttgtttaaaatctcttcttcctcaggagtctgaaaaggggatacaaatatatgagctcagggaaggaaggcaggccctgggagctttctcgaaccctgcacaccccagtgctggccttcctcagcctaaaaggctctcatctctctcccttcagtagcagaactggacagagttttcatcacgagaaggctggagtcaggctgccctccccacaacccctacagggaagtaacacgcaccagcttggctcccttcttgcggcccaggggcagcgcatagtgggactcgtaccactgtcggtacggtgtgctgtcgatgagcacgatgcaattcttcaccagggtcttggtacgaaccagctcgttattagatgcattgtagacaacatcgatgatccttgttttacgagtacaacctgctcacaggagaaatttggcatcaagtaaactggaggacaaatggccctggcacactcctccaggttcttcagccccatgaggccttaaggagaaataagggaactctcagcctttacaagccatggggcatcagttcgtcttccacaaccccctaacccacgtttctagttatgtttggcaacccgcagtctttaccagccccaatctctcaggctgcagagttcagaaagatcagagcaggtcgggcacggtgactcacgcccgtaaccccagcactttgggaggtcaaggcgggtggatcacttaaagccaagaatttgagaccagcctggccaacatggtgaaaccccgtctctactaaaaatacagaagcagccgggtgtgatggcacacgcctgtaatcccagcttcttgggaggctgaggcaggagaatcacttcaacccaggaggcggaggctgcagtgaaccaagatcacgccactggcactccagcctgagcaacagagacccaatctcaaaaaaagagattggagcaggacagcctgggtggagagaactccccagctaccttaagatctttcagcaaggagaaacttcaaatgccttggtctaagccacagactacttgctaaaagcacttgaatctttttttttactgagagtctcgctctgttgcccaggctggactcgaactcctgacctcaggtgatccgcccgcctcggcctcccaacgtgctgggcttataggcgtgagccaccgcgccaggcccacttggtgaatcttaagaccgtttaggtgcgttttcccacccactcccaaagggcctcactcacactctgagccccaggagaaattccccacgtccaacctcagggcacggtatttcttgttacctccccgcacacggactgtgtggatgcggcgggggccaatctggaaaacacaaggttacaggaactaggttaccaaggagagcaaggcaagtgagggagaggaacctgggccgggaggaggcaacagtcagtgtaactatgacaagtccttgcattggcaagtggcacacaggtgaccaagacggccacaaccacgcctaaggattctttttcatcaccctacttgcctccaagaggaaagcctgaccccaaatgctgaaaattaagcctctgtaaaaaaaacaagactaggcttctgactatgacgcgaggcgccaccctctcc

SEQ ID NO: 1880190 - DNA, 4001 bp, Homo sapiens
agtaagcttcaaaggccactgcactctagcttgggtgaggcaagaccctgtctcaaaaaataagacaagacttttagccacatttacagacttcaattaaaatgctacatgggaatgcagaatatcagatattttattgtcatcaagtaatcagtgagagagttcaagttggattgagatcatcatgtattctgcaattataatagtcccaacatttccaatcctcacctttcaagcagtaagctgcatgcttgcttgttgtggtcattaaaaaccctgaaagcgaagccaacatattaatcagggcaaaatacaaatgtgtgatgcttgttagtagagtaacctcagaatcaaaatggaacggttttacagtgatatcattatatttcatttggcagaatcattacatcattggttacactgaaaatcatcacatgtaccaaaagctgactcacctagtttaggataacaggtctgcctgtttgaagatgaaaaataatacccatttaaaatttgccctactcaatttccttctcagtcacattttaacttttaaacagctaatcactcccatctacagattaaggtgtatatgccaccaaaaccttttgccaccttaaaaatttccttcaaagtttaaactaacctgcatttcttcaatcatgaattctgagtcctgaaattaagggacaatacacagtaagacaacttgcatacaattaggagtaatccaaaatctccaaacattatagaatggctatattccccttttcggggcataaactagaatgttaccgccagatacatcagataggagcgaaagacttaatattgctcatcagcgttagtctgctgaactatgttatcatcattgtatcggctttacaacacttaaaaaccagacttgaggcggggcatggtggctcacgcctgtaatcccagcactttgggaggtcagtgcgggcagtatcacttgaggtcaagagttcgagaccagcctggacaacatagctgtacaaaattagccaggcatggtgtcacatgcctgtaatcccagctactcaagaggctgaggcaggagaattccttgaacctgggaggcagaggttgcagtgaactgatagtgccgctgcactccattctgggcaagagctagactcttgtctaaaaaaaaaaaaaaaatacttggaactgctatacctttgcttctttaaaacttgctccacacagtgtagtcaagccgactctccatacctgtagaaatttaatctcctttaccaataggtagtaataggtggatttctaaaagatttcccaactactgtttcagtttaagattaatctccattttctttctcagagagattcccatctgctttaattttaaaatcatcactaacagtagctcaatcaattaacgttaacatcaataaaacatgtacctttaaaaggtatgacaggaactgtcttcatgtccttacccaagcaagtcatccatggataaaaacgttaccaggagctggaatacaaatgaggacttccattaaaatgctaaacatcattaaactcttttcaaagttgtctgtcacagggttcttcagtgttacctttgtctacatgctcatttcaggtcagacatttgatcaacatcattacacaaaccccgttccaaacatgctcaaggaaaacacataaacactgttccagacatgctcaaggaaaatacagtcagtattcatcagccaagccttaagccattagctcagcagtaagcatatcaccatcagcattttcattaagtctatctactgttttcattaatacttaccagaaccattaagctggtccaggcaagttggactccacctaagaaataagagtggtcttagaatagccacagatgagtgttcaccccctgccaaaactaacaaatgcctttagtcagttagagctaattaagaccttcatgttcagtcagcatttgcttatcatcatccaggctgcatttacaaactttcttattaatcataacaagacaagaatccgccatttatttaatgcattcagcactaggaggtaactaaaaagccatttgtgccgtaggaagtttgcccagttacctgcttacttggatacagtttcacttaccatttcaacttccagctttctgtctaatgcctgtaattttaatacaaaattgtcagcaaaaaatattttaatggtagattggtggtacactgcttaaccattaacagcaaaccacaactaccccagatacatcagacagatagtacatctcttcatgattaaatctgctgaactatgcaaccatcatagtatctgttttcacattttcttcagtattaaacttagtatcaatatgagagcaaaattctcatttgaaaagaggggagagaagcactaacatagataatcatcattgctttggctattttctaatcccttaaaagtgagaagtacaaaatagaggtgtctcacctgtgtgccaatggcttgagttaggcttgctctttaggacctgggaagaaacaacttcatgtgaacttaggtgtactctctatgttccccaactcaccattttgggtgcctcagttaagataatggtggttaagatcctcatcattctagcactcaagagtagcaaataaactgtcatcattgtggcacatccaatggctttaaacctttttgagagggaattttcaacttacttcagtagctattctcatccttccttggggacacaactagaaaacaaaaagatgcaagcaaaacagtgagaatgaacctcacagcagtcacgttaaatataaatgctgttaacattaaagcctcagaatagaatttcagaaatcccttctgtccactactcttaaagcatcacaggctgagaccacctcttagatttcattcttcccaccatactttccccaattcttacctgtccataaggtgctatccagagccacactgcatctgcacccagcaccatacctaaagagatcaggtacagattttaattcattgttccacggttcttttttttaaagagtgttctttaaaaaaacggttcgtctttttaaaccaatgatgcaggtaacataccattcattatctagcgacaggtaaaggatacacttaatgttacaaagaagcactgcacccgcagttaagaaccaccgatggcggccgggcgcggtggctcacggcttgtaatcccagtatgttgggggaccacggctggtggatcacctgaggtcaggagttcaagaccagtctcgccaacatggtgaaaccccgtctctactaaaaatataaaagcctagcatggtggcgcgcgcctgtagtcccagttacttgggaggctgaggcagaactgcttaactcgggacgcggaggttgccattaaccgatgtcgagccactgcattccagcctgggtgacagaacgaggctcggtctcaaaaaagaaaaaagaaacactaatggaaatattggtgacactgcggaatgcaggcacttaagcacgtggactaccaccgacagcctttcatgagagcggacggctgatggaggctcgggtcacggcccttaacaatagcttactcgggtgactcggcatgtgccaccatcagagcggttggcattcatcattactctcagatgtccctaccaacacaggcttcatcagaggcagggcacgagagccgaggcttctccgcagttctactctaacatagtcgcagcttaggtcacgcatgcaccatatgtgcaatcccccaccatcctcaacttgtaggccctgcaaaggcgcgcgactggcttagaagtcccagtcaattcagggtgaccttagcagacaaaggctggagcgccccaaaacccgcaacattcgcaaagataaaacatacctcacaggagtcgactcctacctcgaaaagacagtatggtgcctgggctcctgtatataagagttctttt

SEQ ID NO: 1880191 - DNA, 4001 bp, Homo sapiens
caactctttttaagttgtcaagcacatccttttgtctctgtgtatataaccttttctcaaatatgcagactctcctgttattgaataaaattagatagtatcaagaaaactcaaatctttaaagtataattttctacatataaattttaacttggcattccaagatactcaagtatactaactcacatccacacaaagtcctgatcttcccatctcagcacccagtagtaccagaaagactttaaaccaccaggtagatgttcactaatatcaaaatcaaatagctccatttagctattttacagtatttacacatactgaagataaaaattttaccctccaaggtctcagtgtaattttagaactcacatcaactttagattcagctaatacatgccattacatcattgaccttgtaggacagcttcacttgtaacaaaactttttgaccaaatcctgatacagtttcaatttccaactctgaagtaagagaacatactatcaagatcgttgcaattttgattagtatttacctggacagcactaagagtgtataaaagatgaggatcatgtccgatactagcacttattccaccacattcatgttggcaagacttaataaatgccagaatctcttctctattcatgcgatgaagttgtcccatgagatccattactgtcagaccccaatagatgccactcattctcaaatactcagacatacagtattcctaaaataatacacaatttcttaaatctgtcatttgaactggtaacaagttataaagagattaaacacaaaggtaactcattagccatgctgctatttttacctctcctgaccttaacagcactgatcagtagtgagtttaaaatctgtgctgctcaatgttagaagccatcttcagacacaactattatcagaaaaaaacaattatctgagaagcacaggattagttaatctatggctgacaatacaaacagtgctttagtttctcccatgagccagagacagaaaaacatctacctttttcatcagtgaagttcagggagagtatttctttccgagtacctataccatatttatcagacatctattttaatgtggactctgtacaaaacctattatctattagtaaattatataactacatgaaaaatcaaaatgccctaaacatgccaaagatgtttaagcccagataaaacagtggctaatcaatgatacatgaaaattagtattaggattccagaaacaaatttttcccacactcaacaatgcattatattttaagaagttttgtggctgggtggtggctcctgcctgtaatcccagcactttggaaagctggggcaggcagatcacttgaggtcaggagtttgagaccactctggccaacatagcaaaactcagtctctacgaaaaatacaaaaactagctgggcatggtggaatgtgcctgtaatcccagctattcaggtggctcacttaaacccaggagatggaggctgcagtgagcccagatcgcaccgctgtcctccagtctgggcaacaaagtgaggttatagctctcaaaaggaaaaaaagaagtttttttaacaggtggtgcatcttagtttgctactaacccaaattcagggcataaagatagatagcagataaaggcagaaacgagtccagccccatccatatggccttaactccatgattgctaatagagtattttcaaggttatgggaacctaacacttaagtaaaaaattaatacataccatatatcccacaaatcggtagactaagacaactgagtttggatactacagggaaaaacatttactcttaactaagttgtttactactttttgctaagattgtcccagagttttcctcgaaatttaaaaatttaaggtaaaactttttcaaggtctcagagtaattctagagctaaagtgttattacacatcagcaatagattcagataatacatgccaacacatcattgaccttgaaagtattacccctaactacaaaaagagaaacccgttttgtacctcaaaccctcatctactttgtctggcaagccctctcagtataggtaaaaactgagattctaataagcccacagcctcagacgtccaaagcacacttaactgaagttcaaaggcacagcacatcctcagttctctgcatggagttggatgccattttaagacataaatactgtctcactgcttatgactgtcacacttctttaaaataaactttccaacataaaaaaattatacatacataatcatctttctttgagccataggatgcgatataatctgcatgtttctccaataacaaagtgtccggtgcatctgacttgataataacatccttctgtggagtgccctttcaaaataaagtggtaatctcatcaatgtttacctctacaacgttcttctgccccacagcatagattcaacatacatctcaattttcacttgatttcatcttgtaataggaaaacgttccatttaaaaattgtaactaactagggaggctgaggtagaagatcgcttgagccagggaaattaaggctgcagtgaactgaggttgtgtcactgcactccatcctgggcgaccggagaccgactcaaaaacaaaaccaaaacaacaacaacaacaacaaattgtatccaacaaaaaagaacttaaatcattcaggcttcgtcttagtcacgattcaggtaattttcaggtctcagagtaattctagagctaaagtagtaataatcaactttagattcagaatacatgccaactcatcattgacccaaaaaattaccaccagcatttcttgttgttcacttttcattcaaaaagataagtaaaaaataaacaccatagaatatcaaagcttatcatttcaggacaacttacggtttacatgtggcagaaagcatatttttaaaaaataaaaaaatctaacccttaacttgcaagcgaattcttgcttaatcaaatgcaggtttcaaagcaccttctaagtaccccaaaagttgttcaaatgtattaaataagcagttcctttagctccatcttctccacctttaatccgagtctctgtatttgcagaagtccccatgtgatgcggctctagttcttttcgtatctatatcttcctcattgagagtacactgcagtcactataacaggtcatgaagattaccggaagtgattaagtaccgaattttcttctgatcccattaaaaatcttaaagcgagaccacatcactaacgattttaaagaaatctttgacaccccctctccaagaaaaaaaaaagccaccaatcagccacagctttttagaggggttcagaaatcgggctgctcaactcttaacaggccctccctacagaagaaggcctggataaaattagaagcggcattgcccgcgaggtctgcagaaaacgctgagtaatatttcacactcaaaaaaccttccaaggcctgtgtcctaaccattctccagcaccaggaaaccaatcctaaggtgaccagtgtgcttaaccctactccaccctgtctgctaccaacccatccggacagcagcgctaaactcacacttaccatgtctaacagggaaaggagagagcagggtcagttcctgggtagacttaggagccgggcgcctgcgcagatgcgcctctcaggcccccatcgcgctccgatatagctgaccacactttcgcctgcaaggcagagcagttccacggctgccgtaggaccccactgatcgctcataggtgtcctcactgcctgcgtccaaagtcctgcgaccatatgcttgtcccatagtcactccgatttgtctagaaacagttttaaataatatttaaatatctgagttgcttttaagaaatcatttgttctagctggacgcggtggcttacgcctgtaatcccagcactttgggaagccggacagcaggattgcttgatcctaggagtgtaacc

SEQ ID NO: 1880192 - DNA, 4001 bp, Homo sapiens
atagcatcaagcttcccctacaaacaaaaaaaaagatgcctgttaaattccagagtattcagcagatcagactcaaaaaaaaaaaaaattccagagtattcatgaactttaatcatttcaatcaaatattcaaagcttaccaacaaagccaaagttgccaccgcacaaaaagagaatcttgtgtcaatttctcctacaataaaaatagatcaaatcaaggcaggtgttaccaaatcatacatgagtcatctaaaaacaaacactgcacaactaccactttaaattgagttcaagcttaactttcactttagggtagtcaggaggaaagctaaatctgaagtgcctttacttcccaagaaaattcctttgtcaaaaataacagcaaattgaccaggcacagtagctcttgcctataattccaacattttgggaggctgaggtgggagaatcacttgagcctaggagtttgagactagccgaggcaacataatgggaccccatctctacaaaaaactttttaaaaaaaattaggtggggctgggcattgtggctcaggcctgaaatcccagcacttttggtggccgaggcaggaggatcacatgaggccaggggaccccatctctactaaaaacacaaaaaccagccaggtgttgtggtgcacatctcagctactctgtaagctgaggcaggagaattgcttgagcttgggaggtggaggttgcagtgagccaagattgcaccactgcactccagcctgggcaacagagctctccagccccagcaactgtctcccaaaatactgcactccaacctggacagagccaagaccctgccacaaaaaagtaacagcaaattatcttaagctgcttaaagaaagcccagaaagagaagaaaaccaaagagaagaaaactaatagaacccaaagtattagtccatttctaataatgaaataaacttaccctactttataaaagtagatttttcacatcccatgaagcagctggtctctctggcctgcactgtgttcatccctaaagcagagattatctacgtttatcaaataaaattctattccctccctccactcaaatattcagcaagtttgtaaagtttttttttttaaatatttttccctttccagcaagtagtttttaaaaaactttacaaagccaccaaatattggggaaaaaaattccacctaccttatcttttagactggccccctctgttccagtgctcctgtatatgctgatataactaccacagtgcatgctggaagttccagcagaccattaactccagttagaccagctgcttagtgggacctgaaaagatgaaaaacttataaactggttactagcaaaaccagtacattttaatattggtattttgggtagaatggactaaatctgacattaccccaaatatctccagcaaaagaaccatcttctttctgtagacctttaacatattccacaactttatttacgtcaataacattaatactgtcatacagcgtaagaatctgcaataaagacaagtattaggtaaatgtccctttcaggtttattctaatgatcttatgctcaactctttttaagttgtcaagcacatccttttgtctctgtgtatataaccttttctcaaatatgcagactctcctgttattgaataaaattagatagtatcaagaaaactcaaatctttaaagtataattttctacatataaattttaacttggcattccaagatactcaagtatactaactcacatccacacaaagtcctgatcttcccatctcagcacccagtagtaccagaaagactttaaaccaccaggtagatgttcactaatatcaaaatcaaatagctccatttagctattttacagtatttacacatactgaagataaaaattttaccctccaaggtctcagtgtaattttagaactcacatcaactttagattcagctaatacatgccattacatcattgaccttgtaggacagcttcacttgtaacaaaactttttgaccaaatcctgatacagtttcaatttccaactctgaagtaagagaacatactatcaagatcgttgcaattttgattagtatttacctggacagcactaagagtgtataaaagatgaggatcatgtccgatactagcacttattccaccacattcatgttggcaagacttaataaatgccagaatctcttctctattcatgcgatgaagttgtcccatgagatccattactgtcagaccccaatagatgccactcattctcaaatactcagacatacagtattcctaaaataatacacaatttcttaaatctgtcatttgaactggtaacaagttataaagagattaaacacaaaggtaactcattagccatgctgctatttttacctctcctgaccttaacagcactgatcagtagtgagtttaaaatctgtgctgctcaatgttagaagccatcttcagacacaactattatcagaaaaaaacaattatctgagaagcacaggattagttaatctatggctgacaatacaaacagtgctttagtttctcccatgagccagagacagaaaaacatctacctttttcatcagtgaagttcagggagagtatttctttccgagtacctataccatatttatcagacatctattttaatgtggactctgtacaaaacctattatctattagtaaattatataactacatgaaaaatcaaaatgccctaaacatgccaaagatgtttaagcccagataaaacagtggctaatcaatgatacatgaaaattagtattaggattccagaaacaaatttttcccacactcaacaatgcattatattttaagaagttttgtggctgggtggtggctcctgcctgtaatcccagcactttggaaagctggggcaggcagatcacttgaggtcaggagtttgagaccactctggccaacatagcaaaactcagtctctacgaaaaatacaaaaactagctgggcatggtggaatgtgcctgtaatcccagctattcaggtggctcacttaaacccaggagatggaggctgcagtgagcccagatcgcaccgctgtcctccagtctgggcaacaaagtgaggttatagctctcaaaaggaaaaaaagaagtttttttaacaggtggtgcatcttagtttgctactaacccaaattcagggcataaagatagatagcagataaaggcagaaacgagtccagccccatccatatggccttaactccatgattgctaatagagtattttcaaggttatgggaacctaacacttaagtaaaaaattaatacataccatatatcccacaaatcggtagactaagacaactgagtttggatactacagggaaaaacatttactcttaactaagttgtttactactttttgctaagattgtcccagagttttcctcgaaatttaaaaatttaaggtaaaactttttcaaggtctcagagtaattctagagctaaagtgttattacacatcagcaatagattcagataatacatgccaacacatcattgaccttgaaagtattacccctaactacaaaaagagaaacccgttttgtacctcaaaccctcatctactttgtctggcaagccctctcagtataggtaaaaactgagattctaataagcccacagcctcagacgtccaaagcacacttaactgaagttcaaaggcacagcacatcctcagttctctgcatggagttggatgccattttaagacataaatactgtctcactgcttatgactgtcacacttctttaaaataaactttccaacataaaaaaattatacatacataatcatctttctttgagccataggatgcgatataatctgcatgtttctccaataacaaagtgtccggtgcatctgacttgataataacatccttctgtggagtgccctttcaaaataaagtggtaa

SEQ ID NO: 1880193 - DNA, 4001 bp, Homo sapiens
atgctgctatttttacctctcctgaccttaacagcactgatcagtagtgagtttaaaatctgtgctgctcaatgttagaagccatcttcagacacaactattatcagaaaaaaacaattatctgagaagcacaggattagttaatctatggctgacaatacaaacagtgctttagtttctcccatgagccagagacagaaaaacatctacctttttcatcagtgaagttcagggagagtatttctttccgagtacctataccatatttatcagacatctattttaatgtggactctgtacaaaacctattatctattagtaaattatataactacatgaaaaatcaaaatgccctaaacatgccaaagatgtttaagcccagataaaacagtggctaatcaatgatacatgaaaattagtattaggattccagaaacaaatttttcccacactcaacaatgcattatattttaagaagttttgtggctgggtggtggctcctgcctgtaatcccagcactttggaaagctggggcaggcagatcacttgaggtcaggagtttgagaccactctggccaacatagcaaaactcagtctctacgaaaaatacaaaaactagctgggcatggtggaatgtgcctgtaatcccagctattcaggtggctcacttaaacccaggagatggaggctgcagtgagcccagatcgcaccgctgtcctccagtctgggcaacaaagtgaggttatagctctcaaaaggaaaaaaagaagtttttttaacaggtggtgcatcttagtttgctactaacccaaattcagggcataaagatagatagcagataaaggcagaaacgagtccagccccatccatatggccttaactccatgattgctaatagagtattttcaaggttatgggaacctaacacttaagtaaaaaattaatacataccatatatcccacaaatcggtagactaagacaactgagtttggatactacagggaaaaacatttactcttaactaagttgtttactactttttgctaagattgtcccagagttttcctcgaaatttaaaaatttaaggtaaaactttttcaaggtctcagagtaattctagagctaaagtgttattacacatcagcaatagattcagataatacatgccaacacatcattgaccttgaaagtattacccctaactacaaaaagagaaacccgttttgtacctcaaaccctcatctactttgtctggcaagccctctcagtataggtaaaaactgagattctaataagcccacagcctcagacgtccaaagcacacttaactgaagttcaaaggcacagcacatcctcagttctctgcatggagttggatgccattttaagacataaatactgtctcactgcttatgactgtcacacttctttaaaataaactttccaacataaaaaaattatacatacataatcatctttctttgagccataggatgcgatataatctgcatgtttctccaataacaaagtgtccggtgcatctgacttgataataacatccttctgtggagtgccctttcaaaataaagtggtaatctcatcaatgtttacctctacaacgttcttctgccccacagcatagattcaacatacatctcaattttcacttgatttcatcttgtaataggaaaacgttccatttaaaaattgtaactaactagggaggctgaggtagaagatcgcttgagccagggaaattaaggctgcagtgaactgaggttgtgtcactgcactccatcctgggcgaccggagaccgactcaaaaacaaaaccaaaacaacaacaacaacaacaaattgtatccaacaaaaaagaacttaaatcattcaggcttcgtcttagtcacgattcaggtaattttcaggtctcagagtaattctagagctaaagtagtaataatcaactttagattcagaatacatgccaactcatcattgacccaaaaaattaccaccagcatttcttgttgttcacttttcattcaaaaagataagtaaaaaataaacaccatagaatatcaaagcttatcatttcaggacaacttacggtttacatgtggcagaaagcatatttttaaaaaataaaaaaatctaacccttaacttgcaagcgaattcttgcttaatcaaatgcaggtttcaaagcaccttctaagtaccccaaaagttgttcaaatgtattaaataagcagttcctttagctccatcttctccacctttaatccgagtctctgtatttgcagaagtccccatgtgatgcggctctagttcttttcgtatctatatcttcctcattgagagtacactgcagtcactataacaggtcatgaagattaccggaagtgattaagtaccgaattttcttctgatcccattaaaaatcttaaagcgagaccacatcactaacgattttaaagaaatctttgacaccccctctccaagaaaaaaaaaagccaccaatcagccacagctttttagaggggttcagaaatcgggctgctcaactcttaacaggccctccctacagaagaaggcctggataaaattagaagcggcattgcccgcgaggtctgcagaaaacgctgagtaatatttcacactcaaaaaaccttccaaggcctgtgtcctaaccattctccagcaccaggaaaccaatcctaaggtgaccagtgtgcttaaccctactccaccctgtctgctaccaacccatccggacagcagcgctaaactcacacttaccatgtctaacagggaaaggagagagcagggtcagttcctgggtagacttaggagccgggcgcctgcgcagatgcgcctctcaggcccccatcgcgctccgatatagctgaccacactttcgcctgcaaggcagagcagttccacggctgccgtaggaccccactgatcgctcataggtgtcctcactgcctgcgtccaaagtcctgcgaccatatgcttgtcccatagtcactccgatttgtctagaaacagttttaaataatatttaaatatctgagttgcttttaagaaatcatttgttctagctggacgcggtggcttacgcctgtaatcccagcactttgggaagccggacagcaggattgcttgatcctaggagtgtaaccacccaatattgtggttcactttgcctgctgctgaccgatagcccatttatcaagacaggggacttgcaatggagtctccccaagcagtattcagagtttttaaagataattcggcgattaggggcttgggaagtagggagtgctgatgggtcaggttggagatggactcatagtgggtagacgtgagtttttcttgctgttttctgttcctgggtaggatggcagaactggttgagccaaattaccaatctgggtggtttcaactgatccatggagagcagggtctgcaaaatatctcaagaacttatcttaggttttacaatagtgatgttatccccaggagcaatttggggaggttcagaaacttggagccagaggctgcatgacctctaaactgtaatttctaatcttgtagctaatctgttggttctgcaaaggcagactggtccccaggcaaaaaagcggtctttttgggaaagggatattatcaattttgtttcagagtcaaaccataaactgaattcctccctaaattggttcagcctaggctcaggaatgaagaaggacagcttaaaagttagaagcggccggtggctcacgcctgtaatcccagcactttgggaggccaaggcgggcggatcacgaggtcaggggatcgagaccatcctggctaaaaccccgtctctactacaaatacaaaaaattagccgggcgtgggggtgggcgcctgtagtcccatctactcctgaggttgaggcaggagaatggcttaaacccgggaggcggagcttgcagtgagcagagatcacgccactgc

SEQ ID NO: 1880194 - DNA, 4001 bp, Homo sapiens
tcaggtaccctgggggcaagcatgaagccagctgtctcctcagacacactttatcttcacttactgtcagtagcagaactggacaaagttttcatcactgagacagccccctcagcctgggcagagacttccccaaatacaaagactccaagcacgggcctatgcagactcttctacccaatgcttcccatttcagcttcatacgaatagggtgaccaaacgttcccctttgtgctcgcagcctgttatcagtgaaccctttagactgcatggctggcagtcaaaggaactgagacaagggaaaagtgcctcggcacactcaatctctgcgactccccacctccaacacaacagccttctcaccaagaagcttgccctgctggaactgctcctccaggagactgctgattttggcattctttttcctttcatcatatttcttctgaatttttttagatcgttttttgtttaaaatctcttcttcctcaggagtctgaaaaggggatacaaatatatgagctcagggaaggaaggcaggccctgggagctttctcgaaccctgcacaccccagtgctggccttcctcagcctaaaaggctctcatctctctcccttcagtagcagaactggacagagttttcatcacgagaaggctggagtcaggctgccctccccacaacccctacagggaagtaacacgcaccagcttggctcccttcttgcggcccaggggcagcgcatagtgggactcgtaccactgtcggtacggtgtgctgtcgatgagcacgatgcaattcttcaccagggtcttggtacgaaccagctcgttattagatgcattgtagacaacatcgatgatccttgttttacgagtacaacctgctcacaggagaaatttggcatcaagtaaactggaggacaaatggccctggcacactcctccaggttcttcagccccatgaggccttaaggagaaataagggaactctcagcctttacaagccatggggcatcagttcgtcttccacaaccccctaacccacgtttctagttatgtttggcaacccgcagtctttaccagccccaatctctcaggctgcagagttcagaaagatcagagcaggtcgggcacggtgactcacgcccgtaaccccagcactttgggaggtcaaggcgggtggatcacttaaagccaagaatttgagaccagcctggccaacatggtgaaaccccgtctctactaaaaatacagaagcagccgggtgtgatggcacacgcctgtaatcccagcttcttgggaggctgaggcaggagaatcacttcaacccaggaggcggaggctgcagtgaaccaagatcacgccactggcactccagcctgagcaacagagacccaatctcaaaaaaagagattggagcaggacagcctgggtggagagaactccccagctaccttaagatctttcagcaaggagaaacttcaaatgccttggtctaagccacagactacttgctaaaagcacttgaatctttttttttactgagagtctcgctctgttgcccaggctggactcgaactcctgacctcaggtgatccgcccgcctcggcctcccaacgtgctgggcttataggcgtgagccaccgcgccaggcccacttggtgaatcttaagaccgtttaggtgcgttttcccacccactcccaaagggcctcactcacactctgagccccaggagaaattccccacgtccaacctcagggcacggtatttcttgttacctccccgcacacggactgtgtggatgcggcgggggccaatctggaaaacacaaggttacaggaactaggttaccaaggagagcaaggcaagtgagggagaggaacctgggccgggaggaggcaacagtcagtgtaactatgacaagtccttgcattggcaagtggcacacaggtgaccaagacggccacaaccacgcctaaggattctttttcatcaccctacttgcctccaagaggaaagcctgaccccaaatgctgaaaattaagcctctgtaaaaaaaacaagactaggcttctgactatgacgcgaggcgccaccctctccagaagctcaagtccccacacagtatccttctctctgaaatcctaagctccaggtttgggggcctgagggagcattccctctttggtacttacttatccaacagctaaagggggacaggacacccaggccctactacagagaaatcagagcccaagaaagaacgcacaactgtcacacggaaagacccgagcacgctggagagcgggggaaggcgacctcccaggcggacaggcccacgctcgcacccaccttggtgttggcagctgggcgccccaactcatacttccgcttcttgtggtagggctttctcttgcccccggttttgcggcgcttgtgccagttgtcccgagagatgcctgcatgtggaagcggggaaggaagcttgagccactgtgactcggtgctagcgactcgccagctcccggagacccccgcgccgggccggtcgcacgctcagctctccaaggttggcttccccaccgcgcactcgggagtatgcagcattaccgagttgtcatcatacacgtgcggccaggccggggcctcctcctcgcggcagccatgttggcgccgctcggagcccgcagcccgcggcccggaacccggagcccagagccttcgcagcccccagagacgggctgggcggccgaaacccgagggccaccactcctcgtggctgtccctggccgggggtcggggcgtctggactcctcagtaggctgtgaagcaggatggggcctgattgagctcaacctcccttcacccgcctcaatgcagagcgacactcacccatcgctcggcgctggctggaaagagaaaccgcaaagattcacggttcggtttgtaaaacgctgccccgcccctttactttacgttgtttctgagcgccgaaacaacgtcgggcgacgagacttacgtgtcagctgccgcgcctagggccacgagcctaggagggtctcgcaggctgctgacctctgccgacccccggcgactcgcctccgaccctgggctgggggaagggggtctgcggcgtcggcagatctgggcgtgtttagactagtttcagaggctgctgcggtcgtttaggatgagatgtgggtgcggctgcgttgaaaaagagtggaaggcaatggaattggaaacgagtgtggacttgggttttgttttgaagggtttggtggtagattggacatggggattgagggagagggcggtgtcaaggattcctaagattgtcacttgatcaatcggataaatattggggccatttactgagatggggtaggctaaggtaggagctgttctggacacgttcattttgagatcttgctaagtcatgttgagtgggactaacagataggaagctgaatattaatgactggtcatccttataagggatctgcaccgaagatgttattttgggaatcgttggcttataaatggtaattaaagccaccagaatgaacggaacttaggaagagagtataaaggagggatcagctaacttttctgagctagaaggatatctattttttaattaaaaaaaatttttaggcctggcgcggtggctcacgcctgtaatctcagcacttttgggaggcggaggcgggcggatcacgaggtcaggagttcgagaccagcctggccaacatggtgaaaccgcgtgtctactaaaaaaatacaaaatttagttgagcatggtgacgcacacctgtaatcccagctactcagggaggctgaggcaggagaatcgcttgaaccagggagctggaggttgcagtgagccgagatcgcaccactgcactccagtctggcgacagagcgaaactccgtctcaaaacaaaacaaacaaacaaaacaaaattagccgggcgtggtggcgggcgcctgtaattcca

SEQ ID NO: 1880195 - DNA, 4001 bp, Homo sapiens
tttcactatgttggtcaggctggtctcaaactcctgaccgtgtgatccacccgcctcggcctcccaaagtggtgggattacaggcatgaaccaccacgcccagccttcttttttcctttgagaaagtctcaccctggcacccaggctggagtgcagtggcaggatcacgggtcactgcaacctcagcctcccaggttcagttcccctgcctcagcctcccgaatagctgggactacaatagcccaccactacacccggctagatttttgtatttttagtagagatggggtttcaccatattggccaggttggtcttgaaatcctgacctcaggtaatctgcccacctcagcacccagccaggtggtggtagttgttttacagcctgtgtgagacattcgggtgagccccaggaaatgaaagaatgtgcttatttgggggagggggaggccttttttcttagacaaaattgggcattcccaacttacacgcatttagtgcataagctgacatttcaatgagattgtgaaatgacaatgggaagggccctgaaaaaaacatcaagcataaaaggcctgggaggccgggcactgcggctcaggcctgtgaaatcccagcactttgggaggatggggtttcgtctctactaaaaataccaaaatgagttggttgtgatggtaggtgcctatagtcctagctacaagaggctgaagagaatcgcttgaacccgggaggtagaggttgcagtgagcagcggttgagatcatgccattgcactccagcctgggcaacaggattcagtctcaaaaaaaggaaaattcagagagtaactgaagttttatcattaatgggactaaagtgctttagcccagaaacagatttgtaaaaccattactgctaacaaagacatcattataagcacagctgtactgacactgaaattaaaatttgacccatcttggaattttggccccttggtcctgtttccctgggacagattgccttaaaccagttgtgccctttatacccacttttggcatccctaaacacttagtgcttgccaaaaacctatcaccatggctatggattgtagattttcccaattccattaatgcctatcactagttgggcatttctatagtattttctataacttattttcccagcctcagactcaacatgactttctccaagtagctccatcaatactttaagctcaaaaccaattagcacaggggcctatgaaacctgacaatttgctcatatggagaattaggaaatattgcactttaatgcataagacaccttgtaaaatacccataaaattttaactggctgcagtgttaatgaagcaaataccatggagttataatagcttttgaatgtgatttatgcttacagctaatgaacagatgaaaagcactgtccttttttaagtaaacactacacactccagatggattgcaaaaatttattaaaattggagacactgttttaatcttcttgtgccatgagactccatcaggcagtctacaaagaccactgggaggctgaggatcacttgagcccagaagtttgaggctgtagtaagcttcaaaggccactgcactctagcttgggtgaggcaagaccctgtctcaaaaaataagacaagacttttagccacatttacagacttcaattaaaatgctacatgggaatgcagaatatcagatattttattgtcatcaagtaatcagtgagagagttcaagttggattgagatcatcatgtattctgcaattataatagtcccaacatttccaatcctcacctttcaagcagtaagctgcatgcttgcttgttgtggtcattaaaaaccctgaaagcgaagccaacatattaatcagggcaaaatacaaatgtgtgatgcttgttagtagagtaacctcagaatcaaaatggaacggttttacagtgatatcattatatttcatttggcagaatcattacatcattggttacactgaaaatcatcacatgtaccaaaagctgactcacctagtttaggataacaggtctgcctgtttgaagatgaaaaataatacccatttaaaatttgccctactcaatttccttctcagtcacattttaacttttaaacagctaatcactcccatctacagattaaggtgtatatgccaccaaaaccttttgccaccttaaaaatttccttcaaagtttaaactaacctgcatttcttcaatcatgaattctgagtcctgaaattaagggacaatacacagtaagacaacttgcatacaattaggagtaatccaaaatctccaaacattatagaatggctatattccccttttcggggcataaactagaatgttaccgccagatacatcagataggagcgaaagacttaatattgctcatcagcgttagtctgctgaactatgttatcatcattgtatcggctttacaacacttaaaaaccagacttgaggcggggcatggtggctcacgcctgtaatcccagcactttgggaggtcagtgcgggcagtatcacttgaggtcaagagttcgagaccagcctggacaacatagctgtacaaaattagccaggcatggtgtcacatgcctgtaatcccagctactcaagaggctgaggcaggagaattccttgaacctgggaggcagaggttgcagtgaactgatagtgccgctgcactccattctgggcaagagctagactcttgtctaaaaaaaaaaaaaaaatacttggaactgctatacctttgcttctttaaaacttgctccacacagtgtagtcaagccgactctccatacctgtagaaatttaatctcctttaccaataggtagtaataggtggatttctaaaagatttcccaactactgtttcagtttaagattaatctccattttctttctcagagagattcccatctgctttaattttaaaatcatcactaacagtagctcaatcaattaacgttaacatcaataaaacatgtacctttaaaaggtatgacaggaactgtcttcatgtccttacccaagcaagtcatccatggataaaaacgttaccaggagctggaatacaaatgaggacttccattaaaatgctaaacatcattaaactcttttcaaagttgtctgtcacagggttcttcagtgttacctttgtctacatgctcatttcaggtcagacatttgatcaacatcattacacaaaccccgttccaaacatgctcaaggaaaacacataaacactgttccagacatgctcaaggaaaatacagtcagtattcatcagccaagccttaagccattagctcagcagtaagcatatcaccatcagcattttcattaagtctatctactgttttcattaatacttaccagaaccattaagctggtccaggcaagttggactccacctaagaaataagagtggtcttagaatagccacagatgagtgttcaccccctgccaaaactaacaaatgcctttagtcagttagagctaattaagaccttcatgttcagtcagcatttgcttatcatcatccaggctgcatttacaaactttcttattaatcataacaagacaagaatccgccatttatttaatgcattcagcactaggaggtaactaaaaagccatttgtgccgtaggaagtttgcccagttacctgcttacttggatacagtttcacttaccatttcaacttccagctttctgtctaatgcctgtaattttaatacaaaattgtcagcaaaaaatattttaatggtagattggtggtacactgcttaaccattaacagcaaaccacaactaccccagatacatcagacagatagtacatctcttcatgattaaatctgctgaactatgcaaccatcatagtatctgttttcacattttcttcagtattaaacttagtatcaatatgagagcaaaattctcatttgaaaagaggggagagaa

SEQ ID NO: 1880196 - DNA, 4001 bp, Homo sapiens
tggacagagttttcatcacgagaaggctggagtcaggctgccctccccacaacccctacagggaagtaacacgcaccagcttggctcccttcttgcggcccaggggcagcgcatagtgggactcgtaccactgtcggtacggtgtgctgtcgatgagcacgatgcaattcttcaccagggtcttggtacgaaccagctcgttattagatgcattgtagacaacatcgatgatccttgttttacgagtacaacctgctcacaggagaaatttggcatcaagtaaactggaggacaaatggccctggcacactcctccaggttcttcagccccatgaggccttaaggagaaataagggaactctcagcctttacaagccatggggcatcagttcgtcttccacaaccccctaacccacgtttctagttatgtttggcaacccgcagtctttaccagccccaatctctcaggctgcagagttcagaaagatcagagcaggtcgggcacggtgactcacgcccgtaaccccagcactttgggaggtcaaggcgggtggatcacttaaagccaagaatttgagaccagcctggccaacatggtgaaaccccgtctctactaaaaatacagaagcagccgggtgtgatggcacacgcctgtaatcccagcttcttgggaggctgaggcaggagaatcacttcaacccaggaggcggaggctgcagtgaaccaagatcacgccactggcactccagcctgagcaacagagacccaatctcaaaaaaagagattggagcaggacagcctgggtggagagaactccccagctaccttaagatctttcagcaaggagaaacttcaaatgccttggtctaagccacagactacttgctaaaagcacttgaatctttttttttactgagagtctcgctctgttgcccaggctggactcgaactcctgacctcaggtgatccgcccgcctcggcctcccaacgtgctgggcttataggcgtgagccaccgcgccaggcccacttggtgaatcttaagaccgtttaggtgcgttttcccacccactcccaaagggcctcactcacactctgagccccaggagaaattccccacgtccaacctcagggcacggtatttcttgttacctccccgcacacggactgtgtggatgcggcgggggccaatctggaaaacacaaggttacaggaactaggttaccaaggagagcaaggcaagtgagggagaggaacctgggccgggaggaggcaacagtcagtgtaactatgacaagtccttgcattggcaagtggcacacaggtgaccaagacggccacaaccacgcctaaggattctttttcatcaccctacttgcctccaagaggaaagcctgaccccaaatgctgaaaattaagcctctgtaaaaaaaacaagactaggcttctgactatgacgcgaggcgccaccctctccagaagctcaagtccccacacagtatccttctctctgaaatcctaagctccaggtttgggggcctgagggagcattccctctttggtacttacttatccaacagctaaagggggacaggacacccaggccctactacagagaaatcagagcccaagaaagaacgcacaactgtcacacggaaagacccgagcacgctggagagcgggggaaggcgacctcccaggcggacaggcccacgctcgcacccaccttggtgttggcagctgggcgccccaactcatacttccgcttcttgtggtagggctttctcttgcccccggttttgcggcgcttgtgccagttgtcccgagagatgcctgcatgtggaagcggggaaggaagcttgagccactgtgactcggtgctagcgactcgccagctcccggagacccccgcgccgggccggtcgcacgctcagctctccaaggttggcttccccaccgcgcactcgggagtatgcagcattaccgagttgtcatcatacacgtgcggccaggccggggcctcctcctcgcggcagccatgttggcgccgctcggagcccgcagcccgcggcccggaacccggagcccagagccttcgcagcccccagagacgggctgggcggccgaaacccgagggccaccactcctcgtggctgtccctggccgggggtcggggcgtctggactcctcagtaggctgtgaagcaggatggggcctgattgagctcaacctcccttcacccgcctcaatgcagagcgacactcacccatcgctcggcgctggctggaaagagaaaccgcaaagattcacggttcggtttgtaaaacgctgccccgcccctttactttacgttgtttctgagcgccgaaacaacgtcgggcgacgagacttacgtgtcagctgccgcgcctagggccacgagcctaggagggtctcgcaggctgctgacctctgccgacccccggcgactcgcctccgaccctgggctgggggaagggggtctgcggcgtcggcagatctgggcgtgtttagactagtttcagaggctgctgcggtcgtttaggatgagatgtgggtgcggctgcgttgaaaaagagtggaaggcaatggaattggaaacgagtgtggacttgggttttgttttgaagggtttggtggtagattggacatggggattgagggagagggcggtgtcaaggattcctaagattgtcacttgatcaatcggataaatattggggccatttactgagatggggtaggctaaggtaggagctgttctggacacgttcattttgagatcttgctaagtcatgttgagtgggactaacagataggaagctgaatattaatgactggtcatccttataagggatctgcaccgaagatgttattttgggaatcgttggcttataaatggtaattaaagccaccagaatgaacggaacttaggaagagagtataaaggagggatcagctaacttttctgagctagaaggatatctattttttaattaaaaaaaatttttaggcctggcgcggtggctcacgcctgtaatctcagcacttttgggaggcggaggcgggcggatcacgaggtcaggagttcgagaccagcctggccaacatggtgaaaccgcgtgtctactaaaaaaatacaaaatttagttgagcatggtgacgcacacctgtaatcccagctactcagggaggctgaggcaggagaatcgcttgaaccagggagctggaggttgcagtgagccgagatcgcaccactgcactccagtctggcgacagagcgaaactccgtctcaaaacaaaacaaacaaacaaaacaaaattagccgggcgtggtggcgggcgcctgtaattccagcaactccgtctggaggctgaagaaggagaatcacttgaaccgggaggtggaggttccagtgagccgagatggcaccaatgcactcactccagcctgggtgatggagtaaaactctgtctcaaaaaaataaaatacacaagttattattgattatagtcaccctgttttgctatcaaatagtaggtcttatttatgatgatattttatttttgtacccattagccatccccaccatccccacttccccctaccctcccactaccctttctagcctctggtaaccatccttctactctctaggaccatgagttcaattgttttgatttttagatcccacaaataagtgagaacatgcgattctctttgcataagtgtgtttttctgtgcccagcttatttcacttaacataatgaccttcagttctacccatgatgttgcaaatgacgggatctcattcttttttatggctgaatagtaatccattgtacatatgtaccacattttatccattcatctttttttttcttttgagacggagtcttgctctgtcacccaggctgcagtgcagtggcatgatctcagctcactgcaacctctgcctcccaggttcaagcaattctcctgcc

SEQ ID NO: 1880197 - DNA, 4001 bp, Homo sapiens
ggaaaatacagtcagtattcatcagccaagccttaagccattagctcagcagtaagcatatcaccatcagcattttcattaagtctatctactgttttcattaatacttaccagaaccattaagctggtccaggcaagttggactccacctaagaaataagagtggtcttagaatagccacagatgagtgttcaccccctgccaaaactaacaaatgcctttagtcagttagagctaattaagaccttcatgttcagtcagcatttgcttatcatcatccaggctgcatttacaaactttcttattaatcataacaagacaagaatccgccatttatttaatgcattcagcactaggaggtaactaaaaagccatttgtgccgtaggaagtttgcccagttacctgcttacttggatacagtttcacttaccatttcaacttccagctttctgtctaatgcctgtaattttaatacaaaattgtcagcaaaaaatattttaatggtagattggtggtacactgcttaaccattaacagcaaaccacaactaccccagatacatcagacagatagtacatctcttcatgattaaatctgctgaactatgcaaccatcatagtatctgttttcacattttcttcagtattaaacttagtatcaatatgagagcaaaattctcatttgaaaagaggggagagaagcactaacatagataatcatcattgctttggctattttctaatcccttaaaagtgagaagtacaaaatagaggtgtctcacctgtgtgccaatggcttgagttaggcttgctctttaggacctgggaagaaacaacttcatgtgaacttaggtgtactctctatgttccccaactcaccattttgggtgcctcagttaagataatggtggttaagatcctcatcattctagcactcaagagtagcaaataaactgtcatcattgtggcacatccaatggctttaaacctttttgagagggaattttcaacttacttcagtagctattctcatccttccttggggacacaactagaaaacaaaaagatgcaagcaaaacagtgagaatgaacctcacagcagtcacgttaaatataaatgctgttaacattaaagcctcagaatagaatttcagaaatcccttctgtccactactcttaaagcatcacaggctgagaccacctcttagatttcattcttcccaccatactttccccaattcttacctgtccataaggtgctatccagagccacactgcatctgcacccagcaccatacctaaagagatcaggtacagattttaattcattgttccacggttcttttttttaaagagtgttctttaaaaaaacggttcgtctttttaaaccaatgatgcaggtaacataccattcattatctagcgacaggtaaaggatacacttaatgttacaaagaagcactgcacccgcagttaagaaccaccgatggcggccgggcgcggtggctcacggcttgtaatcccagtatgttgggggaccacggctggtggatcacctgaggtcaggagttcaagaccagtctcgccaacatggtgaaaccccgtctctactaaaaatataaaagcctagcatggtggcgcgcgcctgtagtcccagttacttgggaggctgaggcagaactgcttaactcgggacgcggaggttgccattaaccgatgtcgagccactgcattccagcctgggtgacagaacgaggctcggtctcaaaaaagaaaaaagaaacactaatggaaatattggtgacactgcggaatgcaggcacttaagcacgtggactaccaccgacagcctttcatgagagcggacggctgatggaggctcgggtcacggcccttaacaatagcttactcgggtgactcggcatgtgccaccatcagagcggttggcattcatcattactctcagatgtccctaccaacacaggcttcatcagaggcagggcacgagagccgaggcttctccgcagttctactctaacatagtcgcagcttaggtcacgcatgcaccatatgtgcaatcccccaccatcctcaacttgtaggccctgcaaaggcgcgcgactggcttagaagtcccagtcaattcagggtgaccttagcagacaaaggctggagcgccccaaaacccgcaacattcgcaaagataaaacatacctcacaggagtcgactcctacctcgaaaagacagtatggtgcctgggctcctgtatataagagttcttttgatgacgtcacgacgcacgctcccggcagcgtccgcttcggctcctccccctaacctccctcaatcttcctctcatccagtatcaccttcttcccaccccttaagtccgccccttttccccgcccttcctcgccattgtgggcagagacatgaccgtccacgtgatgccgtgctcccgccctcctcccgactgaggaggaagagcagagaggggagggggcgcgaggcaaggaaagctctggggatgggggaagggggggcggtgtaaggctgagtgatttccttccggcacgtcgcccgctccgtgggagggggtgggggatttcacttccgggacggtgttccggcccattccggcccatttccacccccggaggtaggtgctgctccttgactggactcgggccccacaccccagtgccacttccctgcaccggggtcacctcgcccgccctccgccgcagcgcgctcctggggcgctcagctactttccttcaccccgcctccaggcaccgggcgaccttccacccccttggcccccggccgggctgatctgccggacccgccccctcgcggggcccctccctcaggaccccgggaagggcggccccctcccccaccgcagccgggacacacccagatacgcacacccacctcctggcagctccccgcccgccgccgcctggagccggtccctgggcgccgcccccttcctagttctcacctgagcgctggctcccccgcccgacgccttgtccccatcttctccgaagttcctcagtgacattttgccctttagccagttcccctctccccaggcttcctaacgcagaagaaagctgctcaagtgctggagtggccaaccccatgccgttcccaattctcccttttacagctctcacccctccagtgccgacggtagcgaaagactttcctccaggggcttcctcactggggaattgccggaaagagcaaacaaaaaaggcgctggtgtaggctccaaaataaacacatctgaattcatgatggcatcgacagaggctcttattggattaaaagtttcaaaacaaacaataacgctttggaaaaaggtcagattggctaaagttgattgttgaaaacagtgtatacacttccctatttaataagtgtgttgttaatgcggggcagtactgtgagcttggcagagtaagttcctgaagtttcaggtgtggtgtaactatgtaatatatagataagtgaacgcacattgggcttaagtaaatgtcttcctgttcggatttatacaaactattttcagtagttgaaactgtactttcaactatcttgtatacagcttcaggtttagtgtttcagccattttttaaaaatattttaatggaaaaatgttggcatacttggtaaatgctgtattttttcatcggatctggagaactaagtttcaggatggaagtattcatcaccacctcggaattgccaacttcgaatttggcagatttacccagctttcctaattttgacaactgaacttcacattctctgcatcttggttgaatcctggcacagctgtgggatttttcctagagtttgcttcacagccctataaccaaagtctttttgtggggggggctctgattcttaagcttagaaatattagcctacattcatgtgggatattagtccttttataaaataataaacataattcttgcagcag

SEQ ID NO: 1880198 - DNA, 4001 bp, Homo sapiens
cggggcatggtggctcacgcctgtaatcccagcactttgggaggtcagtgcgggcagtatcacttgaggtcaagagttcgagaccagcctggacaacatagctgtacaaaattagccaggcatggtgtcacatgcctgtaatcccagctactcaagaggctgaggcaggagaattccttgaacctgggaggcagaggttgcagtgaactgatagtgccgctgcactccattctgggcaagagctagactcttgtctaaaaaaaaaaaaaaaatacttggaactgctatacctttgcttctttaaaacttgctccacacagtgtagtcaagccgactctccatacctgtagaaatttaatctcctttaccaataggtagtaataggtggatttctaaaagatttcccaactactgtttcagtttaagattaatctccattttctttctcagagagattcccatctgctttaattttaaaatcatcactaacagtagctcaatcaattaacgttaacatcaataaaacatgtacctttaaaaggtatgacaggaactgtcttcatgtccttacccaagcaagtcatccatggataaaaacgttaccaggagctggaatacaaatgaggacttccattaaaatgctaaacatcattaaactcttttcaaagttgtctgtcacagggttcttcagtgttacctttgtctacatgctcatttcaggtcagacatttgatcaacatcattacacaaaccccgttccaaacatgctcaaggaaaacacataaacactgttccagacatgctcaaggaaaatacagtcagtattcatcagccaagccttaagccattagctcagcagtaagcatatcaccatcagcattttcattaagtctatctactgttttcattaatacttaccagaaccattaagctggtccaggcaagttggactccacctaagaaataagagtggtcttagaatagccacagatgagtgttcaccccctgccaaaactaacaaatgcctttagtcagttagagctaattaagaccttcatgttcagtcagcatttgcttatcatcatccaggctgcatttacaaactttcttattaatcataacaagacaagaatccgccatttatttaatgcattcagcactaggaggtaactaaaaagccatttgtgccgtaggaagtttgcccagttacctgcttacttggatacagtttcacttaccatttcaacttccagctttctgtctaatgcctgtaattttaatacaaaattgtcagcaaaaaatattttaatggtagattggtggtacactgcttaaccattaacagcaaaccacaactaccccagatacatcagacagatagtacatctcttcatgattaaatctgctgaactatgcaaccatcatagtatctgttttcacattttcttcagtattaaacttagtatcaatatgagagcaaaattctcatttgaaaagaggggagagaagcactaacatagataatcatcattgctttggctattttctaatcccttaaaagtgagaagtacaaaatagaggtgtctcacctgtgtgccaatggcttgagttaggcttgctctttaggacctgggaagaaacaacttcatgtgaacttaggtgtactctctatgttccccaactcaccattttgggtgcctcagttaagataatggtggttaagatcctcatcattctagcactcaagagtagcaaataaactgtcatcattgtggcacatccaatggctttaaacctttttgagagggaattttcaacttacttcagtagctattctcatccttccttggggacacaactagaaaacaaaaagatgcaagcaaaacagtgagaatgaacctcacagcagtcacgttaaatataaatgctgttaacattaaagcctcagaatagaatttcagaaatcccttctgtccactactcttaaagcatcacaggctgagaccacctcttagatttcattcttcccaccatactttccccaattcttacctgtccataaggtgctatccagagccacactgcatctgcacccagcaccatacctaaagagatcaggtacagattttaattcattgttccacggttcttttttttaaagagtgttctttaaaaaaacggttcgtctttttaaaccaatgatgcaggtaacataccattcattatctagcgacaggtaaaggatacacttaatgttacaaagaagcactgcacccgcagttaagaaccaccgatggcggccgggcgcggtggctcacggcttgtaatcccagtatgttgggggaccacggctggtggatcacctgaggtcaggagttcaagaccagtctcgccaacatggtgaaaccccgtctctactaaaaatataaaagcctagcatggtggcgcgcgcctgtagtcccagttacttgggaggctgaggcagaactgcttaactcgggacgcggaggttgccattaaccgatgtcgagccactgcattccagcctgggtgacagaacgaggctcggtctcaaaaaagaaaaaagaaacactaatggaaatattggtgacactgcggaatgcaggcacttaagcacgtggactaccaccgacagcctttcatgagagcggacggctgatggaggctcgggtcacggcccttaacaatagcttactcgggtgactcggcatgtgccaccatcagagcggttggcattcatcattactctcagatgtccctaccaacacaggcttcatcagaggcagggcacgagagccgaggcttctccgcagttctactctaacatagtcgcagcttaggtcacgcatgcaccatatgtgcaatcccccaccatcctcaacttgtaggccctgcaaaggcgcgcgactggcttagaagtcccagtcaattcagggtgaccttagcagacaaaggctggagcgccccaaaacccgcaacattcgcaaagataaaacatacctcacaggagtcgactcctacctcgaaaagacagtatggtgcctgggctcctgtatataagagttcttttgatgacgtcacgacgcacgctcccggcagcgtccgcttcggctcctccccctaacctccctcaatcttcctctcatccagtatcaccttcttcccaccccttaagtccgccccttttccccgcccttcctcgccattgtgggcagagacatgaccgtccacgtgatgccgtgctcccgccctcctcccgactgaggaggaagagcagagaggggagggggcgcgaggcaaggaaagctctggggatgggggaagggggggcggtgtaaggctgagtgatttccttccggcacgtcgcccgctccgtgggagggggtgggggatttcacttccgggacggtgttccggcccattccggcccatttccacccccggaggtaggtgctgctccttgactggactcgggccccacaccccagtgccacttccctgcaccggggtcacctcgcccgccctccgccgcagcgcgctcctggggcgctcagctactttccttcaccccgcctccaggcaccgggcgaccttccacccccttggcccccggccgggctgatctgccggacccgccccctcgcggggcccctccctcaggaccccgggaagggcggccccctcccccaccgcagccgggacacacccagatacgcacacccacctcctggcagctccccgcccgccgccgcctggagccggtccctgggcgccgcccccttcctagttctcacctgagcgctggctcccccgcccgacgccttgtccccatcttctccgaagttcctcagtgacattttgccctttagccagttcccctctccccaggcttcctaacgcagaagaaagctgctcaagtgctggagtggccaaccccatgccgttcccaattctcccttttacagctctcacccctccag

SEQ ID NO: 1880199 - DNA, 4001 bp, Homo sapiens
ggacaatacacagtaagacaacttgcatacaattaggagtaatccaaaatctccaaacattatagaatggctatattccccttttcggggcataaactagaatgttaccgccagatacatcagataggagcgaaagacttaatattgctcatcagcgttagtctgctgaactatgttatcatcattgtatcggctttacaacacttaaaaaccagacttgaggcggggcatggtggctcacgcctgtaatcccagcactttgggaggtcagtgcgggcagtatcacttgaggtcaagagttcgagaccagcctggacaacatagctgtacaaaattagccaggcatggtgtcacatgcctgtaatcccagctactcaagaggctgaggcaggagaattccttgaacctgggaggcagaggttgcagtgaactgatagtgccgctgcactccattctgggcaagagctagactcttgtctaaaaaaaaaaaaaaaatacttggaactgctatacctttgcttctttaaaacttgctccacacagtgtagtcaagccgactctccatacctgtagaaatttaatctcctttaccaataggtagtaataggtggatttctaaaagatttcccaactactgtttcagtttaagattaatctccattttctttctcagagagattcccatctgctttaattttaaaatcatcactaacagtagctcaatcaattaacgttaacatcaataaaacatgtacctttaaaaggtatgacaggaactgtcttcatgtccttacccaagcaagtcatccatggataaaaacgttaccaggagctggaatacaaatgaggacttccattaaaatgctaaacatcattaaactcttttcaaagttgtctgtcacagggttcttcagtgttacctttgtctacatgctcatttcaggtcagacatttgatcaacatcattacacaaaccccgttccaaacatgctcaaggaaaacacataaacactgttccagacatgctcaaggaaaatacagtcagtattcatcagccaagccttaagccattagctcagcagtaagcatatcaccatcagcattttcattaagtctatctactgttttcattaatacttaccagaaccattaagctggtccaggcaagttggactccacctaagaaataagagtggtcttagaatagccacagatgagtgttcaccccctgccaaaactaacaaatgcctttagtcagttagagctaattaagaccttcatgttcagtcagcatttgcttatcatcatccaggctgcatttacaaactttcttattaatcataacaagacaagaatccgccatttatttaatgcattcagcactaggaggtaactaaaaagccatttgtgccgtaggaagtttgcccagttacctgcttacttggatacagtttcacttaccatttcaacttccagctttctgtctaatgcctgtaattttaatacaaaattgtcagcaaaaaatattttaatggtagattggtggtacactgcttaaccattaacagcaaaccacaactaccccagatacatcagacagatagtacatctcttcatgattaaatctgctgaactatgcaaccatcatagtatctgttttcacattttcttcagtattaaacttagtatcaatatgagagcaaaattctcatttgaaaagaggggagagaagcactaacatagataatcatcattgctttggctattttctaatcccttaaaagtgagaagtacaaaatagaggtgtctcacctgtgtgccaatggcttgagttaggcttgctctttaggacctgggaagaaacaacttcatgtgaacttaggtgtactctctatgttccccaactcaccattttgggtgcctcagttaagataatggtggttaagatcctcatcattctagcactcaagagtagcaaataaactgtcatcattgtggcacatccaatggctttaaacctttttgagagggaattttcaacttacttcagtagctattctcatccttccttggggacacaactagaaaacaaaaagatgcaagcaaaacagtgagaatgaacctcacagcagtcacgttaaatataaatgctgttaacattaaagcctcagaatagaatttcagaaatcccttctgtccactactcttaaagcatcacaggctgagaccacctcttagatttcattcttcccaccatactttccccaattcttacctgtccataaggtgctatccagagccacactgcatctgcacccagcaccatacctaaagagatcaggtacagattttaattcattgttccacggttcttttttttaaagagtgttctttaaaaaaacggttcgtctttttaaaccaatgatgcaggtaacataccattcattatctagcgacaggtaaaggatacacttaatgttacaaagaagcactgcacccgcagttaagaaccaccgatggcggccgggcgcggtggctcacggcttgtaatcccagtatgttgggggaccacggctggtggatcacctgaggtcaggagttcaagaccagtctcgccaacatggtgaaaccccgtctctactaaaaatataaaagcctagcatggtggcgcgcgcctgtagtcccagttacttgggaggctgaggcagaactgcttaactcgggacgcggaggttgccattaaccgatgtcgagccactgcattccagcctgggtgacagaacgaggctcggtctcaaaaaagaaaaaagaaacactaatggaaatattggtgacactgcggaatgcaggcacttaagcacgtggactaccaccgacagcctttcatgagagcggacggctgatggaggctcgggtcacggcccttaacaatagcttactcgggtgactcggcatgtgccaccatcagagcggttggcattcatcattactctcagatgtccctaccaacacaggcttcatcagaggcagggcacgagagccgaggcttctccgcagttctactctaacatagtcgcagcttaggtcacgcatgcaccatatgtgcaatcccccaccatcctcaacttgtaggccctgcaaaggcgcgcgactggcttagaagtcccagtcaattcagggtgaccttagcagacaaaggctggagcgccccaaaacccgcaacattcgcaaagataaaacatacctcacaggagtcgactcctacctcgaaaagacagtatggtgcctgggctcctgtatataagagttcttttgatgacgtcacgacgcacgctcccggcagcgtccgcttcggctcctccccctaacctccctcaatcttcctctcatccagtatcaccttcttcccaccccttaagtccgccccttttccccgcccttcctcgccattgtgggcagagacatgaccgtccacgtgatgccgtgctcccgccctcctcccgactgaggaggaagagcagagaggggagggggcgcgaggcaaggaaagctctggggatgggggaagggggggcggtgtaaggctgagtgatttccttccggcacgtcgcccgctccgtgggagggggtgggggatttcacttccgggacggtgttccggcccattccggcccatttccacccccggaggtaggtgctgctccttgactggactcgggccccacaccccagtgccacttccctgcaccggggtcacctcgcccgccctccgccgcagcgcgctcctggggcgctcagctactttccttcaccccgcctccaggcaccgggcgaccttccacccccttggcccccggccgggctgatctgccggacccgccccctcgcggggcccctccctcaggaccccgggaagggcggccccctcccccaccgcagccgggacacacccagatacgcacacccacctcctggcagctccccgcccgccgccgcctgga

SEQ ID NO: 1880200 - DNA, 4001 bp, Homo sapiens
ctcagaatcaaaatggaacggttttacagtgatatcattatatttcatttggcagaatcattacatcattggttacactgaaaatcatcacatgtaccaaaagctgactcacctagtttaggataacaggtctgcctgtttgaagatgaaaaataatacccatttaaaatttgccctactcaatttccttctcagtcacattttaacttttaaacagctaatcactcccatctacagattaaggtgtatatgccaccaaaaccttttgccaccttaaaaatttccttcaaagtttaaactaacctgcatttcttcaatcatgaattctgagtcctgaaattaagggacaatacacagtaagacaacttgcatacaattaggagtaatccaaaatctccaaacattatagaatggctatattccccttttcggggcataaactagaatgttaccgccagatacatcagataggagcgaaagacttaatattgctcatcagcgttagtctgctgaactatgttatcatcattgtatcggctttacaacacttaaaaaccagacttgaggcggggcatggtggctcacgcctgtaatcccagcactttgggaggtcagtgcgggcagtatcacttgaggtcaagagttcgagaccagcctggacaacatagctgtacaaaattagccaggcatggtgtcacatgcctgtaatcccagctactcaagaggctgaggcaggagaattccttgaacctgggaggcagaggttgcagtgaactgatagtgccgctgcactccattctgggcaagagctagactcttgtctaaaaaaaaaaaaaaaatacttggaactgctatacctttgcttctttaaaacttgctccacacagtgtagtcaagccgactctccatacctgtagaaatttaatctcctttaccaataggtagtaataggtggatttctaaaagatttcccaactactgtttcagtttaagattaatctccattttctttctcagagagattcccatctgctttaattttaaaatcatcactaacagtagctcaatcaattaacgttaacatcaataaaacatgtacctttaaaaggtatgacaggaactgtcttcatgtccttacccaagcaagtcatccatggataaaaacgttaccaggagctggaatacaaatgaggacttccattaaaatgctaaacatcattaaactcttttcaaagttgtctgtcacagggttcttcagtgttacctttgtctacatgctcatttcaggtcagacatttgatcaacatcattacacaaaccccgttccaaacatgctcaaggaaaacacataaacactgttccagacatgctcaaggaaaatacagtcagtattcatcagccaagccttaagccattagctcagcagtaagcatatcaccatcagcattttcattaagtctatctactgttttcattaatacttaccagaaccattaagctggtccaggcaagttggactccacctaagaaataagagtggtcttagaatagccacagatgagtgttcaccccctgccaaaactaacaaatgcctttagtcagttagagctaattaagaccttcatgttcagtcagcatttgcttatcatcatccaggctgcatttacaaactttcttattaatcataacaagacaagaatccgccatttatttaatgcattcagcactaggaggtaactaaaaagccatttgtgccgtaggaagtttgcccagttacctgcttacttggatacagtttcacttaccatttcaacttccagctttctgtctaatgcctgtaattttaatacaaaattgtcagcaaaaaatattttaatggtagattggtggtacactgcttaaccattaacagcaaaccacaactaccccagatacatcagacagatagtacatctcttcatgattaaatctgctgaactatgcaaccatcatagtatctgttttcacattttcttcagtattaaacttagtatcaatatgagagcaaaattctcatttgaaaagaggggagagaagcactaacatagataatcatcattgctttggctattttctaatcccttaaaagtgagaagtacaaaatagaggtgtctcacctgtgtgccaatggcttgagttaggcttgctctttaggacctgggaagaaacaacttcatgtgaacttaggtgtactctctatgttccccaactcaccattttgggtgcctcagttaagataatggtggttaagatcctcatcattctagcactcaagagtagcaaataaactgtcatcattgtggcacatccaatggctttaaacctttttgagagggaattttcaacttacttcagtagctattctcatccttccttggggacacaactagaaaacaaaaagatgcaagcaaaacagtgagaatgaacctcacagcagtcacgttaaatataaatgctgttaacattaaagcctcagaatagaatttcagaaatcccttctgtccactactcttaaagcatcacaggctgagaccacctcttagatttcattcttcccaccatactttccccaattcttacctgtccataaggtgctatccagagccacactgcatctgcacccagcaccatacctaaagagatcaggtacagattttaattcattgttccacggttcttttttttaaagagtgttctttaaaaaaacggttcgtctttttaaaccaatgatgcaggtaacataccattcattatctagcgacaggtaaaggatacacttaatgttacaaagaagcactgcacccgcagttaagaaccaccgatggcggccgggcgcggtggctcacggcttgtaatcccagtatgttgggggaccacggctggtggatcacctgaggtcaggagttcaagaccagtctcgccaacatggtgaaaccccgtctctactaaaaatataaaagcctagcatggtggcgcgcgcctgtagtcccagttacttgggaggctgaggcagaactgcttaactcgggacgcggaggttgccattaaccgatgtcgagccactgcattccagcctgggtgacagaacgaggctcggtctcaaaaaagaaaaaagaaacactaatggaaatattggtgacactgcggaatgcaggcacttaagcacgtggactaccaccgacagcctttcatgagagcggacggctgatggaggctcgggtcacggcccttaacaatagcttactcgggtgactcggcatgtgccaccatcagagcggttggcattcatcattactctcagatgtccctaccaacacaggcttcatcagaggcagggcacgagagccgaggcttctccgcagttctactctaacatagtcgcagcttaggtcacgcatgcaccatatgtgcaatcccccaccatcctcaacttgtaggccctgcaaaggcgcgcgactggcttagaagtcccagtcaattcagggtgaccttagcagacaaaggctggagcgccccaaaacccgcaacattcgcaaagataaaacatacctcacaggagtcgactcctacctcgaaaagacagtatggtgcctgggctcctgtatataagagttcttttgatgacgtcacgacgcacgctcccggcagcgtccgcttcggctcctccccctaacctccctcaatcttcctctcatccagtatcaccttcttcccaccccttaagtccgccccttttccccgcccttcctcgccattgtgggcagagacatgaccgtccacgtgatgccgtgctcccgccctcctcccgactgaggaggaagagcagagaggggagggggcgcgaggcaaggaaagctctggggatgggggaagggggggcggtgtaaggctgagtgatttccttccggcacgtcgcccgctccgtgggagggggtgggggatttcacttccgggacggtgtt

SEQ ID NO: 1880201 - DNA, 4001 bp, Homo sapiens
gaaacctgacaatttgctcatatggagaattaggaaatattgcactttaatgcataagacaccttgtaaaatacccataaaattttaactggctgcagtgttaatgaagcaaataccatggagttataatagcttttgaatgtgatttatgcttacagctaatgaacagatgaaaagcactgtccttttttaagtaaacactacacactccagatggattgcaaaaatttattaaaattggagacactgttttaatcttcttgtgccatgagactccatcaggcagtctacaaagaccactgggaggctgaggatcacttgagcccagaagtttgaggctgtagtaagcttcaaaggccactgcactctagcttgggtgaggcaagaccctgtctcaaaaaataagacaagacttttagccacatttacagacttcaattaaaatgctacatgggaatgcagaatatcagatattttattgtcatcaagtaatcagtgagagagttcaagttggattgagatcatcatgtattctgcaattataatagtcccaacatttccaatcctcacctttcaagcagtaagctgcatgcttgcttgttgtggtcattaaaaaccctgaaagcgaagccaacatattaatcagggcaaaatacaaatgtgtgatgcttgttagtagagtaacctcagaatcaaaatggaacggttttacagtgatatcattatatttcatttggcagaatcattacatcattggttacactgaaaatcatcacatgtaccaaaagctgactcacctagtttaggataacaggtctgcctgtttgaagatgaaaaataatacccatttaaaatttgccctactcaatttccttctcagtcacattttaacttttaaacagctaatcactcccatctacagattaaggtgtatatgccaccaaaaccttttgccaccttaaaaatttccttcaaagtttaaactaacctgcatttcttcaatcatgaattctgagtcctgaaattaagggacaatacacagtaagacaacttgcatacaattaggagtaatccaaaatctccaaacattatagaatggctatattccccttttcggggcataaactagaatgttaccgccagatacatcagataggagcgaaagacttaatattgctcatcagcgttagtctgctgaactatgttatcatcattgtatcggctttacaacacttaaaaaccagacttgaggcggggcatggtggctcacgcctgtaatcccagcactttgggaggtcagtgcgggcagtatcacttgaggtcaagagttcgagaccagcctggacaacatagctgtacaaaattagccaggcatggtgtcacatgcctgtaatcccagctactcaagaggctgaggcaggagaattccttgaacctgggaggcagaggttgcagtgaactgatagtgccgctgcactccattctgggcaagagctagactcttgtctaaaaaaaaaaaaaaaatacttggaactgctatacctttgcttctttaaaacttgctccacacagtgtagtcaagccgactctccatacctgtagaaatttaatctcctttaccaataggtagtaataggtggatttctaaaagatttcccaactactgtttcagtttaagattaatctccattttctttctcagagagattcccatctgctttaattttaaaatcatcactaacagtagctcaatcaattaacgttaacatcaataaaacatgtacctttaaaaggtatgacaggaactgtcttcatgtccttacccaagcaagtcatccatggataaaaacgttaccaggagctggaatacaaatgaggacttccattaaaatgctaaacatcattaaactcttttcaaagttgtctgtcacagggttcttcagtgttacctttgtctacatgctcatttcaggtcagacatttgatcaacatcattacacaaaccccgttccaaacatgctcaaggaaaacacataaacactgttccagacatgctcaaggaaaatacagtcagtattcatcagccaagccttaagccattagctcagcagtaagcatatcaccatcagcattttcattaagtctatctactgttttcattaatacttaccagaaccattaagctggtccaggcaagttggactccacctaagaaataagagtggtcttagaatagccacagatgagtgttcaccccctgccaaaactaacaaatgcctttagtcagttagagctaattaagaccttcatgttcagtcagcatttgcttatcatcatccaggctgcatttacaaactttcttattaatcataacaagacaagaatccgccatttatttaatgcattcagcactaggaggtaactaaaaagccatttgtgccgtaggaagtttgcccagttacctgcttacttggatacagtttcacttaccatttcaacttccagctttctgtctaatgcctgtaattttaatacaaaattgtcagcaaaaaatattttaatggtagattggtggtacactgcttaaccattaacagcaaaccacaactaccccagatacatcagacagatagtacatctcttcatgattaaatctgctgaactatgcaaccatcatagtatctgttttcacattttcttcagtattaaacttagtatcaatatgagagcaaaattctcatttgaaaagaggggagagaagcactaacatagataatcatcattgctttggctattttctaatcccttaaaagtgagaagtacaaaatagaggtgtctcacctgtgtgccaatggcttgagttaggcttgctctttaggacctgggaagaaacaacttcatgtgaacttaggtgtactctctatgttccccaactcaccattttgggtgcctcagttaagataatggtggttaagatcctcatcattctagcactcaagagtagcaaataaactgtcatcattgtggcacatccaatggctttaaacctttttgagagggaattttcaacttacttcagtagctattctcatccttccttggggacacaactagaaaacaaaaagatgcaagcaaaacagtgagaatgaacctcacagcagtcacgttaaatataaatgctgttaacattaaagcctcagaatagaatttcagaaatcccttctgtccactactcttaaagcatcacaggctgagaccacctcttagatttcattcttcccaccatactttccccaattcttacctgtccataaggtgctatccagagccacactgcatctgcacccagcaccatacctaaagagatcaggtacagattttaattcattgttccacggttcttttttttaaagagtgttctttaaaaaaacggttcgtctttttaaaccaatgatgcaggtaacataccattcattatctagcgacaggtaaaggatacacttaatgttacaaagaagcactgcacccgcagttaagaaccaccgatggcggccgggcgcggtggctcacggcttgtaatcccagtatgttgggggaccacggctggtggatcacctgaggtcaggagttcaagaccagtctcgccaacatggtgaaaccccgtctctactaaaaatataaaagcctagcatggtggcgcgcgcctgtagtcccagttacttgggaggctgaggcagaactgcttaactcgggacgcggaggttgccattaaccgatgtcgagccactgcattccagcctgggtgacagaacgaggctcggtctcaaaaaagaaaaaagaaacactaatggaaatattggtgacactgcggaatgcaggcacttaagcacgtggactaccaccgacagcctttcatgagagcggacggctgatggaggctcgggtcacggcccttaacaatagcttactcgggtgactcggcatgtgccaccatcagagcg

SEQ ID NO: 1880202 - DNA, 4001 bp, Homo sapiens
cctgggacagattgccttaaaccagttgtgccctttatacccacttttggcatccctaaacacttagtgcttgccaaaaacctatcaccatggctatggattgtagattttcccaattccattaatgcctatcactagttgggcatttctatagtattttctataacttattttcccagcctcagactcaacatgactttctccaagtagctccatcaatactttaagctcaaaaccaattagcacaggggcctatgaaacctgacaatttgctcatatggagaattaggaaatattgcactttaatgcataagacaccttgtaaaatacccataaaattttaactggctgcagtgttaatgaagcaaataccatggagttataatagcttttgaatgtgatttatgcttacagctaatgaacagatgaaaagcactgtccttttttaagtaaacactacacactccagatggattgcaaaaatttattaaaattggagacactgttttaatcttcttgtgccatgagactccatcaggcagtctacaaagaccactgggaggctgaggatcacttgagcccagaagtttgaggctgtagtaagcttcaaaggccactgcactctagcttgggtgaggcaagaccctgtctcaaaaaataagacaagacttttagccacatttacagacttcaattaaaatgctacatgggaatgcagaatatcagatattttattgtcatcaagtaatcagtgagagagttcaagttggattgagatcatcatgtattctgcaattataatagtcccaacatttccaatcctcacctttcaagcagtaagctgcatgcttgcttgttgtggtcattaaaaaccctgaaagcgaagccaacatattaatcagggcaaaatacaaatgtgtgatgcttgttagtagagtaacctcagaatcaaaatggaacggttttacagtgatatcattatatttcatttggcagaatcattacatcattggttacactgaaaatcatcacatgtaccaaaagctgactcacctagtttaggataacaggtctgcctgtttgaagatgaaaaataatacccatttaaaatttgccctactcaatttccttctcagtcacattttaacttttaaacagctaatcactcccatctacagattaaggtgtatatgccaccaaaaccttttgccaccttaaaaatttccttcaaagtttaaactaacctgcatttcttcaatcatgaattctgagtcctgaaattaagggacaatacacagtaagacaacttgcatacaattaggagtaatccaaaatctccaaacattatagaatggctatattccccttttcggggcataaactagaatgttaccgccagatacatcagataggagcgaaagacttaatattgctcatcagcgttagtctgctgaactatgttatcatcattgtatcggctttacaacacttaaaaaccagacttgaggcggggcatggtggctcacgcctgtaatcccagcactttgggaggtcagtgcgggcagtatcacttgaggtcaagagttcgagaccagcctggacaacatagctgtacaaaattagccaggcatggtgtcacatgcctgtaatcccagctactcaagaggctgaggcaggagaattccttgaacctgggaggcagaggttgcagtgaactgatagtgccgctgcactccattctgggcaagagctagactcttgtctaaaaaaaaaaaaaaaatacttggaactgctatacctttgcttctttaaaacttgctccacacagtgtagtcaagccgactctccatacctgtagaaatttaatctcctttaccaataggtagtaataggtggatttctaaaagatttcccaactactgtttcagtttaagattaatctccattttctttctcagagagattcccatctgctttaattttaaaatcatcactaacagtagctcaatcaattaacgttaacatcaataaaacatgtacctttaaaaggtatgacaggaactgtcttcatgtccttacccaagcaagtcatccatggataaaaacgttaccaggagctggaatacaaatgaggacttccattaaaatgctaaacatcattaaactcttttcaaagttgtctgtcacagggttcttcagtgttacctttgtctacatgctcatttcaggtcagacatttgatcaacatcattacacaaaccccgttccaaacatgctcaaggaaaacacataaacactgttccagacatgctcaaggaaaatacagtcagtattcatcagccaagccttaagccattagctcagcagtaagcatatcaccatcagcattttcattaagtctatctactgttttcattaatacttaccagaaccattaagctggtccaggcaagttggactccacctaagaaataagagtggtcttagaatagccacagatgagtgttcaccccctgccaaaactaacaaatgcctttagtcagttagagctaattaagaccttcatgttcagtcagcatttgcttatcatcatccaggctgcatttacaaactttcttattaatcataacaagacaagaatccgccatttatttaatgcattcagcactaggaggtaactaaaaagccatttgtgccgtaggaagtttgcccagttacctgcttacttggatacagtttcacttaccatttcaacttccagctttctgtctaatgcctgtaattttaatacaaaattgtcagcaaaaaatattttaatggtagattggtggtacactgcttaaccattaacagcaaaccacaactaccccagatacatcagacagatagtacatctcttcatgattaaatctgctgaactatgcaaccatcatagtatctgttttcacattttcttcagtattaaacttagtatcaatatgagagcaaaattctcatttgaaaagaggggagagaagcactaacatagataatcatcattgctttggctattttctaatcccttaaaagtgagaagtacaaaatagaggtgtctcacctgtgtgccaatggcttgagttaggcttgctctttaggacctgggaagaaacaacttcatgtgaacttaggtgtactctctatgttccccaactcaccattttgggtgcctcagttaagataatggtggttaagatcctcatcattctagcactcaagagtagcaaataaactgtcatcattgtggcacatccaatggctttaaacctttttgagagggaattttcaacttacttcagtagctattctcatccttccttggggacacaactagaaaacaaaaagatgcaagcaaaacagtgagaatgaacctcacagcagtcacgttaaatataaatgctgttaacattaaagcctcagaatagaatttcagaaatcccttctgtccactactcttaaagcatcacaggctgagaccacctcttagatttcattcttcccaccatactttccccaattcttacctgtccataaggtgctatccagagccacactgcatctgcacccagcaccatacctaaagagatcaggtacagattttaattcattgttccacggttcttttttttaaagagtgttctttaaaaaaacggttcgtctttttaaaccaatgatgcaggtaacataccattcattatctagcgacaggtaaaggatacacttaatgttacaaagaagcactgcacccgcagttaagaaccaccgatggcggccgggcgcggtggctcacggcttgtaatcccagtatgttgggggaccacggctggtggatcacctgaggtcaggagttcaagaccagtctcgccaacatggtgaaaccccgtctctactaaaaatataaaagcctagcatggtggcgcgcgcctgtagtcccagttacttgggaggctgaggcagaactgctt

SEQ ID NO: 1880203 - DNA, 4001 bp, Homo sapiens
tagacaaaattgggcattcccaacttacacgcatttagtgcataagctgacatttcaatgagattgtgaaatgacaatgggaagggccctgaaaaaaacatcaagcataaaaggcctgggaggccgggcactgcggctcaggcctgtgaaatcccagcactttgggaggatggggtttcgtctctactaaaaataccaaaatgagttggttgtgatggtaggtgcctatagtcctagctacaagaggctgaagagaatcgcttgaacccgggaggtagaggttgcagtgagcagcggttgagatcatgccattgcactccagcctgggcaacaggattcagtctcaaaaaaaggaaaattcagagagtaactgaagttttatcattaatgggactaaagtgctttagcccagaaacagatttgtaaaaccattactgctaacaaagacatcattataagcacagctgtactgacactgaaattaaaatttgacccatcttggaattttggccccttggtcctgtttccctgggacagattgccttaaaccagttgtgccctttatacccacttttggcatccctaaacacttagtgcttgccaaaaacctatcaccatggctatggattgtagattttcccaattccattaatgcctatcactagttgggcatttctatagtattttctataacttattttcccagcctcagactcaacatgactttctccaagtagctccatcaatactttaagctcaaaaccaattagcacaggggcctatgaaacctgacaatttgctcatatggagaattaggaaatattgcactttaatgcataagacaccttgtaaaatacccataaaattttaactggctgcagtgttaatgaagcaaataccatggagttataatagcttttgaatgtgatttatgcttacagctaatgaacagatgaaaagcactgtccttttttaagtaaacactacacactccagatggattgcaaaaatttattaaaattggagacactgttttaatcttcttgtgccatgagactccatcaggcagtctacaaagaccactgggaggctgaggatcacttgagcccagaagtttgaggctgtagtaagcttcaaaggccactgcactctagcttgggtgaggcaagaccctgtctcaaaaaataagacaagacttttagccacatttacagacttcaattaaaatgctacatgggaatgcagaatatcagatattttattgtcatcaagtaatcagtgagagagttcaagttggattgagatcatcatgtattctgcaattataatagtcccaacatttccaatcctcacctttcaagcagtaagctgcatgcttgcttgttgtggtcattaaaaaccctgaaagcgaagccaacatattaatcagggcaaaatacaaatgtgtgatgcttgttagtagagtaacctcagaatcaaaatggaacggttttacagtgatatcattatatttcatttggcagaatcattacatcattggttacactgaaaatcatcacatgtaccaaaagctgactcacctagtttaggataacaggtctgcctgtttgaagatgaaaaataatacccatttaaaatttgccctactcaatttccttctcagtcacattttaacttttaaacagctaatcactcccatctacagattaaggtgtatatgccaccaaaaccttttgccaccttaaaaatttccttcaaagtttaaactaacctgcatttcttcaatcatgaattctgagtcctgaaattaagggacaatacacagtaagacaacttgcatacaattaggagtaatccaaaatctccaaacattatagaatggctatattccccttttcggggcataaactagaatgttaccgccagatacatcagataggagcgaaagacttaatattgctcatcagcgttagtctgctgaactatgttatcatcattgtatcggctttacaacacttaaaaaccagacttgaggcggggcatggtggctcacgcctgtaatcccagcactttgggaggtcagtgcgggcagtatcacttgaggtcaagagttcgagaccagcctggacaacatagctgtacaaaattagccaggcatggtgtcacatgcctgtaatcccagctactcaagaggctgaggcaggagaattccttgaacctgggaggcagaggttgcagtgaactgatagtgccgctgcactccattctgggcaagagctagactcttgtctaaaaaaaaaaaaaaaatacttggaactgctatacctttgcttctttaaaacttgctccacacagtgtagtcaagccgactctccatacctgtagaaatttaatctcctttaccaataggtagtaataggtggatttctaaaagatttcccaactactgtttcagtttaagattaatctccattttctttctcagagagattcccatctgctttaattttaaaatcatcactaacagtagctcaatcaattaacgttaacatcaataaaacatgtacctttaaaaggtatgacaggaactgtcttcatgtccttacccaagcaagtcatccatggataaaaacgttaccaggagctggaatacaaatgaggacttccattaaaatgctaaacatcattaaactcttttcaaagttgtctgtcacagggttcttcagtgttacctttgtctacatgctcatttcaggtcagacatttgatcaacatcattacacaaaccccgttccaaacatgctcaaggaaaacacataaacactgttccagacatgctcaaggaaaatacagtcagtattcatcagccaagccttaagccattagctcagcagtaagcatatcaccatcagcattttcattaagtctatctactgttttcattaatacttaccagaaccattaagctggtccaggcaagttggactccacctaagaaataagagtggtcttagaatagccacagatgagtgttcaccccctgccaaaactaacaaatgcctttagtcagttagagctaattaagaccttcatgttcagtcagcatttgcttatcatcatccaggctgcatttacaaactttcttattaatcataacaagacaagaatccgccatttatttaatgcattcagcactaggaggtaactaaaaagccatttgtgccgtaggaagtttgcccagttacctgcttacttggatacagtttcacttaccatttcaacttccagctttctgtctaatgcctgtaattttaatacaaaattgtcagcaaaaaatattttaatggtagattggtggtacactgcttaaccattaacagcaaaccacaactaccccagatacatcagacagatagtacatctcttcatgattaaatctgctgaactatgcaaccatcatagtatctgttttcacattttcttcagtattaaacttagtatcaatatgagagcaaaattctcatttgaaaagaggggagagaagcactaacatagataatcatcattgctttggctattttctaatcccttaaaagtgagaagtacaaaatagaggtgtctcacctgtgtgccaatggcttgagttaggcttgctctttaggacctgggaagaaacaacttcatgtgaacttaggtgtactctctatgttccccaactcaccattttgggtgcctcagttaagataatggtggttaagatcctcatcattctagcactcaagagtagcaaataaactgtcatcattgtggcacatccaatggctttaaacctttttgagagggaattttcaacttacttcagtagctattctcatccttccttggggacacaactagaaaacaaaaagatgcaagcaaaacagtgagaatgaacctcacagcagtcacgttaaatataaatgctgttaacattaaagcctcagaatagaatttcagaaatc

SEQ ID NO: 1880204 - DNA, 4001 bp, Homo sapiens
agtaaagggtaaccgattggggtaggtggtggtagttttgtgtgtgtgtttttttttgagaccaagtctcgccgttgcccaggctggagtgcggtggcatgatctcagttcactgcaacctccacttcctaggttcaagcaattctcctgcctcagcctcctgagtagctgggattacaggtgcacgccacacctggctaacttttgtatttttagtagagatgggggtttcactatgttggtcaggctggtctcaaactcctgaccgtgtgatccacccgcctcggcctcccaaagtggtgggattacaggcatgaaccaccacgcccagccttcttttttcctttgagaaagtctcaccctggcacccaggctggagtgcagtggcaggatcacgggtcactgcaacctcagcctcccaggttcagttcccctgcctcagcctcccgaatagctgggactacaatagcccaccactacacccggctagatttttgtatttttagtagagatggggtttcaccatattggccaggttggtcttgaaatcctgacctcaggtaatctgcccacctcagcacccagccaggtggtggtagttgttttacagcctgtgtgagacattcgggtgagccccaggaaatgaaagaatgtgcttatttgggggagggggaggccttttttcttagacaaaattgggcattcccaacttacacgcatttagtgcataagctgacatttcaatgagattgtgaaatgacaatgggaagggccctgaaaaaaacatcaagcataaaaggcctgggaggccgggcactgcggctcaggcctgtgaaatcccagcactttgggaggatggggtttcgtctctactaaaaataccaaaatgagttggttgtgatggtaggtgcctatagtcctagctacaagaggctgaagagaatcgcttgaacccgggaggtagaggttgcagtgagcagcggttgagatcatgccattgcactccagcctgggcaacaggattcagtctcaaaaaaaggaaaattcagagagtaactgaagttttatcattaatgggactaaagtgctttagcccagaaacagatttgtaaaaccattactgctaacaaagacatcattataagcacagctgtactgacactgaaattaaaatttgacccatcttggaattttggccccttggtcctgtttccctgggacagattgccttaaaccagttgtgccctttatacccacttttggcatccctaaacacttagtgcttgccaaaaacctatcaccatggctatggattgtagattttcccaattccattaatgcctatcactagttgggcatttctatagtattttctataacttattttcccagcctcagactcaacatgactttctccaagtagctccatcaatactttaagctcaaaaccaattagcacaggggcctatgaaacctgacaatttgctcatatggagaattaggaaatattgcactttaatgcataagacaccttgtaaaatacccataaaattttaactggctgcagtgttaatgaagcaaataccatggagttataatagcttttgaatgtgatttatgcttacagctaatgaacagatgaaaagcactgtccttttttaagtaaacactacacactccagatggattgcaaaaatttattaaaattggagacactgttttaatcttcttgtgccatgagactccatcaggcagtctacaaagaccactgggaggctgaggatcacttgagcccagaagtttgaggctgtagtaagcttcaaaggccactgcactctagcttgggtgaggcaagaccctgtctcaaaaaataagacaagacttttagccacatttacagacttcaattaaaatgctacatgggaatgcagaatatcagatattttattgtcatcaagtaatcagtgagagagttcaagttggattgagatcatcatgtattctgcaattataatagtcccaacatttccaatcctcacctttcaagcagtaagctgcatgcttgcttgttgtggtcattaaaaaccctgaaagcgaagccaacatattaatcagggcaaaatacaaatgtgtgatgcttgttagtagagtaacctcagaatcaaaatggaacggttttacagtgatatcattatatttcatttggcagaatcattacatcattggttacactgaaaatcatcacatgtaccaaaagctgactcacctagtttaggataacaggtctgcctgtttgaagatgaaaaataatacccatttaaaatttgccctactcaatttccttctcagtcacattttaacttttaaacagctaatcactcccatctacagattaaggtgtatatgccaccaaaaccttttgccaccttaaaaatttccttcaaagtttaaactaacctgcatttcttcaatcatgaattctgagtcctgaaattaagggacaatacacagtaagacaacttgcatacaattaggagtaatccaaaatctccaaacattatagaatggctatattccccttttcggggcataaactagaatgttaccgccagatacatcagataggagcgaaagacttaatattgctcatcagcgttagtctgctgaactatgttatcatcattgtatcggctttacaacacttaaaaaccagacttgaggcggggcatggtggctcacgcctgtaatcccagcactttgggaggtcagtgcgggcagtatcacttgaggtcaagagttcgagaccagcctggacaacatagctgtacaaaattagccaggcatggtgtcacatgcctgtaatcccagctactcaagaggctgaggcaggagaattccttgaacctgggaggcagaggttgcagtgaactgatagtgccgctgcactccattctgggcaagagctagactcttgtctaaaaaaaaaaaaaaaatacttggaactgctatacctttgcttctttaaaacttgctccacacagtgtagtcaagccgactctccatacctgtagaaatttaatctcctttaccaataggtagtaataggtggatttctaaaagatttcccaactactgtttcagtttaagattaatctccattttctttctcagagagattcccatctgctttaattttaaaatcatcactaacagtagctcaatcaattaacgttaacatcaataaaacatgtacctttaaaaggtatgacaggaactgtcttcatgtccttacccaagcaagtcatccatggataaaaacgttaccaggagctggaatacaaatgaggacttccattaaaatgctaaacatcattaaactcttttcaaagttgtctgtcacagggttcttcagtgttacctttgtctacatgctcatttcaggtcagacatttgatcaacatcattacacaaaccccgttccaaacatgctcaaggaaaacacataaacactgttccagacatgctcaaggaaaatacagtcagtattcatcagccaagccttaagccattagctcagcagtaagcatatcaccatcagcattttcattaagtctatctactgttttcattaatacttaccagaaccattaagctggtccaggcaagttggactccacctaagaaataagagtggtcttagaatagccacagatgagtgttcaccccctgccaaaactaacaaatgcctttagtcagttagagctaattaagaccttcatgttcagtcagcatttgcttatcatcatccaggctgcatttacaaactttcttattaatcataacaagacaagaatccgccatttatttaatgcattcagcactaggaggtaactaaaaagccatttgtgccgtaggaagtttgcccagttacctgcttacttggatacagtttcacttaccatttcaacttccagctttctgtctaatgcctgtaattttaa

SEQ ID NO: 1880205 - DNA, 4001 bp, Homo sapiens
accagctgctccatttgctgaagctgcggctgctgcaacagctatgaagaagaaagcaaaccgtttggctatgaaagggactggccacatttccaaactacatttttatcttttttcaaaaaatcttttaatgctgcctatcttttcaaaacagacacaaaccatacaaatctgtctttgatcccttcatatgaagcttctattttctgtttctactttcaatttgaactcaaaataccactagaacaagttcactatgctggttgcttttaagagtatacagattaaaaggggtataaacatcaaatgtatccattaaatacaactacttcctaaaatcttaaattccataaatatctatgttgagggtttcttctagaaccatgtaatgcacatacacatccttcaaattcctattttagcacactgctgtcttctagatgttcctgttattgttcttaattaaaaaataaataaatataaacacttaaagtaaaaaactattactcctcccaaccaaatgtattattttgtcacttctcactactctttcccacgtcctccactcctgcccctgtggcaaaaaacaacccctcctctaaaattatcttaaaataatgacttggatttctgccaacaaagccattttgtgtgagtaatgcaacttctatgttctcagtggagccagaccttcagaccttgcttctaaccagctggcacatgccacccctcccccaacccaccaaccccccaacaaaaaggagaatccactaaggtcacttattgcttctgatctctttttgaaacattacagggtagaaccgatatactgagaattgccaaaagtttatttcaacatactttaagaatctcactatcagtcgccacttttagatctctggcaggagtccactcagatgtgcgctcacctgcttgtgcagctgaggaactaatgatgactggggcaggagctacaagtcgaacaggagctccaagaccatttctcgcgcctgcattcactacaagggcaccagtttggtcatagtaagcagcaggagccaacaccggataacctaggaatatcaagccaacaaagaaatgtatatgttaaacaaacaagtatctcctgggcaccaacatattgtcaataatcacaaactcagctttgaggttgaattggccagatttatatactggctccatcacttaaatagttgaataaacagaggctacaaatgattataaaaatcatagtactttcatactacataataatttaagaacaaatatcctgcaaaatagcaggaaaaacctagataggctttaaataacatgatctttcaatattatgtgagatagaatctccaaatcccagtttaagccatatgaaaaactgcaggtgacttcctaagaacacacaaaggctcagtaactaaaaaacaaatgaaacaggttaaagttatttattgaattcataaatggctcagttaaattggctatgctctatgatcagtaaaggtccataaaaatacgctgacatctctcaaagacttgtttcacatgtagaacatcaaagtacatctaatcccatgcaaagcaccaaaccagctgacagtgaaccaaaaacaacatatattcaagatgtatctatataaacatgtatctcagaggtagacagctaaaaaggacccctactattggtttaagagaaaccttaaaaacgtaagggatgaccctatcaaggtataccagaaatttctcactaatcatgctgttcaaaaacatcaacataaagactaagccttgtaaactagcttggccactccatctatccctgattctgaaacagaaaacagataatccaccaaggaaaaaccacatattccaagctgcatggacatttagatacctccaatatgacttaagactggctcagaacaatgctctcatcagtgaactatagtctaagtgagggcaagtgtgtatcatccttgccagtccccaaatcatgacaagcctaagcaaggtgaaagcactgctcattcccctctgtaatcacctcaaacgtgcagcctttttccctgccaaagtattaggaataacaatgcagccgcacctggcatgcctgctgccagaccttgtccaaatgcaagggcagaattcactgctgcagctgccacaaggggatccgtttgctgtccctgctggttctggtttggggtcaaaggacgttggctggctcctccacggagaacctgggaaaggaagacagaaataactcaaccactttcttttcattggagaagacctaccctatgctcaggttgggtcaacttttaaaacttaattgtaaattgtttccctataatggtttttatatgtcacagctgttagcgtataaattcaattaataacatttcatagagtggaatttcattctaccattcttactttaaacacattatctctataagcagcaaaaagcacacaaaagtgatgattcattcattcaaacattttatctcatctgcctcataaagttcttgtgacaattaagttaaaagatgaatttggaatatctggcatcagcaagtggtagtgttatcaaatatttaatgcctaccatgtggcaaatgggcaagtgagacagagcaatgaacaagaccgacaaagcccctgtcctcatggagcttttattttaacgaatgagacagacaataaaccatactatataatgtcagtgctctgacaaaaagtgggtgaagaaaaaaaaagagtgtaacaggccaggcgtggtggctcacgcctgtaatcctagcactttgggaggccgaggcaggtggattatcagaggtcaggagttcgagaccagcctggccaacatggcaaaaccccgtctctactaaaactacaaaaattagccaggcgtggcagcaggtgcctataatcccagctacgagagaggatgaggcaggagaatcacttgaacctgggaggcggaggttgcagtgagctgagatcgagacacttcgctccagcctgggaaaaagagcaaaactccatttcaaaacacacacacaaaaaaaaaaaaaaaaaaaagaaaaaaaaagagtattaatgggggttgggaggggttccagacaagatgaacaggggtaatttacccacacatttaaagtcaactgagtctcacatgcacacaaaagatggaatgagaatatttcctctttaacactaatatatttatcaaggtccacatggccccaaatgagttcaccagattcgatttggtagggctctcacctgactatttctatttccctctcagaaattccacaaacatacgcattagtcaagttcagtgcagaataccagttatgccactctgataaaggatctacttttttttttttggtgggcggcgggtggcgcggagtgcagggaagagacagggccatgctctgctgctcaggctggagtgtagtgtggcacagtctcagctcactgtaacccctgcatcccaggctgaagagatgctcccacctctcctgagtagctggtactacaggtatgcaccaccacacctggctaatttttctattttttgtagagacagggtctcaccatgttgttcaggctaatctctaactcctgggcacaagcaatccacctgccttggcctgccaaagtgttgggattacaagtgtgaagccactgagcccagtcaaggatctactttttattaatgaaacacagacatcaaaatgctagcaatcattattattctgaatgatgtgaagaatctatctcacaagatctacacactccagcaagcaaaaatgcaaaacccacaaaccaaggctaaaattactacagttcctaacaatgtgttttgtcatattgtcaagtgtacagttcttatcagatcactttcaatttcactgtgttatttataaaagttagacatatggtcaagaaaatgggtacaaattattcttggt

SEQ ID NO: 1880206 - DNA, 4001 bp, Homo sapiens
tcccgacttctggtgatctgcccgcctcgacctgctgaagtgctgggattatgggcatgagccactgtgcagaaaaaatttttaatagtattttaccaccagggacagggactcatgcctgtaatctcagtactttgggaggctaaggcgggaggatcactttaacctaagagttcaaggctgctgtgagctgtaagtgtgccactgtactctagcctgtgtgacagagcaagaccctttctctaaagtacatacacacacacatacatacatacaggacttggcctttcagctcctatatttgactgaagttcttccactatgcacttattgtcagttcttgagatgatgctctggacttaataactttgatcagaccttctaaacccaaatttgaagtgaggaccagaccagaaaatctaggatacatgatggctagagacacaggtgtagcttttaatagatgcaggctaacagctgccattttcccattctctagatacattattctattttcatcttccccagaaccctgcaaggcagtgctttcacttcctgaaagaaactggcaggatagggaccttaccatagaacagagttctgggagaagggaactgaaccaggtcccttgcagctgtccctagacttccctgaccccatccttgcttgctttccagaccccatgccacagctggatgtgactgaggccaacaaggagttcatggaacagagtgaggagctgtatgacgctctgatggactgtcactggcagcccctggacacagtgtcttcagagatccctgccatgatgtagccaggccaaaggacaagccaggttgcatgatgtgagggagatgagagactcctttttaaaaattgtgaaacctttttggaaatatgatttgtaagattttaataatgactgtttttggagatcatgaatgtttctacaacactgctgcattcatttgaccatttgagtttgaagaccaagggaacaacttttaaacaaggttcaaattggtttccttcacaggaatcctttgtccaggtagttatccacataggacagtttgggattatccaaaactgggatgagcagcttgggataattcacacactaaagcctgagttcaaggtttctcagttgacaggtaggtatgtaaatcagggttctctggagtatttgtaggacctgccatatttgagtcctaacttggtgcaagtctggcagctaggtagaaaaggcactctagcaggtgtggtaggagcacgccccagaaggtagaatgtggtggggtgtgatggaacaggccagttggcctaagaattagtacttgctctaataatgggtttcatctattttcatgagttgcagcatctgcatatacaaggcctggatcactttaggatcaatattttgacacgggagaaggcagctcagaaaggattaaggaagatagctcaaagccaaagcagaccctccgtgtgaactttatactgctcacttccgtgtttcccaagtaaatggggaaactgtccaaccttgtcatgtgttgggacttactgcttgaggcaaagcattcatcctacatcataaaaaatctccaaagatctctttaagggctgggcatggtggctcactttgggagatggattgcttgagctcgggaagagaccagttcggtctctacaaaaaaatacaaacacaaatatacttttattagtctttttattcttcttttattgatcacctctgaagttcagtagcacactgcataattttttgcattagcatgctgttgtttctacctaaaatgaccggggtccttgccttctgcttcccatagagattgtcctgcaaaggaagtgtaagccattgtgttactaattcccagatttcccccacccagacattttcctaggagctggtctcagtcccatatccgcatttctcatccatggatgtccactcaaattaggtttcatcctggaccagtcattctaaatacagtgtgtgctacatggaaccccttgtttctaccccactctcaactctccctaatgctgagagacgtcccaccaaagaatgcatcatgagctccagccaccactgaacatttgtggctaccaggccttgtggcccacggtgccctctgatgccttcaatgcattttagggtgggtaaatcatgttctaaccatctttgccctctggtaatgaatagctaagggcacacgagggaggccaaatgtaaatgttactaagatgctaagactttctggcccggcacagtggttcatgcctgtaatcctagcactttggtaggccaaggcaggcagatcacttggggtcaggagttcaagactgccctgggcaacgtggtgaaaccctgtctctactaaaaatacaaaaattagccagacatagtggtgcgtgcttatagtcccagctactcaggaggctgaggcaggagaatcacttgaacctgggaggcaattagccaagattgtgccactgcactccagcctgggtgacagaaagaccctgtctcaaaaaaaaaaaaaaaaaaagctgtaactttgacacagacctaagtaaccttatagttctattaggttgactacttaggacaggatcccagatagttgagcactacctgcagctacacaccaagttgtgacaaagctttgggtagtcactaacttacccaactccataggtccatagtcacaaatgaggacagctttacatgtaacatgaatctaaaagaaaaaaacaccacccttaattaagaggcaaggaagctatgacagatccctcccaaatgcagtaataggtcagctattactataccaacctccagagcttcacacgcatccttcccttagcctaagattatacttcattttacaatttcagagatccaaccatctctgaaacctgtctgaaactagcccacatgccatataccagattacaacatttaggccagcttcactattacttttcctccttttacgaccaccaagaccagtgttcagatccgatgggaaagggatcaggaggattaagctgatcaactttaccttaaagcacagctccagaaacaagctcacctcctcagtatcacacactgccaggaaacttgggggcaacctgcagaacaaaaagcttagcgtgaaaactaaactggccaggagcggtggctcatgcctgtaatcccagcactttggaaggggaggccgagtcgggcggatcacccgaggtcagaagttcgagacccatctagccaacatggtgaaaaccatctctactaaaaatacaagaaaattagctgggtgtgatggtgggcacctgtaatcccagctactcgggaggatgaggtaggagagtcgcttgaacccaggaggcagaggttgccatgagccgagatcatgccactgcactccagcagcctgggtgacagagcaagactccgtctcaaaaaaaaaaaaaaaaaaaaacccatctacattgaagttgacacatggaaggcttccagccctggtcctgaaacattataggaaagctgagtggcagcttgcaggtattgtactgacctgcgctgtcaaagtctttccaggttgctcttgcatgcagttggagatcccatggctatgaccagccacagcccttggaaacatgctgttctgtcccaccaggcagcccccagttagtctccaaaagaaacctaccaggtcccctgcatttcatcactgtcattaccccggaagtcctcgatcaccagaaaaatcaccttctgtcatcttaagagtcttcatctggacagcaaaatgagaacaactgtcatgaacaattttattgttcccatcatttggtcctcagaatgatacaaatctgaccagcctttggtcccaatactgatgccttaagctatcagttaagctgtgtcacatcccagctggattttcccagtacgagtcttatgctggttaact

SEQ ID NO: 1880207 - DNA, 4001 bp, Homo sapiens
ttcaacatgagatttgggcagggacacagattcaaaccatatcaaagggattcattgatttatttgttaaataatcagtaggtaggggcaactatattcctggcactgtaagagatgttgcaaaagataatcaacaggacttaagagtaaggagaaagaacacttacgtttttgcatgtgtggacatcaaatgtggcatatctggtgagaagactgtcattttctgactcttttaatcattataagcctttgtttcctaaaccatccctcttgggggaaacatagggtgtaggtaataacttcactgataatataatgtttgggtcggattccatatccagcagggtcactgggatccagcaaccagtctagaaactgtcttttcttatctgggttggcccaggtaacttgcaagttctaattgtctacatttgagttttcttggtgttttaccccccaagaagtgctcaatttcttgttccttcttccatctcagagacttaccttagtctgcccactgagatgaccttgtgactcctaccacaatttccactgggatctcttcttcacctggattataatgactttattagactctgaaaaagccacgttcttttttttttttttttgagacggagtctcattctgtcgcccaggctgggtgcagtggtatgatcttggcccactgcaacctccgtctcccagttcaagcaattctcctgcctcagcctcctgagtaactgggactataggcgtgtgccaccacacctggctaattttttgtatttttagtagagacggggtttcaccatgttagccaggatggtctcgatctcctgacctcgtgatcagccctcctcgacctcccaaagtgctgggattacaggcatgagccactgtgcccggccaaaagccatattcttaaaattccttataatttatctggggctttacagaaaggtacttaagtgggttggcaaaatcatacctcaaaatatccctcccctcagtaatcagtctgtgccccaggtatgtaaattcttttctcctcagagtaagtttcctaatctccatatgccacacacattggctccttcttttttgaagagtcttatatttcatgcaaattggatatgacaaaccaggtaagtataatatatagattaggtctctttttggatacttgcttaacaagttattaatagttaaatacaacatccctagaaatagataatatttttgttatctgttttttatttctgaagaaacagaataataaatgacttccctaatatgaccaaatgactaaagttttattgttgttgttatgttttgtttttactactagaaaaaaaaaagcacagggctttattatccccataacaaagggtaggtcttcataggatgagggagtgagttctgtcaatggggaggtggcccccacttgttggtgatgactgagtccctgcacaggaagagcttggagatgaagtggtctttgttggctggcttggacttcttcttgcccttgccaccgttgccccccttggggacctcagtacacatctccttcacattctccagcaccatgttgcagtgtctactcaaggccttcgcagcccagcagcttgttgttgtcagtagttggtgagcacttcagtgttgttcttgactgactgcggagcacagagtggaccctcctccccgtgcttctgcatctcctctggggacatgtccctctggggtttgttgaggaggttcagggtggttactatgttcttggttcactcccatctcctctgcgttgcttctgtttttccaaatgactacagtttatcagttataagcttgactacataacactgctactgcctctccccccaataactctgagcacagtccctggcaacataatgtgctgataaatgcttaataactggctgtctgtgatggtgggaggcagtgtttgcagcgtttgccagtttccatggtgtaaattctcctaacattctttcaagctacccatgtgatgtcactgaacttggaattgggaagagatgggcgcaatcacctcttgcaggctggtatgagccagctccggtatacctctgcctggcacctagtgtgagtttagaatttaattattcctctgtgagcatttgccatgacaaataacaacagtcaaaaaactttgttatagcatatcttatttggggagtcttggttttgatgctaaagccagttttaggaggcacgtacctacacattgctagttgccagttaattatcttgcagagctaaaagttattcatttaggcacagacactaaaacttcatccagtttttcaaaatatggacttactttgtcaagtaagatggtaggtgggagaatacaagattgattgccttttagattcaagcagaagtgagggtgaatattaatatcaggtggccacagggaaggcctgtattctagaaaactctggattagtttagaggcttgggttctagtctcaatcctgccacaaactaattgtgagaccatatccactaaagcctgctgggtgtgaatttcttcatctgaaaaaatgagagagttgggccagattatctgtatgctcccttacagctccatcattcgaattgtacaaattaatatagaagataataatgagaagagttttaaaattataaaacttatatacaaattatggtaacatgtatacccaaaataagcagggtcttgaagagatatttgtacactcatgttcatagcagctttattcataacacagataaggtggaagaaacccaagtgtccgtcaatggatgaatgggtaaacaaaatgtggtatatacatgccagagaatattattcagccttacaaaggaaggaaatcttgtcacatgctactacatgaatgctaagtgaaatacgacagccacaaaaggataaatgctgcataattccacttatatgagatagaggccgggcatggtagctcacgcctgtaatcccagcactttgggaggccaaggtgggtggattgcttgagtccaggagttcaagactggcccgggcaacatggcaaaacttcatctctacaaaattgtacatatatatatatatatatatatatattagagtagtcaaattcctacagacagaaagtagaatggtgattgccagggactggggagaggggaaaatatggaattgtttaaagagtatacaaaagttccagagatggattacacaacaatgtgaatatacttaacacccctgaactgtacacttaaaaatcgttaaaacaggctgggcgcggtggctcatgcctataatcccagcactttgggaggccgaggcaggcggatcacctgaagtcaggagttttgagaccagcctggccaacatggtgaaaccctgtctttactaaaaatacaaaaattacctgggcatggtggcaggcgcctgtaatcccagctactcgggaggctgaggcaggagaattgcttgaagccaggaggctggtgacagcgagactccgtctcaaaaaaacaaaaagttaaaatggtatattttgtattacgtgtgtcttctcacaataaataattataataacaaaagaaacatgagggaattttgcgaatgtttgttagtgttcttggagctttgccaaatgtggttccccaaatagccctcagtaggtgatagtagggttttatagtaaaatcacgagtgtaaattaacatcttggggatttccaatgaggttcttcggagaaacctgtttatattagatgacaaaacatggtattctgcatttttgaaattgtagatttgctgagattcaggctaattaaaattataaatataaattccctctgattagcctgtatttaaaaaattgattcaaagacaaaccaaagtaaatgatataaatccacttgcaaatgacaaagcacacatttgctttgattggtctttttctgaatgttcaa

SEQ ID NO: 1880208 - DNA, 4001 bp, Homo sapiens; identical to SEQ ID NO: 2080

SEQ ID NO: 1880209 - DNA, 4001 bp, Homo sapiens; identical to SEQ ID NO: 2081

SEQ ID NO: 1880210 - DNA, 4001 bp, Homo sapiens
aattataatcatttattgcatttacataatcatgtgctaattgttacataataatttatatgataattataaaatattttaaaagtgtgttttgatatagaaggaaattagaattacctcttatccattttagtggattttggattattttaacagttataagttatatatacatgtacacataaaatatgttatttgaattatacctttacacaaacatatcaaagacaaaattggcaggcatctcaagtaatttttataaagtttttcactttatagcaattacttgaagtgaaataattagctgtagagtgtttagcagattctttcaataattgattggcttaacccaacatatgatgagtaagaaaataaggaactttttttccaattagttttgaggaggtagattcattttaccacacatatcgtagaagattaaagcttctcagacttagccaagcaaaatataaaatttagtgatgattatctaaagagttatattactcagaattcttttcctatttccaatgatgcaaaggtttacaaaatagcatgactaattgctcaaacaaataattgagatgattattgattatctgattgatatttctacagaaatcattgtatattaaacatactgtgatatcatttcttactattttccttagtaagcctagaaagatcagctatcaatgttatccccaaagaaagttgctcgatttgtattttccatggaatacttgtacatatcttcaacttccacagtgttgctgatgaccctttgctctgaggctttccgagattgcaaagtctttctaagattttcaaccaatcagaaaaaaaccaagttgcagatgctaaaaaaaatttcttatagattcaaatctattattttttttttgcaactaggctaagtaattggtctttaacctaaggataattccattattagaattgaaacactgattttttttcatagcttcttctgaaccattttgctttttgtatactggttaatgcattattttatcctatgtgacaaaagaaatgttagaaatataggttttatatcattgcagataataattccgtgaagtatagtcctgtcacaaagattcatggtttgttaatgcagagggtccttttaccacaaaaccaactttacctataaggagttaaaagtagtatatcaggaacctgctatctagacctagaaaggtacagctttttatttctaatgttaaggactcaaagggtagcattatatctgagagtttaatacatttagctcttttgttttcatatcattatgaaaattgcagtgtgttatagtagaagtagtatgaactttgaaactagagctatatgaactcaaatcttagttccattaaacagcagtataatcttcggttagtaatttagcccacctgaaactctattttcctgtctgtaagatgaagcagaaatgttaccttaaaaggttgtaatgaggattgatagagaaaatgagtataaagtgtcaggaacatagtagggtcttaataaaagagaattattaacatgctttgtattactacaaatgtaattctgcatttaagacatcaaaaaagttgtaagaaatcagagattccaaagatgggctggattttatcccctagcctggagaaccagaagttgaggaggacaatgagcacagctctgcctacaccacagcatcctaacctcgttaaaggcctctctttgtgcatctaaaagacaatttttctaagtgtatttgtttgctagggctgccatagcaaagtaccacaaacggatggcttaaaaacatagaaatgtactgtatcacaattttggaggctagaagtccaagatggaggggtcagcggagttggttccttctctgtgagaaagaatctcttcatgcctcttcattaacttctggtggtttgctattaatctttatgtttttcagtttctagaagcattcctctgatctctgccttcctcacgtggtgttctcccaatgtctatgtctgtgtccaaatttttctttgctatagggacaccatacatattagagtaggtgcttaccctactccagtatgacctcatcttcatttgttacatctgcagtgaccctgtattagtccgttctcacactgctatgaagagctacctgagactgggtaatttatgaagaaaagcggtttaattgactcacagttccaaacgctgtacaggaagcatggctaggagacttcaggaaacttacagtcatggtggaagggtgaagaggaagcaagcacatcttcacatcgtggcaggagacagagagcaaagggggaagtgccacacttttaaacaaccagatctcatgagaactcactcactatcatgagaacagcaaggcaaaaatctgcccgcatgatccaatcacctcccaccagatccctccaccaacaatgggaattataactcaacatgagatttgggtgcaaacacagagtcaaactatatcagaccctatttcaaaataaggtaacatgttgaggtactgggtgttaggaattcagcatataaattttgagagaacacaattcatagcattgcattcctagttattaggaatgacaaaatgcttcttaataatcacaggctggtaggttatagctgttagtcacatatcttctttaaaataaacatagcaaataggacaataataataaagacatggaaaatagattacggaagtttttttggaagtcattttaaagctttctttgttcttgtttttaaaggaactcattcaattttctcatgccatctcaaagaaaattatttccctcactcatatgtctatccttatgaagccaggaagccaaataagcaattaataaataattatgaaggaacctttatatgggaaggtctcatctagatattgtgagaaataaaaaggattatttattgattcaacagatgtttacatgtcaggaatagttccaagctctagggacatagtggtgaataaatcagacatagcctctactctcgtgaaacttatatagctgaaactaaccaggaaacctaacaaaatttttagtaacatttaccaagtacttgataaatggtcaagtgtgtgtaagagacaatgtatatatttttaaatgtcgagttttctctggtctctgataatctaggaaagcgttcttgacagataaggaactgagttggatcctgcaaaagatgattgagattttgatagaggaaagaagaaaatagataaaagtaggctgatgatgtgaaaaggaaaacgatggtaggaaaagttgacagaacaatgacaagaccaatttgacaggctactatttatgttagagagcaggagaaagaaaaattgcaaaaaagttcaagaccaagtagttggtggtttatcctataggtaatggaaaattatttattgttttcttagagaaagtggatggtataaaaagaatataaatttgattgtgagacaaatgtatttcagaagaatatgatagatgcagtgaaacccattaggataaatattgcagaaactttggtaataggttagaactaaaatgatagaaggatttgatattctctttcttcttcttcttcttcttcttcttcttcttcttcttcttcttcttcttcttcttcttcttcctctgtataatctttgaatggatgcttctacttgaaagattttaactaccacctctatgccaatgatttccattttaaatctgtacaatcttgatcctacatttcaggtttacattttcaactgccatctttgtttgtatctccaccagatgtcctaaacgcagtatataacacactttcctgcatcttttcttgagtgtgaattgcatcaccaactatctgcacaagctagagacttgtgagttaccttctcctccagcatcatccatatcctatgagtcctcaagtcctgtttattctacctttta

SEQ ID NO: 1880211 - DNA, 4001 bp, Homo sapiens
agccaagattgcgccactgtactccagcctggtgacagagtgagactctctctcaaaaaaaaaaaaaaaaaaaaaaaaagacattatacttctttaaatcaatgtgttttaaagtttatcactggaattactttcagaaaattaattggtaagagttttctaaatgttcccaaagcacagcaaaggtccgtggtttacagcacacactaggctacatcaatgggaaaattggataaaaagacagggctaacctcaccaaagagcaaggaaaaccagcaaagttttctggtaaaacacaggcaggaagtttctccaaatactgctttactcgcacttttaaaaggctttcctcccttccccccaacttctaaaatagtttcaggataacaaatttgtaacagctggtcatcaaattcatgcgcactcccaaaaggacgacagccctaagactgactataaataatacatccatctggctcttgtaggagtattggattgacttgttgcccatcacagtgtctcccttctgccaccccacaatgacagggtgaagctagacagcctcactgaatggtatatggttacagttgaggcactgcattgtgggtaccccacatttctgagataaagttagctgatagaattaccagagcataatcaaatgcagtcattacagagggagcctatatcatgttacctttgaaaatattttaatctagaaacatcatacactgtatacaaaattcatgaatccctgacgcctgggcgtggccttggacatattattctgagccatctcctattttctttcatatgtaaatgttattcttgagctaggaataggagagaaagagaaaattgaaacagccagaccaagtgtttttgaatgctcttaaaagacaaaaaaaaaaaaaaagacaaaagtttgtatcacatcagaagttccctacgtgctcttcaaagctgattgcttgcagttaaaagaacccagaagaagcaggcacgccatgattttgaagctccgtttttgttctgttattcaactgcagtcaacttccaactgttgaaaaaaagatgatttagaattaaagggttgcttgtctgtgtcgcaaggcccttcaacttgttcacctgtgatatccagagactccaagatgttggtgagtttctattgcaattgccatattgccatggttttgccctttgtgttgactgtagcattgtgctgtttgaagacagagcagcatactgctttgtgtagtaaaaattgatggataatgtacttaaagcttttagatgtacactattcacattctaaatgacagatacaaaaaggaataatcagaatttagattgttgaatcattgcctccaacagccaactcttaccgtgacaaagtcagtagggctgatcttagaagtgtaggacttgtgagtgttacgtggttgtactaactggtaccttagtggaggggcagataaggtaagtagaaacaatgcctgctttctcctccatgtctgggtcctacacatagtccccagtttgcctggtttgtagaggtttaaacacagaacagagggtgttgggaatgagacaaagagattgtcacaggaacatggacccacggttttcctttggtgatgaaaacaatcctgtcaatatggaaaactgtgttatcacaaaatgggcttagcgaatagaagaaatgtcacctaccagccggaaacaacaattcgctgaccatctttggcctcttgccactaaggagttttggttttcccatctgtagaaattcttaattgagtccatcagattcccagtcatcctagccatggttaccttcttctctaagttggcaggttagtgagcttaggctagcacttcagcatcaaatttagacttcataataaagtaaatcacacagggaatagctgtcagcatggtgaccaccttgttgtccattcctactcagggactggcctgaagtgttttcacagcctgggtcactgtgatgtcctggccctgtttgctcaaagtgttcatctcagagtgacttgtgaggtattgctgagcacataatggtcaagatagctgcataagcaggcgtggccccaaatgtagtcacctgacttcagaaaatcaatttggattctacagaaaggttctgttggattctgagtggaacctctttggatatgcctttggatttcaagattgagccaagtgttgacatgggaagatgctccagttcctccagttatctcaaagaagctcattaccttgctaagggtatggattgtccttttccagaaaaaatcctcttgatattttgcatgcacacatgcaaaaaataataacaacagaagctgttttcctgtatgtaatgagagtgttcctcaggtttctggtttatcttaatggtatctcactccttttcttttcctttctttctttctttgtctgtgtgtgtgtttgtgtgtgtgtgtttatgtgtgtgtgagagagagagagagagacagggtcttgctctgtcacccaggctggagtgcagtggcatgatctctgctcactgcagccttgacctcctgggctcaactgatcctccatctcagcctcccaagttgctgggactacaggcatataccaccactgctggctaatttttaattttttttttctttgtagagacagggtcttgctttgttgcccaagctgttctcaaactcctgtcctcaaggaatccttctgttttggcatcccaaagtgctgagattacaggcatgagccactgtgcctggactttttttctttttcttgagagccagagcaaaattcaaattttatcagttttaattaattatattttaaaagtgggaatttggccaacaaagtatctttcctttctatacaagaagggtatggcgtttggcaatgagctcctgaaaatgtaaagaaagcatgaggataactttgggactgatacttgggtcattaaaagtcttgcaaaactagaatttgttttcttcttcttccattctctctgtaggcatttaaacatactctcaggccaggcacagtggctcatgtctgtaatcccagcactttgggaggctgaggcaggtggattacttgtgctcaggagttcgagaccgtcctgaataacatggtgaaactccatctctaaaaaaaaaattaaaaattagtcaggtgtggtggtgtgcgcctgtagtcccagctactcaggaggctaagggaggaagatcagttgagccatggtgttgtcactacactccagcctgggtgatagagtgagaccttgtctaaaaaaaaaaaaaaaaagatactctgtttttttttgttctaaaaaattagacaatattttgtttaaacttgcttagtgatttatttatttatttattattttttatttttttgagacagagtcttgctgttgctcaggctggagtacagcggcatgatctcggctcactgcaacctctgcctcccgggttcaagtgattctcctgcctcagcctcccaagtagctgggactatagggatgcaccaccatgcccaactaatttttgtatttttagtagaaatgggttttgccacattggccaggctggtcttgaactactgagctcaagtgatccacctgcctcagcctcccaaagtgctgggattacaggcatgagccacctcatccagcctgatttttttttttaccttcaaatatatttatttacagattgagttttaaaattgtcttaaagttcttgtagagattatgtcttttttgttttgagacggagtttcactctatcgccaggctggagtgcagtggcgcgatcttggctcactgcaacctctgcctcccgggttcaagtgattctcctgcctcagcctcctgactagctgggactacaggtgtgcgccaccacgcccagctaattttttgtatttttagtagagacggggtttcaccatgttggccagga

SEQ ID NO: 1880212 - DNA, 4001 bp, Homo sapiens
tttcctgatatcctgacttgatcattacacattctattcatgtaacaagatatcatatgtaccccgtaattgtatacaagtattatgaattcttaaaaaatagcaatagagactcttcttatttcctgtattagttatatccaagctactctcttgctggagcaactatggtggtggttgtagtggtgtagtgatgctggtgatgatgataatgatgatgatgatgaagacaaggatgatatattcctgctaataaacctcaattaaatgactgctaattatgtgtcaagcattctgccaaccaaatttcagatagtaattcaattttatgccttagactagctttgttatgtaaatgttattttgctcactttgcagtaaagagactgacatttggggaagttgaataatatgttccttgaatcaatcaaaacactaactaaggaaaataaaacgggtttaaaatcacacagaaataatctttagtatgacccaaaattcctacaataatcatgagagcctggtcctggggaccaacgaaagatagaaataaatccaaatgatcatatgatattgttaataaagtaggtttaaacagaaatgaaatatccattcacaaaaatataggcatagctactttattcagggagtgaaagaaaagtgacaattgcacagatagtagaagctcatgccaggtgacagacagagacagaagacatcaaaataattctttgatggcacccaaagagaagctctgaaaggccggtacagctgaggacttcctttgctcagtctccacctggacagtggcagcatggcagcctcagaaaggaaacattttgctgtcggggatcatcatgggcagatcacaggctaaggggaaagaagctccctgtgtatccctggatggctttgatgagaagatgcaggtggagctgtggaacgaggtgagccaattatccctatcctttcgtggtcctgatgaattccgaagctgttacttgctcttgggtggacactttggctggcagggtggggaaggtgtcaccagaggatatttctgctggcactgctgaggtgggcagggctgtggacactttggtggtgggcagggctcagggcacttcaggggtggacatggctctggacgctttggcaggcggcacacaggaggtggctggcagggctgcttacattgctactgttgataagacatcctgctggagtctcagaatctgaaagaaattatataacagggttcacaggaagggactcctacaaagaaaagccaacgtttatgtaataccatgggctatttctccagtctccaaaaaattatttaaactcctaattcccttttcatgactctctggtttctcctttccactttagcaaattgctttatcaaccctgggaaatcctgtgttttctcatgcaatttttctaaagaaaatatctctgttataaagaatcaagcatgaaaataaccacttcatgaaaggcagtcacaagttcagatactctgggcaatctcagaagctattcctatcatcattatctgttgtaaagccccagtgggctgatgggcaaagagcaaagggctgtttgggaagaattgcaggctctcacacctgctaaaacacaaatgtttgaaaaggacaccagaaagatatagaaaaaaggaaaaacactttgcttttacctcttcctcaaatcaaagccttcctattaacttcgctgttcatatgaacaccaagctacttacaaaaaaaagctaaaacaatgtgtcattatgatctaatcctaaggttccatccactaagtagtgtcaaaactgtcatcagaggtttggatcaaccatactttctgtcttcagattaaattcaacttttgagggcccaaagaacagagaaattcaagtaagcagactcaccaggttctccaaagcagatcggtgctcaagtaccaggagtttaggagtcatgaggctgagaacctcttcacagggcctgctgccccacccagggggaaacggaactgcctaaaatgggctggtccagtaatgtcccatccaaaatgcaaatttatccataactggtatgacagggaatctcaaaaaaggaaatatcctgttctgaggtctcccgctggattaagtgctcatgactcacagaggccctgccttagctctcagtttcagtgacttatggcagagagaaaattgggggattctctaactggtggtccaaggctgtctttcttgattgggggaaaggatccctttctatcttaacctttccctgaattgtaaaacttcctgctctgatccactttagctgatttctatattgttgtacatgaactcaactctacctctactcccttagtataatttgccaatttgctagaagtaatgagaaactgaacatagttctatcattggcaagtcctgtgatcacaggtaggtcacttctcctccctgggtttgagtctttctgtgttcacaggagagaataatacctggctctgggttggagactgtccacattgtgctatttgtagactcttcttcaagcctgaaattttttcctctcttttttttttcctatataatcctgggtttgacctatattctttgtgtttttagagctgtcttttccacccaatccatagaggcatttctctgctaggacagattccacagtggaatcaagtcccctcggtgtttttcctccttgctgccctcaaagatgtgtactacagaccttttaaggaattaaaaaatgtactcttaatcgccaaattaaagaaaggagagaagtgaacaaaaaccacaaggagtcacctaaaacctatttattgaaccatgcctgagacaatggggttttctagatatacaatcatgtcatctgcaaaccgggacaatttgacttcctcttttcctaactgaataccctttatttccttctcctgcctaattgccctagccagaacttccaacactctgttgaataggagtggtgagagagggcatccctgtcttgtgccagttttcaaagggaatgcttccagtttttgcccattcactatgatattggctgtgggtttgtcagagatagctcttattattttgagatatgtcccatcaatacctaatttattgagagtttttagcatgaaggttgttgaattttgtcaaaggtcttttctgcatctattgagataatcatatggtttttgtctttggttctgtttatatgctggattacatttattgatttgcttatattgaaccagccttgcatcccagggattaagcccacttgatcgtggtggataagccttttcatgtgctgctggattcggtttgccagtattttattgaggatttttgcatcaatgttcaccaaggatattggtctaaaattctcctttttggttgtgtctctgcccggctttggtatcaggatgatgctggcctcataaaatgagttagggaggattccctcttttctattgattggaatagtttcagaaggaatggtaccagttcctccttgtacctctggtagaattcggctgtgaatccatctggtcctggactctttttggttggtaagctattgattattgccacaatttcagagcctgttattggtctattcagagattcaacttcttcctggtttagtcttgggagggtgtatgtgtcgaggaatttatccatttcttctagattttctagtttatttgcatagaggtgtttgtagtattctctgatggtagtttgtatttctgtgggatcggtggtgatatcccctttatcattttttattgcgtctatttgattcttctctcttttcttctttattagtcttgctagcggtctatcaattttgttgatcctttcaaaaaaccagctcctggattcattaattttttgaagggttttttgtgtctctatttccttcagttctgctttgaaccatgcctatgtggtt

SEQ ID NO: 1880213 - DNA, 4001 bp, Homo sapiens
cactccatctccattatttcgccctccaccgccgccgccacggctttttgcccccccgccgccgcggcttattccccccaccccgcctcggctttttgcccgccgctgctttgtgcccccccggcgccagggcttttagcccgccgcggctttttgaccccttgccgctgcgaattttgccgccgcggctttttgtcccccgccgctttttgcaccccgccgctttttgcaccccgccgctttttgccccccccgccgccgcggctttttcctcgccgtggctttttcccccctgcccccacggctttttacccgccgcggctttttgtcccctgccgccgcgactttttgccccccgccgccgcgactttttgcccccaccccgcctcggcttcttgcccgccgcggctttttaccccccgccgccgcggctttttgcccgccgcggatttgtgcccccctcgccgccgcggctttttgcccgccgcggctttctgccacacacccgccgccgcggctttttgcccctccgccgccgcggctttttgcccccaccttgcctcggctttttgaccgccgcggctttttgccccaccaccgacacagctttttgcacactcgtcgccttggctttttgccgccgcggctttctgccccctcgctgccgcggctttttgcccctccgccaccgccgctgctttttgccccaccgccgccgtggctttttgcccgccgcagctttttgccatcgcggctttttactcgccacggccttttacccgccacggctttttgcgccccgctgtcacggctttttgcccccctgccgcagcgactttttcgccgccgcggcgttttgcccccgccgccacggctttttgccgctgtcgccgccgctttttgcccccgccgccgcggctttttgctgccgcgactttttgccccggtcgccgccgctttttgtcaccgcgactttttgcccccgccaccgaggatttttgtccccgccgccacggctctgagggcaggagcggcagactcggctgccagctctactggcgtcctggcaagggcagcgccgaggggtgctcctggtccagctctcctggctcagggattctttgcctaggcgccggcgccccgggctccttgcctaggcccctgtggcctgcatagagtggcgctgcctgtggaggcggtgggagagaagaaggagggcggtggtgggggtgatgcggcggccacggagggtggcacaggggctgcggccagccgggcgctgcagcagtgcgggcagctccagaagctcatcgtcatcttcattggcagcctgtgcgggctgtgcaccaagtgcgctgtgtctaacgacctcacccagcaggagatacagaccctggaggtaaggggttcggggacccgggctgggctccaggagcggcccggacacctccttcgggggccccagttcactcctggccgagttgcatctttgagcccacgtcacccccttggaggcttcccctccctcctgcactcgctgatgcggcagccagaggacccaggaccagccctcaccttgggcaggatttgtggagcgggtgcgtggtgggaactgggatggaggctccagggtcccgtgggggtgggggtgggctgcgtgaggacatccccttaccccctgaatttccatctggtccagccctctcatcttgtaggtgaggaaaccgaaggcccgagggagaaatgacttgccaggaacccctgttaaggaaaattaacaaagtgtggttattaaagaagaactgagttgggagtcagacctggaggcccgcacccgcggttaagacattataccaccttgagtctggcctgttgactgagggtgagccactccatcctcatgtgattgtggggtcttaacctcaaggggtttcctgcaggaagaagcaaatgggtttgctttcctagctctgtccagtacgttagggaccctgaggactgaagagattcttggagagccatctggtgtatgtcatgggtgggtctttttggaaggtcagtctgcccagtgggctggctcagcccgaatgaactgtcttgaatctttggagttgtctgtgtacttttaagggcttctcagccttgcaccaaaagatccccctggaaattaggtgggaaaaaccttaacttttgtggggccttgtgtttgtcttaaaagttcatgcacatagccaggtgtggtggctcccacctgttatcctttcctggatcccttgagtcaaggagtttgagaccaacctggacaatatagtgagaccccatctctacaaaaaataaaatattagccaggggtggttgtgcgcatctgtagtcccagctactactgtggctgaggcgggaggagcacttgatcctgcactgagctctgatctcaccagtgtactccagcctgggccacagagcaagaccgtgactcaaaaaaaaaaaaaaaaaaaaaagacaagaaaaattcttcaagattttgcattctgtcccactacccattggttttcatgtcaagataatgtcagaaattctttacaattgcttccagaaggagtagccttttgatctagtgcacaggtgtccagtcttttggcttctcagggccacattggaagaagaatgctcctgggccgcacataaaatacactaatgctaacaacagctgatggggttaaaaaaaaaaaaggtttgtgcataattttcatgctacccaccaccacagataggtggaaaagtccttgtagtcaaagggctggacacggctgatctagtgtcttgtcgtccgttttggctttctccctgaatccagaatgcaggtagagatgtagagacatgctctcaggacagctgttgagataaaaaaaattcgttgtcatttattcccaagcacagctgtttctcattgcattgaaaaagtctccattcaaactgctgtcacatataaaatctatttatgtaagtctgtatttttctgttgtcttggcctttgtaggcagtagtgtgttttaaccgagcaaactgtccttccaaataatgaagccgaagtcagcctacctacttgccatttttcttccccttccatttttgtaacctcggaataattgtaagaatgaattaagatttgtgtttaaggccaggcacagtgtctcaggcctgcaatctcagcactttgggaggcggagatggttgtatcgcttgagctcaggagttgaagaccagcctgggcaacatactgagactccgtcttgtataatttaattaaaattgaaaaaaagaagagaaaaagacctgtatttaaaattttaaaaagggggggaaagtgtaatgcaaaatgtggactatgcgagctatgactgggaaaactagtttttcatacagcattatctgtagacttgtattagcagcatactggtcataagcgttttgctttcctgaaatatgatgaggtaagctaatttaaagtgtgttggggctttctgccgcgtggctcctggaggtgttgagtcccaatttagccaattaatttgggtttagttttgacgtggataagggagaccagcttcattcatggtgtacacacagttttgccaataaggaaaaaaaaaagccacctgaatgttcctactcattagatgctatctggagagctcctaccccacccccaccaaggcccgggccattaaaaagactcaatgcagcctttctgtatctcatactgtattctgcaagatactcctgtgaaagaaagttgtgctgcatcagccatctccctcctgaagatccctgcggatgaggatttgtgttttgaaagttctgagaattcctgcaacaacaattctcaaacttatttgtccatgggatcttttcttccactgaatgtagttggggagacacggccttaagccttgagcagagaaagagacaagaaactgtcggctcacttacaaccaagtgtt

SEQ ID NO: 1880214 - DNA, 4001 bp, Homo sapiens
gtggctttttgccccaccgccgccgcggctttttgcccgccgcggctttgtgcccccccggcgccagggcttttagtccgccccggctttttgacccctcgccgttgcgaattttgtcgccgcggctttttgcccgccccccgccgctgcggctttttgccccccgccgccttttgcaccccgccgctttttgccccctcgccgccgcggctttttcccgccgtggatttttcccccctgcccccgcgacttttcacccgccgcggctttttgcccccaccccgcctcggctttttgcccgccgcggctttttagcccccaccgccgcggctttttgtccccaccccgcctcggcttgttgcccgccacggctttttaccccccgccgccgcagctttttgcccgccgcggctttttgcccccaccctgcctcggctttttgcccgccgcggctttttgccccccgccgctttttgcacccccgccgccgcggctttttcgccgccgtggcttttcccccctgcccccgcggccttttacccgccgcagctttttgccccccgccgccgcggctttttgcccccaccccgcctcggcttcttgcccaccgcggctttataccccgcgccgccgcggctttttgcccgccgcggctttctgccacacacccgccgccgcggctttttgcccctctgccgccgcggctttttgccccaccgccgacacagctttttgcacactcgccgccttggctttttgccgccgcggctttctgccccctcgctgccgcggctttttgcccctccgccaccgccgctgctttttgccccaccgccgccgtggctttttgcccgccgcggctttttgccatcgcggctttttactcgccacggccttttacccgccgcggctttttgcgccccgctgtcacggctttttgtccccctgccacagcgactttttcgccgccgcggcgttttgcccccgccgccgaggatttttgtccccgccgccacggctctgagggcgggagcggcagactcggctgccagctctactggcgtcctggcaagggcagcgctgaggggtgctcctggtccagctctcctggctcagggattccttgcctaggcgccggcgccccaggctccttgcctaggcccctgtggcctgcatagagtggcgctgcctgtggaggcgatgggagagaagaaggagggcggtggtgggggtgatgcggcggccacggagggtggcacaggggctgcggccagccgggcgctgcagcagtgcgggcagctccagaagctcatcgtcatcttcattggcagcctgtgcgggctgtgcaccaagtgcgctgtgtccaacgacctcacccagcaggagatacagaccccggaggtaaggggttcggggacccgggctgggctccaggagcggcccggacacctccttcggggccccagttcactcctggccgagttgcatctttgagcccacgtcacccccttggaggcttcccctccctcctgcactcgctgatgcggcagccagaggacccaggaccagccctcaccttgggcaggatttgtggagcgggtgcgtggtgggaactgggatggaggctccagggtcccgtgggggtgggggtgggctgcgtgaggacatccccttaccccctgaatttccatctggtccagccctctcatcttgtaggtgaggaaaccgaaggcctgagggagaaatgacttgccaggaacccctgttaaggaaaattaacaaagtgtggttattaaagaagaactgagttgggagtcagacctggaggcccgcacccgtggttaagacattataccaccttgagtctggcctgttgactgagggtgagccactccatcctcatgtgattgtggggtcttaacctcaaggggtttcctgcaggaagaagcaaatgggtttgctttcctagctctgtccagtacgttagggaccctgaggactgaagagattcttggagagccatctggtgtatgtcatgggtgggtctttttggaaggtcagtctgcccagtgggctggctcagcccaaatgaactgtcttgaatctttggagttgtctgtgtacttttaagggcttctcagccttgcaccaaaagatccccctggaaattaggtgggaaaaaccttaacttttgtggggccttgtgtttgtcttaaaagttcatgcacatagccaggtgtggtggctcccacctgttatcctttcctggatcccttgagtcaaggagtttgagaccaacctggacaatatagtgagaccccatctctacaaaaaataaaatattagccaggggtggttgtgcgcatctgtagtcccagctactactgtggctgaggcgggaggagcacttgatcctgcactgagctctgatctcaccagtgtactccagcctgggccacagagcaagaccgtgactcaaaaaaaaaaaaaaaaaaaaaagacaagaaaaattcttcaagattttgcattctgtcccactacccattggttttcatgtcaagataatgtcagaaattctttacaattgcttccagaaggagtagccttttgatctggtgcacaggtgtccagtcttttggcttctcagggccacattggaagaagaatgctcctgggccgcacataaaatacactaatgctaacaacagctgatggggttaaaaaaaaaaaagttttgtgcataattttcatgctacccaccaccacagataggtggaaaagtccttgtaggcaaagggttggacacggctgatctagtgtcttgtcgtccgttttggctttctccctgattccagaatgcaggtagagatgtagagacatgctctcaggacagctgttgagataaaaaaattcgttgtcatttattcccaagcacagctgtttctcattgcattgaaaaagtctccattcaaactgctgtcacatataaaatctatttatgtaagtctgtatttttctgttgtcttggcctttgtaggcagtagtgtgttttaaccgagcaaactgtccttccaaataatgaagccgaagtcagcctacctacttgccatttttcttccccttccatttttgtaacctcagaataattgtaagaatgaattaagatttgtgtttaaggccaggcacagtgtctcaggcctgcaatctcagcactttgggaggcggagacggttgtatcgcttgagctcaggagttgaagaccagcctgggcaacatactgagactccgtcttgtataatttaattaaaattgaaaaaaagaagagaaaaagacctgtgtttaaaatttaaaaaaagggggggaaagtgtaatgcaaaatgtggactatgccagctatgattgggaaaactagtttttcatacagcattatctgtagacttgtattagcagcatactggtcataagcgttttgctttcctcaaatatgatgaggcaagctaatttaaagtgtgttggggctttctgccgcgtggctcctggaggtgttgagtcccaatttagccaattaatttaggtttagttttgacgtggataagggagaccagcttcattcatggtgtacacacagttttgcgaataaggaaaaaataaaaagccacctgaatgttcctactcattagatgctatctggagagctcctaccccaccctcaccaaggcccgggccattaaaaagactcaatgcagcctttctgtatctcatactgtattctgcaagatactcctctgaaagaaagttgtgctgcatcagccatctccctcctgaagatccctgcggatgaagatttctgttttgaaagttctgagaattcctgcaacaacaattctcaaacttatttgtccatgggatcttctcttccactgaatgtagttggggagacacagccttaagccttgagcagagaaagagacaagaaactgtcggctcacttacaaccaagt

SEQ ID NO: 1880215 - DNA, 4001 bp, Homo sapiens
ttgtcgtagaggctcaaagatgctgcaaatcaaatcccaaacgggagctgcaacagcgcagactggatcggaagtcgtttgctccggttcacttgcctgtaaatgcaggaaaagggggagggggcgatcagccagagcgcagatcctaatcgcggcgggggtggggtaggggacgtcgttccgagcccgccctgggcccattcctgtccgcttaacgtctccccgcccgcagagcctggcgctacgaggtggggaggaaggaagctccctccggattttaaggctgaaagaaaacactttggagcagccgcctgcgcgggctccgggcggggactgcaggaacgcggggcaccgggcggggaatgcggcacctcggcggcctcctgagccccgccagcgctgggcagcggccagccccagggagccctcccgacctagcccccgacgtggccccagacccccggccggggcacctccctgtacatcaaaggggatcaaagccggggagggacaagccaccagggcacaacttttcttcctctcccgcccctcctcccagttgttttgtttttggttactagcttctcttggcagcaaaatgttgatggtgggggggcaaatctgcaggaaaaagcctgctcggcacgggacacatccaggaaaacaatgtggtcagctgaagcaggaaacgggttagaggatagggtcggagccgggaaaaccggggggcggcgagcggaaggcagccgtcgcctccctcaagctagggacgatagtgactataaatgccacccccaatatttttttgacacccaagctcagagatcccagatatcccacccaatcccaggctggggatgggaggaggtcggtgaggtcgcagtcctgactcctcgcaccaggcggtgcccgagaagatccggccccggacgaggcccagggggctggagggacgcaagcgggagcgcggagcccggcgactagctccctcgcgtgccgcagcggcgaccctttctacttggtctttccttttcctccgagcgccgggaggaggaagctcccgctagcgtctcccacttcccgcggctggaggaaggggccacgctgagggaacaagacagggagcagaggcggcggggttcaggcgagcgggaagcgggaagcgagaggcgggtgtgagatggggtcctgaggctggaagggagcccggggacaactggagttgcacacgctcggaaggcgggaggcggcaaggagaaggctgccttagaggtgaggggaattggggcatgatcatgggccgcgatgttgcgtgaagcgcaaggatgtcaggaactgtgggggccgagatgtggtctagggatgggagtgggcgaagagaagtccatcggggcgggccggggggtgggactcggggagagccccggaagctgcgcggaacacccatcctcctgggtcctaggctgggacccgggctgtccgccagggctgggagacactggaggaggccggccgatgattacgcgcgatgccaacgacgactgccctacggtggaccgcggctgcccgtgtgcggaggaaagggagaggcggctgggtgccggctgcgctgcggtccgtgagccaggacggagtcccaggctgtacagtgatgggcggagagactcgcagtcctgagaagtattatgggctgtactgggagatttggagagggtggaggaggggcggtctgagggattccgggcggcaccgctaaggcgatgccgcgagcagcatccgcgccctctccttcccgccccagcccgggtttgttcagtcagggctccagcccggcggccgggaggaagaaaaggaagagggaaggagcctttacctggctctgacgcgacgggtcccaggcccccggctccgcttcccactcagagctctcctcccctctcttccccgccacccgtttctacgcagatctgtgccccagtccctggaggagcctccgccaactccgcaggaccccgccgggaagtagagcccacccctttaccaatcaccgcccgttttctatcgaccgatggggcccatagccaataggaagagctgatcccgagaggcccggaatgagggggaggagctggcaaaacttggaggtgtgactagcactgccgaggcgtggtcacagattaagctccaccccgggttgttgaacccctaagtagaactgatgggcgggattaaggtggaaccgacgaccaaacacaaactcttgagctgaggcacggccaattgggccggggtagagaggaggggtgttgcggggaattttaaccaataaagagtagagaccggtggagactgtagaccctcttccaataagaagcgggaagggcgtgccttgccactttcactagggctaaagcagggtttgccgaaacctcccgaagccggccaatgagatcggaggcggagccaagctcagccgaccagaaagccgaattgatctcagcaccgttactggggcggtgcctacggtcttcaagccactaagctctcgtgaggggaggccccggagccttccaatgagggactggggctaactctagttcttccaatcggtgcgcggcgctggcaattcaaactgataccgggttggagaggcaggaaaagcggaagagggagcgaaaaccaacgtgttcggtgacagaccccagcgccgactgagcctctaaagcgacttcagctctgccccaccaacaccaccgcgcgcccgggaacagccgctccgggaagaaacctgaggggactgcggggggcacgagggacagctgagggaagggaggacgcgagagaaacagcgcgagcacgctgagggccgggggttgccaggagaggggcccgcggacccgcagagcggaggaaggtccgggagaaaaggggcgggacggaggagaatccgggatcgcctggcagaaaaagagaagggagtttctgaatcctgggaagaggaggcgtgggtagggacgcttagcccgagatccgacagcagggaaccggagcgctccgggggaggggcttaatgctggggaagggatgtcttaaaagaggagaagctttaaattagacgatcggagaaggctgagggaattgctatgaaggggcgggagctgaagtgtagaggactcctttagacagcagaaagggaaagccgttgagaagttcccttcaaactccacctgcctcctctccaattcaaactccactcccttctccaaaagttaaaaggaaagccaagtttgccacgctcccctgttcctactcaataaatacttcttctactccgccaccgggaaaacagaaaaaaaaactaatttccttcccaatattaggacttagaaaagctctaggtcccgcaatttgaattttagcctaggggaatcaaaatagtaggagcattactcttgtttcctttttcaaaatcccacacctcatccttcctgcgacgccatgtccaccaacatttgtagtttcaaggacaggtgcgtgtccatcctgtgttgcaaattctgtaaacaagtgctcagctctaggggaatgaaggctgttttgctggctgatactgaaatagaccttttctctacagacatccctcctaccaagtaagtcatgctagtggcgggcaacggtagcttttaactaaatgggaacacttatggcttggatctgtgggagtcaacaaggaggttatcatttcggtgtttcagccactcccaccagtttgatgatccccttggaatatatctaagtgggcagactgtctggacaaagtctgtggtttagccaaggtggtcagtcctgatgtaatgcttctagttcaattgcagtcatgcgaccacacatctcttaagtttgatccctggttcagtgccctgcccaaccatcctatttcactgaatcaagtccgtggcgtagactttaggtaaattcaggcaaaattttctgtactgttg

SEQ ID NO: 1880216 - DNA, 4001 bp, Homo sapiens; identical to SEQ ID NO: 2112

SEQ ID NO: 1880217 - DNA, 4001 bp, Homo sapiens
tccattctagttccttcccttcctcctccatgcaggcctcaggtgaacctgttcagccttgcccctccaggagctcagggtctgaaaaggaggtctacagactgtagagccagagagtgggcctggggccctaaagtgcgaggctttggcctggttgagggggtagggccttttggggcactctggttttgttggctccgttcctgaggtgacacccggatcaccccacgtgttaaaccccgagcgcgggctgccctgtgctggatattgcctacatccagcagccctctgagggatggtttctggcctgcctccgttgccagggtcctcactggtgtgaccaaccatctggcttttaacactaaaaagccccacatcctgaggaatcccaggacacagaaagtcctgggttttgtcagtgatgcagaaggttgggtggaaagtatgaaacccacacagagggatgacagcaccatttgtagcatcggatggaaatggcgtggatgatctgcctcgagtggtcactgtcgccatgttgcctgacgtggatgctggcatcaggacttgtgattcaccatggatcacatcactcaggctgcaactccgcacgctgcagtcatgcatgttagcagcacttgcctaggagtctgctgcagattcagtgttgggctttttgtctagacggtgctggtttcagtcttgacatcatgaatattgtgactgtatttcctaagagttcagatgatgaaaatgagaacggtgacaatgacagcaccagcgtgacccaggcatcactgggaaagaaggttaaatgaccatgttactttaatgacagatgcaaggacacacacaactggattagggaggaaagaacccaaacagaatgtactgcgcggtgtgcagaaaagaatgtgagaaatggcatatggagaaggggaggtggaggcacattggacattgagtctctcaagtctgaggcatatctttctaaatcaaggtttttttgacctccaaagagacagcagttctcagtcaaaaacagtggtcgcagaattagcttgggcgcactccttgaatggacgccattatcatcttgttcccttgattgcaccgcaaaccaagaaggttacatttcctgattcggaggttacaaactaaaagtcctgtgtgtgaaccaaaggacgagggactttcagtaacagatgcattgcccctttacagtagtgctgaccctgtctgatccttccagcattcgtgcttccgagtgcgtcaagggctgcctgaagtcatggctacaggtttccgctagctcttaggtatgttgatttgaaaactggagtttcagatcgtcttctcgatttctgtgaagattttagtgaagccactgaagacgtaagagattgttgttctcttgtccaaatacaacctagactttgctcatttatctacatatttggcagacagtacacagttaatttgagcaaatttcatttagtccataagcttcttaccaatgaaaatgaaaacatcttacctgctaaatgttcacacctcgtacccgacactgtcacaaaggggtgtaatttgcttacctgtgataccagctttcataatgaaagttttgggtcacctttcggtttcctcaaaacatgccaaagcacttaatgagatctttgactttatagacaggagaatgcctcagacacgtttccacaagatgactatcattgctggccatagaaaagatgttaaaatgttggcttgccatgaaaactgctattttttaaagtgtgagacaagaaggatgtccttctctaatttggaaatgcattgagatgagaatggaaaaaggaattacaataaaatacaggccaggcacgttggcttacgcctgtaacccgagcactttgggaggccaaggtgggaggatcacttaaagccacaaattcaagaccaacctgggtaacaaagcaagacatcctcaccatctctgcaacaaaaaaataaaaataaaaaatacataggctgggcgcggtgactcacacctgtaatcccagcactttaggaggccgaggtgatcagatcacttggggtccgtcgggagttaaagaccagcctggcaaacatagtaaaacaccatatctactaaaaaatacaaacattagctaggtgtggtggtacatgtctgtagtcccagccactcgggaggctgaggcaggagaatcgcttgagcctgggaggtggaggttgcagtgagccgagatcacaccactgcactccagcctgggtgacagaatgagactccgtttcaaagaaaaaaaaaatacataaacacattaaaaataaaatagaaatgtatatactgttttgccagtactctctgatgctccttaaggagccccgaggagcctagatggggctagccagccacacttggattggagagggggccacaaaacctcatacagcaggaataatgacccatttaatgcttgagaactcaaaaaatgtcaccagaaaaggcagtcaagttaaacaggactttatcaatttcttcattaaaactataacatatttggaatccaacttggattttgcaacttcagattacctctgtgctttaaaatcattttttataacaattttaatttataacatccattgtgctttggagtgttaaaaaatgatggacatctggccgggcacggtggctcatgcctgtaatccgagcacgttgggaggccgaggtgagaggatcacttgaggtcaggagttccagcctgaccaacatggtgaaaccccgtctctactaaaaatacgaaaattagccaggcgtggtggctggtgcctgtaatcccagctactcaggaggctgaggcagaattgcttgaacccgggaggcggaggttgcagtgagctgagattgcaacgctgcgctccagcctgggtgacagagtgagactccatctcaaaaaaaaaaaaaaaaaaaaaaaaatcagccgggcatggtggtacacgcctatagtcccagctactcaggaggctgagtcaggagaatcgcttgaacctgggaggtggaggttgcagtgagcagagatcgtgccattgcactccagcctgggcagcagagtgagactctgtctcaaaaaaaaaaaaaaaaaaaaaaaaaactggacatcttagacagggatagcccatctgatgaattacagatgcaaaggcctgattgacaagcagctggtcctccaaagccagcccctggacaaaaatggatggacatctttggagagatggacgtgaattcctacaagtcccaaaacctgtgcttataagtaaaaccggaggtactttgtgtataagggttgtgtggagaggatatttagtttggtggtaccgtgttaggtgacactaggagtcagtgtaacatgggctttgaataaacagagtgacaagtcaaatggattttaagtttgactatattccgttttaccagtgcatttaaaagaaaggtgttctaagctgggtacagtggtgtatgcctgtagtcagctactcgggaggctgaagcgggaggattgtttgagcttaggaatttaaggctgcagtgagccatgatcatgccactgcactccagcctggatgacagagccagactccatctctttttttttttttcttttataaaaaggatgtcctaaaggctataaaggcttcaggcaattcagagaccagtgggaaagaaagcagagcagaatgttctaatgtatcctagggcagaaagaaacattgttattttttatttaaatattagtaatgtttgtttcattaatcctattatgtttgtttgtttgtctgtttagagatagggtgtctgtcacccagtctagagggcagtgtcacagtcatggctcactgcagcttcagcatctggggctgaagggattcctcccaccacagcttcctgagtagctgggactacaggcacgtgccaccacacccgg

SEQ ID NO: 1880218 - DNA, 4001 bp, Homo sapiens; identical to SEQ ID NO: 2120

SEQ ID NO: 1880219 - DNA, 4001 bp, Homo sapiens; identical to SEQ ID NO: 2131

SEQ ID NO: 1880220 - DNA, 4001 bp, Homo sapiens
gtttggtagtctgttttatctcatgtaagtatagctacgcctgctcttttctggtttccagtttcatggaatatctcccactccttcgttttcagtctatgtgtgtctgtataggtaaatgggtttcttgagggcagcatatagttaggtcttctctctttatccgtttagccactctatgccttttaattgaagaattgagagcatttacattcagtgatattattgataagcaaggacttattactgctgttttttgcttgttttctggttttgttttgtttttttttgaggcttctctcttccttttcttactgtcttcttttgtggttaagtgattttctttggtaatatgtcttaatttgatgctttttatttttagtgagtatatattaatagtttttgtgctgtaattaccatgagattcacaaaaaaaaatcttatagatagaataaggtattttaaagagatgacagcttattttatatcacaaacacaagaacaaaaacaaaggctaaaacacactcagaaattatacatttaactccatttctgttcctgcctttttgactatctctttaacatgttgctatagctattattgcttttgatatatttgtcttttgggcttcatagtaaagttataagtggattgtgtaccaccattatagtaatatagtcttctgggtttgtctatgaacttaattttacatcttgggttttatatcttgaaaagttttctttttgcacattagtgttttttttttttttttgtttttttttttttttttttttttacaaatattgtttattttaatgaagctggtacagacaatgtccatttaaaacccatatcccaggccaaaaagtacaaataaaatcaaaaagagcagtgttctgttgtattcatttctgcatgtatagctttattaattgctaatgaaaattagaacttttctgggatcttctgacaagatttttaaaaaatcttaaaatgccttttcttcaatgaagccatctttggagttagtcattactctctccttatcagttatcttgacttcaacccgatattcctcttcttttggtccagaccctcaaatttaagagtagcttgaagttaaggaaaggtcatttttccacagtttcagttctctgaaacacttccatctcccactgaaagtcacagtccaggagtgaagtaatcacatgctagaacatcagggccaattcgcaagttattatgaacgcttgcattggtcaatcttatttatcaccacaagcctgaaaatgcaatgtcctgaaaaaggtgggctctctgtgcacacgtaatttttaaaaaggagagggtaatatgaaggggactgaggcttgatcaccaaaaatcagcacaatgaaaataaacaataatgaataatgagcactagaattcagattaccagatgtttcaaagagatggggtgccagttttcaattccgtttttaacaccacattacaaaagaactatttttaaaaatgagaaaggattgagggaaaagaaaaaaaataaaaagaatatctaaactgttgaatgaccccccatttgttcctgataaacttcaatcacatcttcttcctccattcccagttcttttggagtatgattatcagcaattctctgaccctcaaagagaaacctgaatgaattcattggaacgccctgtctttgacagtatgattctttgagtttcttgagatgtgttgtcattttcactttgaagtgaatctcactgctatcctgtccaatgactttgagtttaatatattcaccttccttcttatcccccaagtcctcagttgaaggttttgcctcctggtcagacatgatgacagtggcttcacccgggggtctccgcacagcagcggcctcgggtaagcagaacctcactccggggtttacaaatccttctcccttccccacagcacaacaccgcagctgcagtaacttccgctaccacattagtgtttttttctttcagatcgaagaactacttttaacacttactgtaagatggatctggtggtggtaaattctcaccttttgtttgtatgggaaatactatccttcatatttggaaaataaaataatcttgctgggtacagtattcttagatgtcaggttttttctttgagcacttggaaaatgtcattcctctctctcttggcctgtatggtttgcattgaaacatctattgccagacaaattggagctcctttgtgtgttctttgcttcttttctgttgtgtattttaggatcctttctttgtccttgacttttgagagtttgacttttatatgccttagggtagtcttacttgggttggacctgtttggtgttctcaggccttcctgtacctggatatttcttcctcaagttttggaaaattttctgtaattatttctttgaataagctttctacgcttgctcttgcttagctccctcttgaaaaccaatcattctttttttttttttttgagacagaattttgctcttgttggccaggctggagtgcaatggtgcgatctcagctcaccatgacctccgcctcccgagttcaagtgattctcctccctcagcctcccgagtagctgggattataggcatgcaccaccacacccggctaattttgtatttttagtagagacagggtttctccatgttggttagggtggttgcaaactcctgaccttagatgatccgcccacctcagcctcccaaagtgctatgattacaggcatgagccaccacgccagccaattgttcttaaatttggtcttttgaggcaattttctgtatcttgtagtcttgtaggtagtctttgttccttttcattctttttattttttcctctgacttctttttttttcaagacagggtcttgctctgtcacccaggctggagtgcaatggtacaatctcagctcactgcaacctccacctcccgggttcaagtgattctcctgcctcagcctcccaagtagctggtattacaggcatccaccaccaggtctggctaattttggtatttttagtagaaacagggtttcactatgtcggccaggctggtctcgaactcctgaccttgtgatccacccacctcggcctcccaaagtgctgggattataggtgtgagccaccatgcccagcctgactgtgtatttttcaaacagccagtcttcgagctcactgatttttttcctccacttggtccagtctgctattcagagtctctaatgagctcttcatttcagcaaatgtgtttctgtttcaagatttctgtttgatttgttttcattgtttcaatctctttgttaaacttctctggtaaatttcttaattgtttttcagccatctcttggcgataacagggtttcctttaaactaccagttttaattcttggtcagagatcacaaattgctgtcattttagggtcagtcattgtatttttgctttgtccttgtggggaggttatggttccctgtttgctattgtttattttgggtatacacctatgtctttgtattgaaagattagttacttattccagttttctctgtttggcttgctttggtttttattggatatatttgcttagcaaatctgtactgctaggtcacttcctcctctttggctttaggtgacaccttaagtccgggttcaccttggctttagtaaatgaccagagcattgtctgtcctgaatggggaggtcccaaagggattatcccagctgtgtgtcaaggctggctagaggttcgtgtatgggcagacctgtggaatatacttcctgcaatgcagtgctgctgagcagccactctgatttggcatctcctttggccaagtaacagagcagagtttctggggctgggtgtgatagtcttgcctccccgctttctctctgcctgtcctcagggatatttcccctttcaggcagtcgtgatgcttcccatgggttaagtca

SEQ ID NO: 1880221 - DNA, 4001 bp, Homo sapiens; identical to SEQ ID NO: 2143

SEQ ID NO: 1880222 - DNA, 4001 bp, Homo sapiens; identical to SEQ ID NO: 2149

SEQ ID NO: 1880223 - DNA, 4001 bp, Homo sapiens; identical to SEQ ID NO: 2155

SEQ ID NO: 1880224 - DNA, 4001 bp, Homo sapiens
ttgcacaggaagcgttcatggaaataatattccttaaatgacagtttgcaactttaaaaacaacataattcatcaccatattaagttgctctgtagcacaaagtaattgtaagaacatgtttttcttaggacatgttttcttatagattgaaatctagaaaagtctttgcatgctttatgttttcatatttgtcatgccttttttttttttttttttgagacatggtcttgctatgttgcccaggatggaattgaacttttgagctcagcgatcttcctgcctcagcctctggagtagctgggactacagatgcctgccacggcaaccttccctccttccttcttgtttatgctattggatgtgatctagttgattttttttatctcttctctccaacacattttctgtcagaattgcagcatgggaaagaaaaagcataggtagggcacgtttcctactgctccttagagctgtttgagaacttcgaggaaaatctgaaagctcttcctcattttcgggagaacataaacttttttccatgtaaaatcatttctgggctggttttggtgaatttacacctcaagccaatgggagaaaagtagccagactaagcctctagacaagaaagtaatgattatgtatgttattttgtgtgtggtctcctggactacgcataatttatgttagccctgcctgtagagttagagcacaagcttgagtgaggactcaagaactaatgacagagagagcagcagaaggaacttttcttgcaagtccttaactactgcatattgttttatgcagaagacaacatagaatcaactatttgtagcattttaaggaatccatgtacaaaattttttttgacagggtctcattctgtcgcccaggctggagtgcagtagggtgatcacagctcactgcagcctcgacctccctgggctcaggtgatcctcccacctcatcctcccgagtagctgggactagaggcatgcatcatcaccccagcttatttttttttatttttattttgtagggacggggtttcatcatgttgactaggctggtttcgaactcctgagctcaaactttccgcctgcctcggcctcccaaagggctgggattacaggcatgagccaccgcgcccggcctcaaactcttaccagaccctttaatttcctctccgatactccgattctactcaaactgttcacctacacagaggaaactcagtgattcctgggggagcctatgctatatttgtgcatcctcatttgtggacaaaattctttcttgctgtgacttgaaagcagcctccctttacctttcacttattagtcctagttctgttctctgctgctaagaaaaagggtctgatccttctttcactgatcagccctccaaatattggagaagcacactgcgtttccatgggcctgcagtccttttccgggatcatcttccctagaacccctcaactgtctctcatttcacacggtttaaccatcttacctttaacccatatttcatttgtttgtctcaatgtccctcatgaaagttgacccagacgggtccgcagaacaacttttgctgagaaggcaaaggaaattctcgcccaaattgtggagaaggcagtcgaaccaattaaacctaaagctaaaactgtaatagaaaagaactttcaagctcgcaatgaaaaggctatgcatggatttatctcatcacagccactagccacacctccactcgtgcagtgcgcctgcgagccgagcagaaaccaatggcccatcgtagtgaatttctcgggtaaagtgacattctccgcttttgaatgctcccttcgcccagccgccaacccctcgccccaatttccattttaaatgaaagtctcccactttctagctgagacagacaaaaataaaactcgggcaaaaccaatcgcagagaggcagctcactgtcacttcctgggtcacttccagaagtcacttccggggtcgaggcgaggccaacgatacgcctgctgcagcaggaggagttacgagccgggccgcgcgctgcctaaatacctaaaccaggtttagcgcctgctcatataaagctctcctaactcgtcttccggtgggaatttcttcacgtgggccggagtcggagactgagtttagctttactgaggagctctaaatttaggcgggtaagtgccgcagatatcgcccgtggttcctgcgtttaaatggaacgggaaggggtgtgtcaggattcatccatgttctcctgatatttcctcctaatacctgaaacccttggggtctgaaaacgaaagaaggggatagagaagctttggttgccgtggcaactgcgggtcaccaatttgggtttttgaggatttggaaagggaggatttgtgtaactactcctgaaaacacgtgatgggtcggattcaaattcagttgttacttataattcatactcctagccacatgctttgaatttagaaggtttactctgggtataatgcagagatgcaaaatctgagccagggtaattgtttagaaagctgatgcggtaatctaggcactgtttgaaggggtcttgaactagagtagtgctgtaggattgaagaggggaaataggggaaatttggaggtagtatcaggggcactaatactcgatttcatatgggtaatgaggaaggggccctgagcatctttaggagtaagtctaaactcaccttggcttatgatgatttttctaggttcgtttctcaccttccgcacccctcctccacacgcacctcgaattctagtcatgccaagtagtttggtgttctatttcctagactatcgtcctcaccattttttgtgatgttaggcaggttccatcatttcactaagcccctcagttttttcaaccttcacatggaagaaagtaatagtacccacctcaggattgctgtggggattaaattagataatttatacttctagtgcatagtaagggcctaataaatattagctgctacttctattcttactgtacttttcatattgttttgttattatacgttttgctgtttcttcgtctagacttgagattttttaaattagaggggcagtatcttatttatctttacatggacttgaaacattagtggttcggtctttaatggatcattcattttggctgttgctgacatagttaaattcattttttactttaaaagagctgacaggtataatgcattttgctaatcaaattatatttattagataaaaagatagccgtttttctgtacaactcagaagactgtggattaagatgtacagaaagtaactgatatctcatcttgtaataggtatgagtgatttcagtgaagaattaaaagggcctgtgacagatgatgaagaagtggaaacatctgtgctcagtggtgcaggaatgcattttccttggcttcaaacatacgtagaaactgtgggtaagtaaaataataacattgagccattttaactttaaggaggtggtaagattcaatagggatacaaaatgaataaccagactggtttaattttcaagaggaatatgtggagggttttttggctaaaagccaaaagaaatcttttttcttttagaattctttgcccttggattaataatagatagtctgtattatgctagatacacattttttccagtaatacttactgagcacttttatctctggcattgattaaatattggggagtcataggtgaagatatggtctctgccattgaggaaaacatgcctaggaagtgttcaagaagttgctgttgaattgcattgaaattatttcgaatagaattgatcgtgtaatagattttttttttttttgagacagagtcttgctctgttgcccacgctggagtgcagtggctagatcttggctcactgcaacctctgtctcccaggttcaagtgattctactcagcctcccgagtaactgagattacaggtaccag

SEQ ID NO: 1880225 - DNA, 4001 bp, Homo sapiens
ttcaactgtttggctatgtgaagtttgttctttaatagattgcacaggaagcgttcatggaaataatattccttaaatgacagtttgcaactttaaaaacaacataattcatcaccatattaagttgctctgtagcacaaagtaattgtaagaacatgtttttcttaggacatgttttcttatagattgaaatctagaaaagtctttgcatgctttatgttttcatatttgtcatgccttttttttttttttttttgagacatggtcttgctatgttgcccaggatggaattgaacttttgagctcagcgatcttcctgcctcagcctctggagtagctgggactacagatgcctgccacggcaaccttccctccttccttcttgtttatgctattggatgtgatctagttgattttttttatctcttctctccaacacattttctgtcagaattgcagcatgggaaagaaaaagcataggtagggcacgtttcctactgctccttagagctgtttgagaacttcgaggaaaatctgaaagctcttcctcattttcgggagaacataaacttttttccatgtaaaatcatttctgggctggttttggtgaatttacacctcaagccaatgggagaaaagtagccagactaagcctctagacaagaaagtaatgattatgtatgttattttgtgtgtggtctcctggactacgcataatttatgttagccctgcctgtagagttagagcacaagcttgagtgaggactcaagaactaatgacagagagagcagcagaaggaacttttcttgcaagtccttaactactgcatattgttttatgcagaagacaacatagaatcaactatttgtagcattttaaggaatccatgtacaaaattttttttgacagggtctcattctgtcgcccaggctggagtgcagtagggtgatcacagctcactgcagcctcgacctccctgggctcaggtgatcctcccacctcatcctcccgagtagctgggactagaggcatgcatcatcaccccagcttatttttttttatttttattttgtagggacggggtttcatcatgttgactaggctggtttcgaactcctgagctcaaactttccgcctgcctcggcctcccaaagggctgggattacaggcatgagccaccgcgcccggcctcaaactcttaccagaccctttaatttcctctccgatactccgattctactcaaactgttcacctacacagaggaaactcagtgattcctgggggagcctatgctatatttgtgcatcctcatttgtggacaaaattctttcttgctgtgacttgaaagcagcctccctttacctttcacttattagtcctagttctgttctctgctgctaagaaaaagggtctgatccttctttcactgatcagccctccaaatattggagaagcacactgcgtttccatgggcctgcagtccttttccgggatcatcttccctagaacccctcaactgtctctcatttcacacggtttaaccatcttacctttaacccatatttcatttgtttgtctcaatgtccctcatgaaagttgacccagacgggtccgcagaacaacttttgctgagaaggcaaaggaaattctcgcccaaattgtggagaaggcagtcgaaccaattaaacctaaagctaaaactgtaatagaaaagaactttcaagctcgcaatgaaaaggctatgcatggatttatctcatcacagccactagccacacctccactcgtgcagtgcgcctgcgagccgagcagaaaccaatggcccatcgtagtgaatttctcgggtaaagtgacattctccgcttttgaatgctcccttcgcccagccgccaacccctcgccccaatttccattttaaatgaaagtctcccactttctagctgagacagacaaaaataaaactcgggcaaaaccaatcgcagagaggcagctcactgtcacttcctgggtcacttccagaagtcacttccggggtcgaggcgaggccaacgatacgcctgctgcagcaggaggagttacgagccgggccgcgcgctgcctaaatacctaaaccaggtttagcgcctgctcatataaagctctcctaactcgtcttccggtgggaatttcttcacgtgggccggagtcggagactgagtttagctttactgaggagctctaaatttaggcgggtaagtgccgcagatatcgcccgtggttcctgcgtttaaatggaacgggaaggggtgtgtcaggattcatccatgttctcctgatatttcctcctaatacctgaaacccttggggtctgaaaacgaaagaaggggatagagaagctttggttgccgtggcaactgcgggtcaccaatttgggtttttgaggatttggaaagggaggatttgtgtaactactcctgaaaacacgtgatgggtcggattcaaattcagttgttacttataattcatactcctagccacatgctttgaatttagaaggtttactctgggtataatgcagagatgcaaaatctgagccagggtaattgtttagaaagctgatgcggtaatctaggcactgtttgaaggggtcttgaactagagtagtgctgtaggattgaagaggggaaataggggaaatttggaggtagtatcaggggcactaatactcgatttcatatgggtaatgaggaaggggccctgagcatctttaggagtaagtctaaactcaccttggcttatgatgatttttctaggttcgtttctcaccttccgcacccctcctccacacgcacctcgaattctagtcatgccaagtagtttggtgttctatttcctagactatcgtcctcaccattttttgtgatgttaggcaggttccatcatttcactaagcccctcagttttttcaaccttcacatggaagaaagtaatagtacccacctcaggattgctgtggggattaaattagataatttatacttctagtgcatagtaagggcctaataaatattagctgctacttctattcttactgtacttttcatattgttttgttattatacgttttgctgtttcttcgtctagacttgagattttttaaattagaggggcagtatcttatttatctttacatggacttgaaacattagtggttcggtctttaatggatcattcattttggctgttgctgacatagttaaattcattttttactttaaaagagctgacaggtataatgcattttgctaatcaaattatatttattagataaaaagatagccgtttttctgtacaactcagaagactgtggattaagatgtacagaaagtaactgatatctcatcttgtaataggtatgagtgatttcagtgaagaattaaaagggcctgtgacagatgatgaagaagtggaaacatctgtgctcagtggtgcaggaatgcattttccttggcttcaaacatacgtagaaactgtgggtaagtaaaataataacattgagccattttaactttaaggaggtggtaagattcaatagggatacaaaatgaataaccagactggtttaattttcaagaggaatatgtggagggttttttggctaaaagccaaaagaaatcttttttcttttagaattctttgcccttggattaataatagatagtctgtattatgctagatacacattttttccagtaatacttactgagcacttttatctctggcattgattaaatattggggagtcataggtgaagatatggtctctgccattgaggaaaacatgcctaggaagtgttcaagaagttgctgttgaattgcattgaaattatttcgaatagaattgatcgtgtaatagattttttttttttttgagacagagtcttgctctgttgcccacgctggagtgcagtggctagatcttggctcactgcaacctctgtctcccaggttcaagtgatt

SEQ ID NO: 1880226 - DNA, 4001 bp, Homo sapiens; identical to SEQ ID NO: 2171

SEQ ID NO: 1880227 - DNA, 4001 bp, Homo sapiens
tgagtagatctccggggtaaggcctgagttggttcttcaaaaggacactcttaccaaagaaaggctaccaagtatatcagtcaagtaaacatttactgtttgccacattccaggtcccttacctgaaactgtgacctaaaagcaggaataattcacggcactgagctattttgaaacagaaccaagcttgcttattgcacaagtaactaaaataggacatcaaaatatttttcttgtttttatttttttgagacagtcttgctctgacacccaggttggagtgcagtggtatgattacagctcactacagcctcaccctcccaggctcaggagatccttccacttcagcctcccaaatagctgggaccacaggcatgagccaccatgctgggctaatatttttaattatttttgtaaagatggggtctccctatgttgcccaggctagtctcaaactcctgggctcaagtgatcctcccaccttggcctcccaaaagtgctgagattacaggcatgaggcactgcatgtggcccagaaaatatttctgaatggaacttgaaaaaatggatattttggtctatacttcaccagccccactgagcactccagagccagatgtgaagggaagagggtagccagggtatcccataactctctttctgtatcctgtcttttccccaccagggagtaggaaaacattctatcctgaaaacaagattatttcacctctaaacagtgacttttaattattttgatctcaacccacaatatgaaaaacacatcatattgtgtctgaatacaaactcaaaactgaaacaaaagtttcatcaattgagacttgaaatgtgtgatacattctgggtttttttttttttgtattctattttttttttaaatgttgatcacaattctctataaacggattttaaaacctattgacaggccacaaccagctgttcgaaaaaaagtactttgaaatatcacatgggggaggaaacgcagagatcatctagtccaatcccttcacttcacagggggtaaactgagtctcagaagatcaagtcacttgcccaaggccacgcagctagtaagttgctgtggttggatttgaccgtaataaccatcggctactgaatgcccatcatgtgtcagccatttgctgagttttttctttttttttctttttgagacagagtcttgctctgtcgccaggctggagtgcagtggcgcgatgtcggctcactgcaacctctgcctcccgggttcaagcgattctcctgcttcagcctcccgagtagctgggactacaggctcgcgccaccacgcctagctaatttttgtatttttagtagagacggggtttcatcatgttggctaggatggtctcgatcttttgacctcgtgatccgcccgcctcggcctcccaaagtgctgggattacaggcgtgagccaccgcgcccggcctgctgagttctttaattgcattatttcatttaatactcactgtgatcctatgaaacagatactattctttccaccttacagacggggaaacggagtctcagaataggggaaatgacttaaggtgtcacaatggccagtagcagacccaggagtagtctttaggtctggccgtgcacaaagccccatgctctcaagctgtaaccccgctatcaagaaagtggttatgcaagtgggcctgtgagctctcaacgtctaagccgtgcgcatgtgagacagcgataagctcgcgttctccagtctccagggccttatcattcctcacgctttccttcatcggctcgcaaagaaacgtggcgatcaaggaagacagcgaaggctccatcctcgtcgggggaggataattcgaatctcagcctgtgagtttactcagcacacctgtttaatctcttggtccttcagtttccacacctaggaagctggaacagcagcagcatccagcgccaggactggagtcatatacgaactctggcacctgggaggcgcgcgtcctacgtcagttccgctcgaccccaccccccccgcccccccgccttctccccacgcgcatgcgccgcgcagcggcgctttttacgacgcggcaggcgcggcgcgcttagttgccggagctgaacggcgcggagctggtctgaggcgagccgagccgagcgagcgcggcggtggggccgagaggacgcgcaggtggcggcgttgccatgtcgcacggtcacagccacggcgggggtggctgccgctgcgccgccgaacgggaggagccgcccgagcagcgcggcctggcctacggcctgtacctgcgcatcgacctggagcggctgcaatgccttaacgagagccgcgagggcagcggccgcggcgtcttcaagccgtgggaggagcggaccgaccgctccaaggtgggccgcctggggcttggggcgggcggggcagggtgcgtgtggggcctcgggccgtcggtctactcatttctgatgttaagaataacgacagcctggttgccaagcgcttttccgtgcctgtctcctgccagctctttgggaggcgagcagcgttgtctccccattttgcatatagggaaactgaggcctagagggaacggggacagttttgtcaagctacacagcctaacgctctattccagggctgtgtgggctagagaggatggtcgtgagggccgttggaccattggtgctaatggctgcctcatcatattacctggtgaagatgagcctagggagatgaaaggtggttcccatatagagcaaatgttctttacattgtggggtcgcaggcccctttgctatctgtttgaaagcagtggaccttcttctcagaaaaatgcacataaacacctgcctttcagttcacacttcagaaggctcttcgaccctggaaattcattcatgggctttttgttaagaaccttccagttgggtggcctgtggctgttatgacactggataagactggttagcttcaagttaataagtcttggaaaaccaagggagagtgactcttcccattgcaccccagttgtagagcagggtgggagatgcctgaaattgtaggctctcagcaaatatttgttgctttctcctcccccctccccatcccctccagtttgttgaaagtgatgcagatgaagagcttctgtttaatattccgtaagtatctccttggtgcctacctcaggctaaataggctgtacccagttgcctcagatggattcattcactggtgtcaagagcacacatttgcttctagaaatgggataaattactttggtgggtttgaggaggaaagcatcatagctttcttggtgcagactggaaacagatgtatttgtagaacaataactgagaaattgaggtagatttcttagaattgtagaatgctagaggtagacaggatcttagaaattatctagtacaagttgacagatgagtaaactgaagcccatacaggggaagggtcttgcccagggtcacacaactaaacaggtattcaaactcaggtttgacaaccttctcttttgcattctggcagatttacgggcaatgtcaagctcaaaggcatcattataatgggagaggatgatgactcacacccctctgagatgagactgtaagtggcaaaggcttaggccctcaaaggagctcctaattctctttttctggtaacattttattccagaatagtatcattttcttcttaccgggtttaatatttccccttttaaaatatcttggtcctgttctcattctgcattggaatacatatatttcttcctgaattaatgacttttttagattaagcatctttaggcccaacagcgtgtctcatatttcaaagtgcttactatgacatgattcattcagagagcattgtgtaaatgtcacttgttgatgactctgcagttttcttaataactagctgcagatctcatatgatctttatggattctaggggttagcttcaaca

SEQ ID NO: 1880228 - DNA, 4001 bp, Homo sapiens
caaaactggtatcaaggaaaggaacctgctggtgctgatttatacataatttttagaattattcagaagtgggttggaacaattattttattccagagtttttcaatgtgtgataatggaaaaaattctgtattcaagggagtttggaaaatgctgggttaaaagagtgaaaaggttttctcttctacaggagtttcagagcctttaacatgataatgttccagaatgaggaatctaagaggacaggagagtacccagtatctcccaaacttgtttgactccagaattcctgtttgtcagaacatattctgggaccattgtttctcagaagtacatagtaggtaagaacatagtggatcctgactgcaaaaatccagctctaccacttactgtggtctcgaacaaagtacttaacttctttgtacctcagtctcctcatctgccagatatggataataagacccactttataggttcatagtgaagattaaatgaccatacacaacacacatcaaattactaagtgtagtatatgttagctattattattttatttattcagtgctctactaataacctaggccccatacacaactgaagtataaattccaaaagtgatagaaagttctttgtgacttttctgaactcaggaacatctgaagtagagaacagtatagagatcttgggtttgggagtacattcaacagagtttccagtttaaatcatctgtctggtcagtatggctgcagagtcatgccgaaatgaaaatgttgactttgagtaactaaaggtaaaataaaagaaaaagggaaggtggaacagtggtaagagttattcttgtattcatctaatttagacttagttgaaattgaaaatgtcaagttatgagtagtgtagaacagtagacatcaaacacttaaaattccagcttcctggattaatgctatggaaagaatgaagttggttgataatgtttagcctagcaagaaggtgaagaagaaagccatacaagaagtggcttaggcagcaaattataaaggtgaccattcattcaaatcagtaaaacaaacaagtataccttattctttaggtaaaattgatggatctctgttttccagcagttcacaaacagaggggtacattgtaaacaacaaactaacaaaataaattctgggatggcaacctgctaaggtatcccagaaaataagaggtaggacatgaatttaaaagattggaaggtatgtcttcagtactggcctggccctgagtagactagtgctccctcccataggggtgcgtgtgcacacataatacaggagggaagccttcccttctagagcaagtgattcagcttgggaggctgtgactgagctacactaagtaaaaacgggagacttgattgtccttccttcaacagacctgtccaaaatgactggaaagtaaataccgtaaatcactgttgtcagggcgcacattccacctccttcctcccttacccacagcggtcctcatttccacactccctcaacggttcggggagagctcgtggtctaagtaacgagaggacttctgactgtaatcctagcacgtcactttgttgaaggcagacacgtggttcagagagaacttataaatctcccctccccggcaagatcgtgatgttatctgctggcagcagaaggttcgctccgagcggagctccagaagctcctgacaagagaaagacagattgagatagagatagaaagagaaagagagaaagagacagcagagcgagagcgcaagtgaaagaggcaggggagggggatggagaatattagcctgacggtctagggagtcatccaggaacaaactgaggggctgcccggctgcagacaggaggagacagagaggatctattttagggtggcaagtgcctacctaccctaagcgagcaattccacgttggggagaagccagcagaggttgggaaagggtgggagtccaagggagcccctgcgcaaccccctcaggaataaaactccccagccagggtgtcgcaagggctgccgttgtgatccgcagggggtgaacgcaaccgcgacggctgatcgtctgtggctgggttggcgtttggagcaagagaaggaggagcaggagaaggagggagctggaggctggaagcgtttgcaagcggcggcggcagcaacgtggagtaaccaagcgggtcagcgcgcgcccgccagggtgtaggccacggagcgcagctcccagagcaggatccgcgccgcctcagcagcctctgcggcccctgcggcacccgaccgagtaccgagcgccctgcgaagcgcaccctcctccccgcggtgcgctgggctcgcccccagcgcgcgcacacgcacacacacacacacacacacacacgcacgcacacacgtgtgcgcttctctgctccggagctgctgctgctcctgctctcagcgccgcagtggaaggcaggaccgaaccgctccttctttaaatatataaatttcagcccaggtcagcctcggcggcccccctcaccgcgctcccggcgcccctcccgtcagttcgccagctgccagccccgggaccttttcatctcttcccttttggccggaggagccgagttcagatccgccactccgcacccgagactgacacactgaactccacttcctcctcttaaatttatttctacttaatagccactcgtctctttttttccccatctcattgctccaagaatttttttcttcttactcgccaaagtcagggttccctctgcccgtcccgtattaatatttccacttttggaactactggccttttctttttaaaggaattcaagcaggatacgtttttctgttgggcattgactagattgtttgcaaaagtttcgcatcaaaaacaacaacaacaaaaaaccaaacaactctccttgatctatactttgagaattgttgatttcttttttttattctgacttttaaaaacaacttttttttccacttttttaaaaaatgcactactgtgtgctgagcgcttttctgatcctgcatctggtcacggtcgcgctcagcctgtctacctgcagcacactcgatatggaccagttcatgcgcaagaggatcgaggcgatccgcgggcagatcctgagcaagctgaagctcaccagtcccccagaagactatcctgagcccgaggaagtccccccggaggtgatttccatctacaacagcaccagggacttgctccaggagaaggcgagccggagggcggccgcctgcgagcgcgagaggagcgacgaagagtactacgccaaggaggtttacaaaatagacatgccgcccttcttcccctccgaaagtaagtacttattttgacttccatcccctgaggtttagctctgcccggagctctcaaaaccgcagcagctcccgggatcgcccttccctctcgcggttcccgttcgctcttttcccgttctcctgtccttcaccccaccacctccttttcagttgtatgcttgaggccatcaggctttaaaatgtttactttctactttattttctccatctttcccttccccctaacaattcggtgctttaaaaggcgttattctctttttctcttccctgaagttctttagtcggccaccagctaggagtcagccccactctgtcaaactagaggtgctcccaggggcagagttaaactgaggaatcttggtaggtttgttttctttgctccgattggcgtggagcgcgccgaactggtgcacgaagggttaaaaaaagtgtctcaaaactagcctctccggaaggcgccccctttccgtgctgacctatcagctggttccccaagccttctctattgtctctaactaccctaaaaatgtcagcatcgccgagacaaaacccggtttggagacccctcgagaaacctacctggccctcagtccttgatgtatcatttgctatcactaggtgtttcattac

SEQ ID NO: 1880229 - DNA, 4001 bp, Homo sapiens
aaccagattgagtcacaattactttttttattaatcctatttattaagagattggcaactcgtttgaggagtctggtcttgtaggtagcagccaaaaaaattggaggaaatagggtgggtttttttgtttgtggtgcagtggtaccagtgaaactgacaggcaagtagctgatcccaaacaaccaaccccagaaagcacgtggctcttgttatatctggctggctcagcaactatccaagttatggggctacaggggatactgtctagaccagttcttttggccctggcgttggcagaacatagaaccagaaagccaaagcatggtgcaaacatctctctgcattttttctggtcggcagtcaagctggatggaaactaaatctcaaacaattaccaaatagcaataaataagggaataaaaagacggcacagggatttcttctatccttgatggatatggcctgactcttgtgctttaaagcatgacttctgaagtgactgtccttaagggagaaagcacagagggcaatcggaaaggtggtatgacttttccagcttgagatagtcttattgcatcacaggtgttttctagactcgatgatggtactgataggaaaaagacatccacatatcatcgaaataatttatttaccactagagcaccacaaaaacagacatacatcgtgttaaaatacagcgtaattggtcatcaaaatacaaaacagctaatcttatattccattttttaaccatgccaacgatcaaattgtactgctgattaacacaaaaataattgctgcccacttgcatactagcacttcaccccttccttgccacctccacccccctcccatggcaatatttacttatgggaaataaagaccttacagaacccccaaattaaaaaaaaaaaaaacagattcaagagatcttaaaatagagcatttaaaatattatcagtgcattcatgaggaaagacaaaataatacaaaacaaaatgtcatcctatctgagaggaaaatgtctgcagaaataaaagtgatttacacataatagaaaagtggaagacaaaaaaataatcaacacacactcaaatctgggattgggttacatccaacacaagggctgtttactattatggcatcccatctcttgcttttccagttttcaaacttgcaaatccaattctttaattaatggtcaggaaattccaaaaaagaagtagaccatatcaaacaacttcactttggattcccgcctccttatgctgctctttaggtgaaactgcaaatattccattgctttgcctattaatttttattttaaagctaaataagcgacaagtgataaactgacatattctattaaccccagcatgaggatacctcttctgcaatgatgtggcaaattatttattaaagcaaggtaaactttagcctcagatatagataactctcactcagaggaaagaaagaattttttgatcataggaaaaattggcttgtgccttttccccttcaaagaacatttataaaaaccttataacttcagtgaaatacacaaaatgacttatgctgacctggacttttttccccttttgaaaaatcgactaaaatatatatctttcaatttccccctgaatattaaaaacctgactaaagaaaaagatgtttcctatgaagtgtcctctttgtaataacaataggattttacaaaaatattgattaaaccaaggtagagaaacttttcttaactcaataaagattctgagttttagttagaaccctaaatccttgctaaaatgaaaacattttacttcaattttctatgtatctataacattcctccttttcctaacataaaaatttgttaacgtctgacttggttagtaatgatgcttggaagatgaagaccactgaactcgaacccatcttttctgtgaaacaaaaaaaagaaaagacaagtggacccaggtagcttatgtcataataatgaaagaaacacaaagcacaagtagggcaaatgttattaaaaaaaaaatgcatttgtagtgcaagtcaaactataggggctttactcaaaagtactggccagctaaaagaaacatacatttgtgagtgatcattaaaaagagcccaaatttaagtcaatctaaatcatagttgacattattacagaatataaaaaatatggtaaaaatttacacattacacataaagtagttaatgttttgatttaatagtttgcaaaagagatctgcagatgtgttttcaattatgctggcttctatatccatctattttaataatataggtatggttacatataccaaaacaaaggaaaaaacctatagcatagctatacagcaatattttaaggtctgaagtttgaccagtacatgtcaaaacatttcaacatttcactggtttactaaactgacaaagaaccatttacaattaaaaagaaaaaaaaaaacttacagacttattctgactgaaagtttcttttattaacagtctttttagtttttggaccttacaagaagcttccttaggcagctgatacataacatgtgttttcagggtctttatcttaatgcagactttctcggtcatataataactcacttgggttttcatcccattaatatgacctctttttttctggctcgtttgagttcaagttccttaagccatccatgagtttctggcaaagtatttggtctccactttatacacctgttttattttccaagggcaatgaaacgttcattatatagtaacacacaataaataactcactgttaactctaagagtaagaatgggaagggtgcctattgcatagcaatacagaaaaatcaagtgaggcgcgggataggaacggtacgtacagcaactccacttaatgggattttcctgtttgttgttgttgttgttgttgtcgttgttcacataattaacactaataaattcttccagtgtttatttttttctttaaaaaaaatttgcttcttgtctctctcacttacaaagtaggtgaaatgtagaataaggccttcaactttttttgtgtcagatgccagttttaacaaacagaacacaaacttccaaagtgtctgaactagtaccgccttttcaaaaattttttaacactgatgaaccaaggctctcttatgttttcttgttacaagcatcatcgttgtcgtcgtcatcatcattatcatcatcattgtcattttggtcttgccacttttccaagaattttagctgcatttgcaagactttacaatcatattagaaagctgttcaatcttgggtgttttgccaatgtagtagagaatggttagaggttctaaatcttgggacacgcagcaaggagaagcagatgcttctggatttatggtattatataagctcaggacctgaaaggacacaggagaggagagacaacatagggaaagacggaaaatgaacgcaattcgtttttaaaaagaattccacattgttagcagtcacagcactgagtaggcaatttaaaattatttttggttgctaatttcctaaattacagtcaaactgatatgtgaccttagcaatcaccaaagtcattattttcccacacggaactcgttttccacacatcttaagcaaatgattctgtaagagtcagattggaaaaaattgctcattcaacagattttcccggtttttccagtaagtctttcctctgatcagtgcttggctgcacatacatcctaggtccccacaaaacttgatccttatagcatttggtcttatttctacactactctgtaaatgaagttgtttcttgagtatacatttcaatcccatctagattaagagctccctccagatcaggaactctacagactttgcttttatcttgtggccctagtaagtcttctctggacaaaatgagattcatgtactaagtgaagaaatgaatacatgaataagtagaagaataaaaagttttatc

SEQ ID NO: 1880230 - DNA, 4001 bp, Homo sapiens; identical to SEQ ID NO: 2200

SEQ ID NO: 1880231 - DNA, 4001 bp, Homo sapiens; identical to SEQ ID NO: 2204

SEQ ID NO: 1880232 - DNA, 4001 bp, Homo sapiens; identical to SEQ ID NO: 2220

SEQ ID NO: 1880233 - DNA, 4001 bp, Homo sapiens; identical to SEQ ID NO: 2223

SEQ ID NO: 1880234 - DNA, 4001 bp, Homo sapiens; identical to SEQ ID NO: 2232

SEQ ID NO: 1880235 - DNA, 4001 bp, Homo sapiens
atgtaggctagatcatggtgcctcttcagaagtttacagtggacagttagccaaaaaagcaggtgaagtgaacatctgcctaggtgactgagtttgcaggatgtattagtttcctcccgctgctgtgacaaattgacccaaacttcatggcttagaacaacacagtgaactatcttcttacagttctggaggtcagatgtccaaaacggatctgcaaatgccttcccaccttcaaatcataaggcagacccaaacttgcctttttgtggatgccaagagctccttctggatgctctggctgacactccattcctttccttttctagctcctagaggctgcccacattccttggctactgacccttgtccagcaactgtatcattctgatctctacttctatcaccacatctccctctctaactctgaccctcccgcttccctcttgtaggaacccttttgacaacattggacccaccaggaaaatcaaggataacctccccgtcccaacatctttaacttgatcccatctgcaaagtcccttttgccacgtaaagtaaccagttctggggatcaggttgtgaacatctttgggcagccattattctgcctatcacagaagggggttcctagcttagtgatttagagcaagggccctgcaaagaccccagattcaaatactttgtcacttgctagcagatccaggtacctaacttctctgagtcttaacagcctcatctgaaaaactagaataatagaatcttccttctagggctgttttgaaaaccaaagaacacaatgtatgcagtgcacgtgaaacacagggttcaataaatggtagggaagattcagagaaactaaccatgtagagggagagggctgtggaggagaggaggataaggagaggcatgcttcctttggtagcttcttcagttttgcctgggcctcagctttgcctgagaatttcgtcagtctctccccagatcagccagggtgagcctgcttaaatggaacactctgaagatgatatcctgtgataaacaagacctgcccagttgagtctgcagcagagtggggcgggtctgggatgaccctggcatggaaaagtacagcagctctttgtcttcagattaggagctgggacagctgttctgacatgatcaccccccgcccccaccccaggcctctccaaagtccatcttgcagagtcaaatgaaaaccagattcctggtcttatctgagagctacgtgactgtttcctgtcactcctttggagcctgggaaggtccccacatgcattgtctaaactttgggatgaatacgcacagctcttaaatgggagcatattattataggtacctgcctacacaaagggtcctccctattcactaaaatcatgggttattatttagggctttcattcatccaacaaatgtttattccgcatttgcaggtggccaggcaaggtgaacattctctcagggtggagagtatgtgcagacaggaggaattatgctatgggagggagagcagaagctctggagtggatcatcttgggtctagatcctgatacttcccagctgtgttttcactgggcaaaatgacctcacctccttaagcctcagccttctcttctataaagtgggcataacaaataaccgcctcctaggttatgaggattaaatgagatggttcaggggatgtgggtggtaaccccgcccctggttcatagcaaggatgtgaggaatagcagttgctgtcatagacatggagactgtttccccaaatgccttcccacccccaaatcataaggcagacccaaacttgcctttttgtggacgccaaggttctgtcgagctgttagggtgcaagttaagaagccagaatggcgggctgaggggagaaatgcccgcatgttacaactctgcaggtgtacacacgtggacaccatatgtacccatgaattccgcctttggaagtgaacttgattgcagcctattttcgtctggaggcggtggattcccggtaggaggcgccttcagtcctcggctcgatcctgtgacgccagccagctgcctatcggcttctcagtgtttgaacttcaaagggctggacgctcacccaagaaggggaccccggcctgacctctctcggaattcaaaaaaatctaaggctcagagagggaatgggagctggctcttccctctgtgtttagcatccacgttttttggcggtctggctgaaaccagcccaccctagttcgggcgccagagcaacgcagttccgagggcagatctccaaggggcggaggcagagccgcgggtgagaggcttccgcgccgacttcgggtttgcactccccggagccagaactccgtggcggctccgggcctccgtggatccgagcagagactggctgcccgcctgccactcgcaggctgggaaaacgccagccggtgcctcgccgggaaagttctcggcaaagctggggatgagccctcagcagggcaggctcccggtgcagcgcgcccccatccattgcccgcgcgcaagaacccggaatgggccccacctgggccgggactcgggcgtgcgatcccgagggcgccctggggaccacgcatcgggtggggaccctggccgagggcgtgagctgactcagtttttaaaaactcgcttcctccttccctacttgtgccggtcactcacctcgctgggaaccagcccagggcagaagggggagagggaggcggtggcctccccaggaaggaggagaggtgagtatcccgccaggtaaaggcggggcggctggcggagctgtgcctcggcgtctgcgcctggtgtgggaggaaagcgggtctcccagctccacttaaacccctaaaacctgggacttctagcttgagacattccccgaccaccacccgtcacacacacgcgcgtgcgcgcacacacgcatgcacaccgattctctgggccctagggaggaggggggatcagggctctattttctcccgaccccctcttatccaactcggctggcaagggttggggagaacttaggcccagcccccggcacacgctcagcgcgctccagcggcatacgctggggagtgggtgcccgcctcgctcagctgcgatccctcgcctcgggcccgggggtggtgccgagggccgggagggagggtcggccggtgggcggtgcttctccgggctggaggccgctcctggccggcaccgccctccgcctcccgcggtccctccctcccgcacgccggcgctcccaggccgcgcttcctgcgtccccaacccggtccctgagagggcagtgcgccctctccaccactgcgttccctcggctaagaatcccccgaaccccagccccgcgatcgcggcgcccaccgaggaggccgcccgggtggggcgcgggggtcgcgaagcccgcagtcccggaccgcccagccgagacggagccggacccgccgcctcccgggtgagtctcagccgccgcgccttgcgcccgctgcttcccgcggcgcgctgtcggttccccacagggccgtgtaagggggccgaggcccgtttgggtctcctgtccgtccgtctgtccgccgagcgcttcccgcctggggtcgaccaccgggaggactccgcaccccgcaccctctgcggccgcgccccgccggcgcgggacgctcccgcctcccgggcaccgcgcctggccagctggcctcggctggggaaggcagctggccttgggggccccctgttggcgggaacaggtgctatccgcccggcgggcttcgaacccttggcttcgccagaagcgctttcagcgcgtggttaggagcagaacttcccagtaggtcccaggaaaccaccttggcgctttgctcgcgcatcccttactgtatggaagtcggggccttttagggatttagattcgtgtgtgtgtatgtgtgtgtgtcgctctacaagcaaacacgggggtaaagaatcgggca

SEQ ID NO: 1880236 - DNA, 4001 bp, Homo sapiens
agtcagcctccacccacgccttctatgcccctccaccaaaacccctggagtcatggccactctaatgcaggaataggaggcagaagaggtgtctagaactttgccaagtttctttcccactgaggatcttgctgtagacagagaagcttcctctccactgtcccatccctacacatccctgcttggaaccctcctgcattccaagtgagaccagtgatttgccaactgatctgacccaaagagctggcagttccaggcaccctcttccttcactggtacttggtcagttcccaaactcctcactagcccacctcatccatctctgcagggcctgggtctgctattctgatatttaggtctgatcatggctgttttctatgccttctctcctgtctttctctcctccctgctgccctccatctcattgcttctggatgggactgattcccttcctttatctcaagggcactccaaaccttgcagtttggacccatgacatcctcttactttccatatggagtggagggtccccagcgtctgtccatccgtccgtccgggaaggagctgcccagctacctgctggctctgcaagtatttctctctgtctccctccctttacctgtgtctcaaaacctgtctgaccagagcaggtggggcccagcttaaaggggcaggccccgccctgctgaatctgccgacaaaaaaaagcatcagaggaggatgtcatcctttctgaaagttgggatgcagctgggcaaaggggtaagttcacattctaggcacctggaatgcgtaagaactcccagctcaggaaagcagagggagaaaagtggatttgtgcaacaaagggtgctcggagtaggctgggatacccagaaatggaatttgtacacttattcattcagtaaatacttactggacaccaattattagctaggcagacacagaagagaacaagatgacagttgaggtctctgcccttgagaagcttatgttctattggggtaacataatgaagaagcctagcaactaaatcaattagacaattttaataggaaagacctctttggtaaggtaatatttgagctgaaacctgatgggaaatcaggagtatgagtgttacagacagaggaacagcaagtgaaagaccaatggatgggaaagacttaggctgtttcaggaacagaaagaaggtgggtggctgcagccaggagcatagtggtagaagggcaatttatgttctcattacaattcatacacaggcaaaaacaacaacaacaaaacaaaccacccttgctttttaacttaggttttaagctaaaacaagacaaagcagtcacgctcctagctgtaagcccacctgccctgatttccaatgtgaggattaggagatagaaacgttagggactagcttctcatttctatgagtccttatccctaaaatcatttgagctttgggagggcagggatagtgtctagcttgctcacctctgtgtgtctagaatcttgcactgtggctggaagatggcagttcaataaatgttactggctcgtaagagatagatatgcaagctggaaatctttgggaggggagctgaagggccgagacgcttgtacaagtcatttcttccggggctttactcctatgtgatgctcggccctttccaaggaaactttcacatgcactttttgtttgtttaaattatgggggaaaagggaaagctggagtcactctaaccagtaatctgaaagaggcttggctcaaacggggaggcgggaaaggggcagaaggatggaccaaatgaccattgtaggacaaagcagtcacgctcctagctgtaagctcacctgccctgatccagttaagctttggccgcctcagtgggtacactgtccgttctctgatagctttgccaataaagtttttcgcaagggtttggagaagccggaaagacgccatgctgcccagagttagttctggcaacttcccgggagggaaaacgagtttcgcgagatttggtagcagcaggccactggtccgcaactgtgcggctgccatcgcgagatttggcaggcggaggaggagctgtcgcgggcagccgcctcacagcgatggcggccgagcagggccggtggcggcggcggctgcggctacggccggagacggcagtgttggcggtagtggtgggtggcaggggcctgtgaccgggagctgcccccggacccgggcaccatgagccaaggcccccccacaggggagagcagcgagcccgaagcaaaagtcctccacactaagcggctttaccggtgagaggggccagggcgtgagagcagccaccgagggaagtggggagacggcgaggggcggggcctcccgggcgggcggggcccgggtgtcggggtgaggtgcgggtgaggaaggagggtgcaattttggaggcggggcggggtcccgtagtaactcgggatggaactgaaaggaggaattgggtaggtgggaggtttggagggaagcacgtggaggaatcccctctgcagtgagctttcttggggcgggcactaagcttggtggagttggggtaatagggtgggaattgaaggctggaagggttgggtaggtgaaggtggggtcacaggtgtagaaaaacccggaagggaacggtgcttggaatcctgggggatttacaaggaagagtcttggactgaagtccgtggagctaggttcaggtccatcctttgccactctctcacggtgtgaccttgggcctcagtttccttatccttaaaaagaacgatttgaattggatgtgctctaaagtcccatacggctctaattttgaggagtccgaatgagaaagtcttggcctggaagggtcacgaacgacttttgtgtccagagcgttcttgggatttgggaggcaattccgggcacctggggactcctgagtcctgccttcctcccagcctcatgactgtagtctcttgccaggcaacttccgttcctggtttctgatttccataatgccacccacgctccacaagtcacatcttcagcccttcagccctctgttggcaacaggcccgaatgagctcttcccatcaaaggtggagaatttgttgggtaggtcaactggaacatgggctccgcaactgggtcaaaataggatgaagcgtggaaactgagttttgtgccttctactacagagtagagtttggggttttcatttagctcaggctttatagaacacggatatttgcatgagaagacgaccctcagagccttggccacattttggcggtgaaagagtcaagagcatgttgtctttttctctttgagtaggcatcctgccttctctggctttgtaagccagaggcagaggggagtataggctgctccaaaaatagaaaagtgattcaatctagcggccccagggctcccactatgggctgccccaagcagtccccaggcgggtgaggagttggctgggggtggcacgtgtgccttatcatgctgccgagtgtcagtgctgcctgtcagacagagcgtgggcagtgtctgcaatattccttgtctccagcttttggggatggctctggtcatccttccagttgtcatcaaatgtagttctttcttaaaccactacattcacaggactaacctaagctgatgtgtttgcctgtgtggcttacctgtgtgcacatgggtatctgcctgtaattgtgttgttggctttgagcagggtagaaatttgaggcagccaatcactgtttttataatttattatagcagtggtgatcagtggaaggaactaggaggaaagtctgatttctctgctcaagataaatgtgttgttagactatggacttgtcactctgagcttcagaaatttggggaactctcacacctagctgtttacggatatgaaattctgaaatattttaagtcagaagaaagggcagcaggagaaaggagcctggaagcaccaattaattaattaggc

SEQ ID NO: 1880237 - DNA, 4001 bp, Homo sapiens; identical to SEQ ID NO: 2255

SEQ ID NO: 1880238 - DNA, 4001 bp, Homo sapiens
tttttttggaccaaatactcattttcctctaaatttattgacctgtggaactttttatacaataaaatctttcaagtgaaagatcagggctaaaaagaaaaagatggatatcttaaagtgtacagcgaatgctcagaacaaaggatgatgggaaaatggtttcagtcactgattatttcattatccttagactcactcgcccttcatccctccccaaccccaatctacatgatctttaagatcaagaaaaaggtttaaatattttaaaataattaaaaagaaataaaaattcacatctaaaaaggaacactcaagtcaggaaatattttcccatcatgcttttctgtgaacaggtgtctgaaccaaaacactgccaaagcgacgactgcttcaagtttaatgaaaattgatccctatgacaatagacagtgacgactctaacaggcgcactgggttttttgttctacttaattttaaattcctgaaatgggggagaggggagggagtttaggaatttatttctattaaaatatagaagttattgcaaaaccctaactgtaaaaacacaccaacataatcggactttgcatacagtagctaagagaatccaaacatttcagtgaaacagtgaatttgcctggtagaacgctgacaaattcccatccacttgccctctggaaaataaaaacaaaattcaaaacaaatcatacagctagaattttgatagctgaaatatttttaaataagttgtccgtaggacaactggctcagctgtcccttataatatctccaggtttagctttttgcaaagatgttggtttgttaagacttgctgcctctctcacccaggcacgagggcaagcgaggctcagtttatccatctttcccaaaccacactgttccttttcacagaaccctgcctcttgagactggctaaaactcgtagtcttcatcagcgatttcaatggcccaggcaaacttttctcgctgggttttgttgtaaatcttctcaattgggacaccccacttcttgcaccaaggcacagtgatcctagcatccagataattgagtttggaggttcccaaggccatctgtttattttcctctcggtctgtggcttgaacttccagcttcatcaactgttcctccagtctctgaacagccttcttctttgactctactaccttcttcatctttgcatctttcatgaccttggcatcagccttagcacttttcaggtttctccgggcatctgctagctgttccttcttggcatcaatcttagtttgcaagttcatcatagacttctcaaaagtttttggtggtgccctctgatggttacaaagaattgcaacagctcgattggcacggttataagaaaggatcttcgctgggatgttctcatccggggctgtgagttcttctagctgctgctgtagcgtgatggaggcattgtatgtatggaataccttggctgtcaagctctccatgagatcctggagatgcttattcagaataccagtattgagtctatcaaaaagatcatccttgggctgctttttctccataaatagttgtaggttcttaaaaactcgagagaaactttaaataatgttttcagttcttggatttgatgtgagaacaacgtctgatcagtccaaatagaacagctgttgaatgaatgaacatgaccagaaagcatcatatgtacctaaatttttttattggtgtgaattgtgagttgagaaggccatacttggtgtacgtggactgaactttccacagatatgagcatattatatattaatatgaaggcattattcatacctatttctgtcagtaaacttacttatttacttattcctgtcagtaaacttccacgatgttctacttttcatgaagtttacttatttctgtcagtaaactttcatgatgtcccaatgtcaatcattcattcattcagtgagtaaataaataaatgaacattaagtgtctatcacattccaggcaccattgtaggtgctggagatccaatagtgaacaaaacaaagtccttgctgtcaaaaagcctgtattttaatgggggaaatgaatacattattaaaaaacctcaactaagtagatatgtaatatatcaggtggtaataatgggcactctgagaaatagaaaggagggtaaggggagaggcaatggtgagtcagggtgggttgctgtcacatatagtgttgtcagagaaggcttctctcttattaagtgacatttgaacagagtgagtcttttaggtgtctgatggaacattccaggctgacagaagagtagagcgtaaaggttctgagggggttatgtttggtatgtttgaggaacaggtaggaggctggaatgcctaaagcagcatggatgagatggagagcagtaggcagtgagggcatatcaatatttgggtgtgctgtgggccacagaggctgtagggagcctcctgggagtgaaaaggaagcaactggaggtttttgagtagaagggcaatgtgatgtggctcactcttgatgctgtgacaagcctagattgtagaacagagtggaaggagggagaccaggtaagaggtggcagcaagtgtcctgatgagagatgttggtggtctggtctgggatggtagcagtaggggcagtgagaagtgtctgaattctggatttatttggtaggtaggagctgacaatatttgccgatatgggatgtgagaaaaaaagaagagaaaaggattaatccaaggtttttgactgaacttggttttgaccaactggaatgagtagctatgaactgagatggggaaaagtttcagatcagcccatttacagggcagatggggggcggagggggtcaagagttcatttttagacatattaaatttgagacgcctattaaatatctaagtggagctatctagagggaggggaattaggagtctgaagttctggagaaagatttgagtcagagacacagtttgggagccctgagtatatgatgatatttaaagccacaggcctggatgaggccacctgggagtgggtgtaaataggaatgagaagaggcctgaggactaagtttggagctcactaaattttgggagtgaggaagaggcgataccagcaaatacagagaaagagcagcctgagaggtaggaagagagtgaagtcagaatagatttcctggactaagtgaagacaggattgccactggtagggggccaggctgtgtgttccactgaaaagacctggtgtccccagatgacttgtctaaggccacgtctgattggtggcagagttaggactaaaaatgtatccttctgattcctaatgcagagttatttccaacctgccatactgcttctctaggaatggcttttatactctgaatcctttttttgtaacagaatatactgtaagtttgccctagagcaagctacatttcataccttttaatgagctgttccttttcagtagcctccatcatcaatttttgggatggaggtatcttacagagtcctgtgggaaaaatcacaaacaacactaaagtcacatgtggcttttcctttatttaaattctccacccactcatttctagcctcccactgctctaacttcagagcacatgatagtcaaagctcagaatggaaatgcagcacagaaaataattttctggaggtaaaattccccgcccagttcacttaaccagggtactctactgccagaattgtgaggagagatgcctctatggcccagctgtcagcctgcgccacactcaccagacacctgcacctgtgccagttggcctgccctgtctctcttcatctgcttttgctgtataaataatataatttatattatattgtatgtataccctccacattgtacgtgtgtgtgtgtgtgtgtgtgtgtgcatgtttgtgttaaagctattagttggttagatgtaaacacttaaaatgaccccattttaggctgg

SEQ ID NO: 1880239 - DNA, 4001 bp, Homo sapiens
aggcagtgcccagcccaggcctgaacacagtggctgcgcctgaccccaaggctgggtggctgcccgcgagcccgtttacctgctgtggctgtccacaccctgtggacagcaagtatagatgctgctctagctgctggagacaccgctcatgaacagggtggacatgtcacacccagctgctcgagtgaagggaggaagccaggaccccattgcaaaggctgtacattcaaaatatcccaaatccagccatactgctgccctggtccgggcccatcatgccccactggccccccaatacccctcactggtgtccctgcgtccttctcctccgccccctgagtgtgagctcaaaccaaaccaacccctggcggctttcaaagcctccgggtggcccccaggctccttgggcctgggacctccttgcctagccctcaccccattcactccgttcctgccagcagggccacttggctacaccaaggcctggagaagactcagtgtcctctttgtagagtgtgctcgtccccggatgcccccacggccatctcactcacccacctaggtccctgctccaatgccccctcctcaagtcttccccagccatctcacctaaaacagcactcccaccagcctccctctcccgactcagcgtgagttctctccgcagagcttattgctactgatgtgttgagatctacgcatctgcctctgcccccaattcagcagcacaagcatggggactttgcagcattcagagccatttctccagcccccaggacggtgcccggcacacagcaggtgttcagtgaacctctgctgacaactgaaaccgtaccgctggtcgttgaggacaatgtctgcatcctgttcccgaaccactctggtgttggcccaaatgctcagctctgaaggcttgctccacatcacacagctggtcctccaccacgtacagcaagcagcagctgttctcatccaccacactctgcagcagtgccgggctcccgaagcccaccccaaagatgcccaggccaaggtggccagccaccccggctccaaagtcacgagagcatctcgggcctcctccggggagcaccctgtgggaggcttcagaaaaactctggctggtctgctctgagggcactgctggtatctttacttggaaagcaggaaacactgaaaggtggccggtggaggcagatggtgttgcatcctcccgggcagacaagtcgctggtggtggtgctgatggcaggagggttgacagggagcagagacgtgtggcccacagcgggaggaggtaccgtgccaatgctgggactgcctgagagaatgagctgaggctgaggctgacggggcaagggcgggtggcacgggtgtgcagtaaggctggtggcagcgagatccgaggcggctgagctggacaaaagacacattcacttaaacaaagtggcaggactcacagcacccagtccacaatcatctcagaggatcaacagtggggagttaccctacagaccagtatgtatctggcttgtgataaggcagcattcaggtggccacgcacactttaacaaaactgcgagacttcacagggtttactccctaagtaggcaagccactagcagatcccgtaaacgtagtgtcatcaggcggcctgtccacgtactttggaaacgtttgcagggcagagaatcctaaaatagcccgcagcccgctgggatgactcctgaaacaccagcgttggcactgacatttacatgagaatgggcgtccgcaggccgtgctgcctgcccgaggacaggtgttccaggatgcggtccctccgcacgcgcacgggcagctcgcaggccctgcagtaaagggtctccaccacagacgtgtccccagagtcactgtgctcaatcaggtgcttcaccaccaggtcggtgaactccgccgcgtagtcgtgtaaagccttctttttcccgcccattgtcgggtccgggatggaaacggaagcagcctcgacccccgaccgagggacccgtgggatctgcgctcaccgccctgcgagcagaggcgttcgtgtcggagcccccacacctggggagcggggagctgcggtccctggttgtcccacaggagaagggggagggaacggggcaggcggggaggatgagcgcttccgcgtgcagcgggggctggagtgggtccgtccgagctggagtggtctccgaggggcggcggatgctcggagggggcggatcccttagggctgggggccaggacgatcccacccggagaagcctcgcgggcgagaagagggtcccttcctgcgggggcagatggaggcgcgggagccttccccgggaggtgaccgaggccagtcagcggccccggggacccaaggccggggactctcggcggccggtggacgggcagggccggcccgcctgggcaggcggcggggtgaaggtgtccagggcctgaggcggcaaagtgccgccgccgtcagccccgactgccacccaccaggcacccggcccatccccggctcccatctagggatccacacccgggcgccgcggcgccgcggtttaaagcctgtgagatcccgcaacaacccggatccggaagcgcggggtcgcggctgggcgagggcaggggtggggccttcggtgcagacccagggccaagtcgagggaggctccgggcgcggggcggggtcttgggcgtgggggcggagcctgcgcggggcgtagagatctgacgggtcccagatgcacctgcacccaggtgctgactgccccaccttaggcggtttctctgggcccgttatctccaagtggagccgctctccccacaggatttccctgattggcaagagggttttattttcttattaagaaaataaaattgactttgcaatttacaattttttttttacagtaaccaaaaatcttaggcttgttagtgtttgactttccactcagtttttgttgttttgtttttggtttttggtttttggtttttttttgagaccgagtctccctctgtcacccaggttggagtgcagtggcgtgatctcggctcactgcaacctccgcctcccagattcaagcaattctcctgcctcagccccccaagtagctgggactacaggcgcgagttttatcaataaaggccctgaaggcccaggttgcttttccgtgagtacaagaacacaacacctgtgggaggtgtgggcccaggggagggatgccgagctcacacgacccctaggtagcaaatagacgcacgtgtgcctttcacactccaccctcacttcacactggcccacccactccttgttctgggaaatgaggacgcagcaggagatacctgtagctaacacacacacaccttgccccccgcgatggccagacttccagggctgcctcgcttcccagatacattttctggtgccacttgtagggtccagccctatggggcttagcgggtgttctccccgtgtgcagagatgagagattgtaataaataaaggcacaagacaaagagatagaaagcagctggccccagggacaactaccatcaagacgtggagactggtagtggccccaaacggctgggctcgctgatatttattgcatacaagacaagggggcagggtaaggagggtgaatcttctaagtgattgacaaggtgaagcaagtcatgtgattacaggatacattttaggtaggcaaggcagagagagaaggcagcatacgtcagcgttttcttctctgcacttataagaaagatcaaagactttaagactttcactattccttctaccgctatctactacgaacttcaaagaggaaccaggagtacgggaggggcatgaaagtggacaaggagcatgagcattgaagcaccacagggaggggttaggcctccggatgactgtgggcaggcctggatgatatccagccttccataagaagctggtggagcagagtgttccctgactcctccaag

SEQ ID NO: 1880240 - DNA, 4001 bp, Homo sapiens
atctcacctaaaacagcactcccaccagcctccctctcccgactcagcgtgagttctctccgcagagcttattgctactgatgtgttgagatctacgcatctgcctctgcccccaattcagcagcacaagcatggggactttgcagcattcagagccatttctccagcccccaggacggtgcccggcacacagcaggtgttcagtgaacctctgctgacaactgaaaccgtaccgctggtcgttgaggacaatgtctgcatcctgttcccgaaccactctggtgttggcccaaatgctcagctctgaaggcttgctccacatcacacagctggtcctccaccacgtacagcaagcagcagctgttctcatccaccacactctgcagcagtgccgggctcccgaagcccaccccaaagatgcccaggccaaggtggccagccaccccggctccaaagtcacgagagcatctcgggcctcctccggggagcaccctgtgggaggcttcagaaaaactctggctggtctgctctgagggcactgctggtatctttacttggaaagcaggaaacactgaaaggtggccggtggaggcagatggtgttgcatcctcccgggcagacaagtcgctggtggtggtgctgatggcaggagggttgacagggagcagagacgtgtggcccacagcgggaggaggtaccgtgccaatgctgggactgcctgagagaatgagctgaggctgaggctgacggggcaagggcgggtggcacgggtgtgcagtaaggctggtggcagcgagatccgaggcggctgagctggacaaaagacacattcacttaaacaaagtggcaggactcacagcacccagtccacaatcatctcagaggatcaacagtggggagttaccctacagaccagtatgtatctggcttgtgataaggcagcattcaggtggccacgcacactttaacaaaactgcgagacttcacagggtttactccctaagtaggcaagccactagcagatcccgtaaacgtagtgtcatcaggcggcctgtccacgtactttggaaacgtttgcagggcagagaatcctaaaatagcccgcagcccgctgggatgactcctgaaacaccagcgttggcactgacatttacatgagaatgggcgtccgcaggccgtgctgcctgcccgaggacaggtgttccaggatgcggtccctccgcacgcgcacgggcagctcgcaggccctgcagtaaagggtctccaccacagacgtgtccccagagtcactgtgctcaatcaggtgcttcaccaccaggtcggtgaactccgccgcgtagtcgtgtaaagccttctttttcccgcccattgtcgggtccgggatggaaacggaagcagcctcgacccccgaccgagggacccgtgggatctgcgctcaccgccctgcgagcagaggcgttcgtgtcggagcccccacacctggggagcggggagctgcggtccctggttgtcccacaggagaagggggagggaacggggcaggcggggaggatgagcgcttccgcgtgcagcgggggctggagtgggtccgtccgagctggagtggtctccgaggggcggcggatgctcggagggggcggatcccttagggctgggggccaggacgatcccacccggagaagcctcgcgggcgagaagagggtcccttcctgcgggggcagatggaggcgcgggagccttccccgggaggtgaccgaggccagtcagcggccccggggacccaaggccggggactctcggcggccggtggacgggcagggccggcccgcctgggcaggcggcggggtgaaggtgtccagggcctgaggcggcaaagtgccgccgccgtcagccccgactgccacccaccaggcacccggcccatccccggctcccatctagggatccacacccgggcgccgcggcgccgcggtttaaagcctgtgagatcccgcaacaacccggatccggaagcgcggggtcgcggctgggcgagggcaggggtggggccttcggtgcagacccagggccaagtcgagggaggctccgggcgcggggcggggtcttgggcgtgggggcggagcctgcgcggggcgtagagatctgacgggtcccagatgcacctgcacccaggtgctgactgccccaccttaggcggtttctctgggcccgttatctccaagtggagccgctctccccacaggatttccctgattggcaagagggttttattttcttattaagaaaataaaattgactttgcaatttacaattttttttttacagtaaccaaaaatcttaggcttgttagtgtttgactttccactcagtttttgttgttttgtttttggtttttggtttttggtttttttttgagaccgagtctccctctgtcacccaggttggagtgcagtggcgtgatctcggctcactgcaacctccgcctcccagattcaagcaattctcctgcctcagccccccaagtagctgggactacaggcgcgagttttatcaataaaggccctgaaggcccaggttgcttttccgtgagtacaagaacacaacacctgtgggaggtgtgggcccaggggagggatgccgagctcacacgacccctaggtagcaaatagacgcacgtgtgcctttcacactccaccctcacttcacactggcccacccactccttgttctgggaaatgaggacgcagcaggagatacctgtagctaacacacacacaccttgccccccgcgatggccagacttccagggctgcctcgcttcccagatacattttctggtgccacttgtagggtccagccctatggggcttagcgggtgttctccccgtgtgcagagatgagagattgtaataaataaaggcacaagacaaagagatagaaagcagctggccccagggacaactaccatcaagacgtggagactggtagtggccccaaacggctgggctcgctgatatttattgcatacaagacaagggggcagggtaaggagggtgaatcttctaagtgattgacaaggtgaagcaagtcatgtgattacaggatacattttaggtaggcaaggcagagagagaaggcagcatacgtcagcgttttcttctctgcacttataagaaagatcaaagactttaagactttcactattccttctaccgctatctactacgaacttcaaagaggaaccaggagtacgggaggggcatgaaagtggacaaggagcatgagcattgaagcaccacagggaggggttaggcctccggatgactgtgggcaggcctggatgatatccagccttccataagaagctggtggagcagagtgttccctgactcctccaaggaaaggagattccctttcatggtctgctaagtaacgggtgccttcccagacgctggcgttaccgcttgaccaaggaaccctaaagcggcccttatgcgggtgtgacagaaggctcacctcttgccttctattcacttctcacaatgtcccttcagcacctgaccctgcacccgctggttattactagattatgttagtaatgcaacaaagagtaatattaaaagctaatgattaataatgattgataattgttcatcatctctatatctaatttgtatcatgactatccttattctaactattttctttattatgctgaaacagtttgtgccttcagtctcttgcctcggcacctgggtaaccctccgcccacagccactggtctgcatttaagccaactccaaacataccttctagatctgggggaaatctagccattttcatatgaagtgacaagacgagaagctttgatttgtttgtatagattgaatgtcggtcccaagataagctttctatttaatattggcttcgctatcgatcaaattgtcaccatgagtttctgttaactgaaccagaaatttacttgagtgttttaatagacg

SEQ ID NO: 1880241 - DNA, 4001 bp, Homo sapiens; identical to SEQ ID NO: 2284

SEQ ID NO: 1880242 - DNA, 4001 bp, Homo sapiens
agtagctgggattacaggcacccgccaccacacctggctaatttttgtatttttactagagacagggtttcaccatgttggccaggctggtctcaaactcttgacctcaggtgatccacccgcctcggccttccaaagtgctgggattacaggcgtgagccaccgcacccagcccaaatatgattttaaatattacatgctccttttttcctattaactcagttcactgagaaacttgtttccaccaatactgggacatttctgttgttgttggtaagattcctatggtacttttcttctaaaaaacttttcaatctactctctcatttatctttgcagcaaacttcaaggttaaagatgaaggaaagtaggtgatgatgatgggataatatgagatggaaaagagaatttattttatttgagaatgggaaaattcagccctagacaagctgagtaattactcacggtcatagagtgaagtctggtggtgatacctttaccccctaagattctttcttagtttctattatactctgtcactgtagggatctctctgctgccctaggagcaatgcttcatatggcatctccatggcataaaggcaaatgcctgcattggccaagataaataaacccatatatggccagggtcagtgtgacctccatttcccattgtgaaatccgagctggttttgttggacagttgagagatgagaggttccctattaatacacatatccacatgccaagacttggacataaaagctaagaatgtggcatgggggaggaggtaggataagtgacagcattctgaacttagagtcccctctctttgtccaggtcctgggaaagataattaaattcctgggttggtgataggagataaatgagacctttacatgtattaaaaaaaaacttttaacatgttggagatgtctttaagaaagaaaatacatgccattatgagaatataccagcatgtggttatatgcaaaaatgtatgtgagtatatatgtctgtgttccatgaacccacaagtgtgtttggaatttcgtcatacattaacataaagatctatatgtgtagattaaacccatcctccatctctctaatactcacatcagcagccttcttctctgccagttccagcttctcctgggcatccttcaaagcttcagaatacttgtccagctcatcctctgtccctttcagcttcttctgcatggctgccagctcatcctccagctataggagcccagagagtcacacacaaaaacacacaaacacaacaatgcagggttggaccctgggctcttggagccctgagtgtaacctccatgttaccatccctagtgagacacactttctccccagccacttccagcccactgcctcaggagttatgccgtagcttggcctgtgaccctgtaatctctgatcctaagatgaccaagccatcctgggttttcatccaagacccctggatgataaatatctaaagtgtagatgcccgtgatgctatttgagtgaaaagagatgctctttccctctagaactcttaccttttcctctagaagtcaagggttcttccaaaacatggtccatttctacttaaattcagcagacatactgtggctcactgactttcccaaggtcacaaaggcagtctgagacagatatgttagatatcctctgctcctccagtgaggctggggagtccatcccacccccaaaaaggaggtgacaccagtagtcactgtctttcccatgaaaactcccttccatttcacagtcttgttcactagcagatgagagagatcaatgccagtgcctacctgtttacttctttcttctgcctgcttctgctcagcttcagcttgctctgcccgatccagagcattctccttgtctaacttcagcatctgcatctttttcttgatggcctccatcatgagcagtggctgttggtaggctcacctgtgaacactggagaactggagactggggcaagaaagaaggggctgctgcctgagtgaccaggaggtccccagacttgagtctttatctgtgctcatagctccaccttttgttcctaatatggtctttccagctccctccaccccatcattgttctcctgggggaacacagggtgagacgctttgatgaactgacatcaccagcaaaaaaaatatctagcaacagctgaggctgattttagacaatggaaagtgggggagggaagaggttctccctgaccctgaaactttccactcattctgggcagctctatggatgttttaaaagaagaggaagaggggagggaagaacattgaaatagagaagtgtactttggcaattctaggttggcagtttgcatccagggggtcctggttgcctttcagcttcccgtttcactctcccccagactgtgttgaatgctggtcaaactccgttagttgagttttagcttttgattcctggtattcaaggagcttgggcacagggaagaggggaggtcactcatgatccttaacaattctcccagatccccagatcaaattgctgtgctattctgggagtctccgattggcagggagacgtttttcctccccaccaagagccacaagagtagagtaagaggtagggttggaatctccaaccctatccttgaaggctatcccagagcttcaagtggggtggggagagaaacaggggagggtcagaacaatccagacaggatcataccctttgttttcccacagtaatcttaaaatagaactgttgtacccacacagactttggtctgtgtggctctctcctcttcttccctttatcttctcccttcttaattctccccaacgctgccactcaccacatcatcgtaatcatcattatcagctctattctttccagtttagttccagaccatgtttattcttccattgggagccttgttactaacaggtggcaaggataccagtccactggcaccatacacctgaaaatatgccaagggagaggtgggcactgttcaaggtgaccagatatattggacaaatataaatggctctagttagtcatttatgtcaggatactgagagttaatgctaagccccagcaatgggggaacggagacacccaccaggccagtgggtagagcagagctggagtccactattgagagcttccagtcactagaggtagataggcagatagaccatcagctgactctcgacagagagaggagaaaccaagtctcctttctctggagattagccagggaaaggggttagggaacagggagaggaaggagtggaaaatggggggggggtgggcaagtgaataagggggagaaaaatacgaggacaagaaaaggcaaagaaatgtcccttctagtataaggggacaagaaatagaaagattctatcctcaaattccaactctctcccattcccacaccagccctcttaggttaagattgaaatgcacataggttgcagctactggacttttgggggggtcctggagagaagaggttcagtaaaagagacaggagccccagagattgaagtatgaaagagggtggtgctgaatcacctgctgctgtaagaatatgtttgacatttagttggttcctaattaaacaacccaatatcaaacatatcacacagaagcaggcaggagagctttgggggtcatctgccttccttccagttgcaaagaaagaatagagcagacaccaggcaccaatcatgtctaggtggagagccatctccttgaggaagggtactggctcctgctcttcacctcccaagacagccagctcttgcttattgtcctacgtgtcatccctgcctcagctcctcctctacaagctcctggcctttgctggatcacgttggcctaaaccaggaagaatacctggcagggctccacatccgggcaactatcgttccctagagctcccacacagagcttctcaccctgatgtcacggcccca

SEQ ID NO: 1880243 - DNA, 4001 bp, Homo sapiens; identical to SEQ ID NO: 2290

SEQ ID NO: 1880244 - DNA, 4001 bp, Homo sapiens; identical to SEQ ID NO: 2296

SEQ ID NO: 1880245 - DNA, 4001 bp, Homo sapiens; identical to SEQ ID NO: 2301

SEQ ID NO: 1880246 - DNA, 4001 bp, Homo sapiens; identical to SEQ ID NO: 2302

SEQ ID NO: 1880247 - DNA, 4001 bp, Homo sapiens; identical to SEQ ID NO: 2311

SEQ ID NO: 1880248 - DNA, 4001 bp, Homo sapiens; identical to SEQ ID NO: 2313

SEQ ID NO: 1880249 - DNA, 4001 bp, Homo sapiens; identical to SEQ ID NO: 2316

SEQ ID NO: 1880250 - DNA, 4001 bp, Homo sapiens; identical to SEQ ID NO: 2319

SEQ ID NO: 1880251 - DNA, 4001 bp, Homo sapiens
tccaggcagcctgcttagattttaagcagctaccaccaagcccaaactgcctggctcccctgggatctggtacaagtcctgttcccaccgtggttgcttctgcaggctgtccccttctgcttcctcttctgacgtcctggaggtcatagttgctccaggggagctacagtccttccttacttctgtcccctcctttgtgaagggacagctctaatggcagccacatgctctgatgagtcatggttaagagcagcatctggggccaggagatggtgactggttaactcttcatgggccagtggctttctgtgccagaagatcaggtcaggtggagacaccgcctcagggctcggtgcacagtggacatttggggagcgttgtgggtgacccccacacaggcactgggaatgcaggggagagggggccaagggggaaaggggccagagtgttggctttggattcaggagggatggattccagtcctagcttgccacttattaggtgagtgaccatgcgtgaatcaaatgaaccccatgcctcagtttccccatctgtaaaatagcaattatggggatcatttgagaaggcagtgtgaactgccagctagcagtgagtgctaaaccgtgttttccccgccttctggtctcctgcagtcactcagtgggcgagatggtgggattaaaatccaggcctgactctgggggctgtctttgtctgcacgaatgcccccattaatgcgggaggatggtgacggctcaggtgggggccgcttcggggcggaagctgtggggaggagaagtgacagtaaagtggacctcaggtcccggagaagaacttctagcgccaaataggtggggacgtgtgaggagggagcgagctcccggcccgggcggtgtctgcgcagagggcgccgggctctcacctgtcggagcgggggtgggggccgcccagaacccccggcggtgcgggagcgcgggtcgccgcgggcggccatggccctacggtgcgggtggggagaccgaggctcggcccggccccgccgccttccccgcccccggcgcgcccctccccggccgccgcgtccgcgaccgcacagcgcccggctcggggttgcggcggcagcacctgggccgcgattggcgtccggctggggcagcgccgcccgcgcccctcggcgatgacctcggctggcggcgccccaggagccctgcccgcggggtaagtgcgcggctgggaggcccgggggcgcgggcggcgcgggctggggcccgggcaggtggcgggcgccgcgccaggcctccccccgcgcaccggcctggggccgcactgcggcttccagcccccaccccgcccggcccctggcagccgccgccgctgccaggagtgggggcagggggctgtgaggaggcggaggcgcggggaccccgggtcggtcactcaccttctgggtcccaactttctcacggagctgtagtcacagacacgttcagagcagccttccccacctgcctcgtggcgttcactcctgtggggtgggccctgttactctcatccccattacagatgaggaaactgagacacagcacttaagtgacttgtcatcggtcacccaggaggtaagagttgcgggtgggatttgaactcagttctgtctgttgtcagatccccccaccccatcatcttcagggacattaggggaacttaaacagctaaggtatgggccagccgggcccattgggtgcagcaggaacctgggtagtaaaaagtgggtgttgtcaccttcaacgtggctctcctgcccaaccctacccacatcccactgagaaacccctataggacccctacctagatcaccccccgtagcagtgacagccgctactgccgggagaccttcagcaactctctgcttttcctgggccccagtgggcagggcagggggcagctgctaggagccctgactgctgggaggttgctgggcagagagccggcccaggtgagctgggaggagggctcaccctgcctggagcctcaccaccagtgacaatatttgctaagggcccgaggcttgacacatgaacagggaggtgacgaggctggtgccagctggcagctggaagtctccacagggcttgcgtgtgtgtggctctatcagggcttggaagctgggttgctgggggacaccctggcctgggagagggttgcctggtgagtttcagcttcatcatttttgttgtgtgactttggccaagtccttaacccttcctagacttctggtccctcctttggaaaacacagaagtggggctggctgttcctttcctgttctgggctcaagtatttgtaaagctggaggttgggtaggttccttctgtgcagccctgactgagcaccaccaccctgctgggtccagaaaagtggtttccaggagagaaggcgggcatggagcaaggtatctatcaaagaagtctagactccctggctgaaaaccacattcatcccacttccttatatgcttacatccctgcctaagtgccctctacaaccccgggcacctctggccctgctgcaggcctcaggacagcaagcttgctcttctcacgctggtgggtcttccttatgcagaaccgtacctgcctctctgcatgcctgcccactcttctttgaagccacctgtccatctgtccccaaccctggctagtgtcatcctggtggggtctgagcagaggagggccgcacgcagcaggaccattctcaccttcactacagagacactcactcaacagacactcagcaaggcctgctctgggcccagatggtcattggtgaacaaatcaagccttaaatctctacctttttaaaaattatgaaatattttaagccttcagaaaaatatagcaaatagtaaaatgaactcacaaacccttgccacccaactttgtcagatattaacattgtgccccatttattttatattctttttaagaaataaaccatagtagagacccttgaaagtcttgtggaaacctcttccctccttccctctccagaattacttgccatcctgaatttaggttttatcatttctctgtttttattcttttactcagtgtgtgtaagtcttaaaaatatgtagtttgttcttcaaagttttctgtgaatggagtcctatagcatgtgtcatgctgcagctcgcgttttcacactcaacttcaggtctcagatttagccttgatcctgtagctcttgtcccacttgccctgatgtgtgatataccaccctatgtagacacctccatttgtttatccttcttgatggatgtcgaagtgttcccagtgtcttgctattcagacagtgaatattcttgtatgatggtgtttgcacatgtgtttcacgagggtgcccccttagtagtggaattgctgggttgttggatatgtgcactcgatcttaaataaaataaaataaaataaaatagagacaggatctcactttgttgcccagactggtctcaaactactgggttcaagcgatcctccttccttggcctcctgaagtgctgggattacaggagtaagccactgcgcctggcccactcaatcttttaaagttatttagtttcattataaagtcagtgctacttgatcaagaaatgatggtaaagccgcacgcagttgctcacgcctataatcccagcactttgggaggcccaggcaggtggatgacttgagatcaggagtttgagatcagcctggccaacatggtgaaaccctgtctctactaaaaatacaaaaattagcctggcatggtggtgcacacctgtaatcccagctactcgggaggctgaggcaggagaatctcttgaacccgggaggcggaggttgcagtgaacccaggtagtgccattgcactccagcctgggcgacagagagagcctctctcaaaaaaaaaaaaaaaaatggcaatacataattttagaaaaaaataataattactcacattttc

SEQ ID NO: 1880252 - DNA, 4001 bp, Homo sapiens; identical to SEQ ID NO: 2341

SEQ ID NO: 1880253 - DNA, 4001 bp, Homo sapiens
gccttgggcaagtttcttaactctcaaagcctccgttcctcatctgcaaaatgggcatcataactacctcagacactcaacaaataatttgctctgttcaagttactgtgttaggtgtaggtaataccttggaatcaggtattttgtatttttattccttgttagatattaagctttgtgtggttgttccagttaccattgttgtgtaataaatcactccaaaatttagtgggcatgaagaaatcattttattatgctcacaattgtgtgagtaaggaattcaaacaaggcacactgggaaaggcttgtccctgttctatgatgactggggccttggctaagctggttacctctccatgtgatctttccgcatgggctcctatgggtttcctcacagtagctttatgggaggctggattccaagagtgcgtgccataagagaacaaggtggaaatgcatggcatttttgtcacctagccttacaaggcacatagcatcacttccacagtaccctgtaggggcagattcaagggaatggaatattaggacccccaccctcacccccaatgggaggtatgttgaggtcacattgtaagaagggcatatctgccacagtgaaccaggactatttctgtcttgttcatgctcaggaatatttgttgaaagaggaaatgaatgataaacatgataattgtgattcctgtcctttttcagcttgcagtctggtaagataccaagacaagtaagcagacagttacatggcagcatgatatgtgctttaagcagagaaataccaggtagctgcaggagcacatagaagggcagcttagggcagtggggctgggttgggaggattcaatcaaaaaacaaaaggcacttaatattgtgtcggacacttagaaaatatttaataaacattaaccagtattatttcccccatggaaataataataataatccctaaaaggaattaatactatttcaaacttttgttttatgtatctcttgggtatggattcttgggaagtagattataccccacttaccctaccttccaaaaaagtgctacctgaggcaatggttgctgaaagtcttaatgagatggatttcttcccagatgtttccggacgatggcctggtggtttacagagaggagagactgaatgatctctactgttttcattaagaagaagcagcacagtgatgtggacttagcactaaatagaaattagaaggcccaggctgggcacggtggctcatgcctgttatcccagcactttgggaggctgaggcaggtcaatcacctgaggtcaggagttcaagaccagcctggccaacatggcgaaaccccatctctactaaaaaaaatacaaaaattagccaggcgtggtggcacacgcctgtaatcctagctactcgggaggctgaggcaggagaattgcttgaacctgggaggcggaggttgcagtgagccaagatagtgccactgcactccagcctgggcaacagagtgatactctgtctcaaaaaaaataaataaataaattaggaggcctggattgtaatcctgatcaggccatttagttctggtcctacgtgacaaccaattaatcaatgagaaagttgtactagaagtacttcctaagatctcttccagctctaacgttctatagagttccaaaataattacattgttctccatggactaaaaatttggagtacatcacccatggggagaagtagtgaccaatatttactgtacatttactatcctccaggtgctgttgtgtgcatttttcatgtattgactaagcctcataataaccctatgagatggacaatgtttttatcattattcccacttaacagatgaaaaaacctcaaatgaggcaaaggagtccagtggactagctggaatacaaatcccagagccagtgcccttaaccagcataccattccagtctctcagtgcagaaactcctctaaagtttaaaggagaaactagaaagctgtcattgggagtggttcttgtgctcttctgcctgaaacaaaaatggataactttgtcaagtctctggaataaaaatttggcactaacacatatgaagtgtgtttacctcccacacagtgttctactcacattcacaacagcctatgggatacatgtttttgttagccatagtttgcatttatgaaaatggtaagtggctgaacaagaattctaatgcaggtctgtttgactgagacaatcagtatttagccactatgttctatgtctcaggtacagtgttccctgtttcagaggcttggctgccagctctgatgcttgaccttttgttatttaggtttcatcagctaggagggggtggataatacttttcagatgtctttagcttacattcattaaaacaatttttggatgaagggattgaaaattctgattgaatgctgtgtttagaaatggttgcttttcttttttaaaaaattaatgttatagggtaagagttgctgatgtgggagactttactttgcagataactggcataaattaagtggctatacaggtgacactttaggaaattggactgccttcagatgttccatgttggcacaggtgggagtgttagtggtgctggggaatggatgtttttagtaacaaggtaaacattgtaccttttaaacatctttttgagagggaaacaaaaggcccaagttttccagatctgaagttggtgttcccattctgctttggtgaagctgcattcgtttgttcatttaatgtttgctagagagacagtaaagtgtagtgaatggttgttaactacagaccctggaacccaaccacctagattctagtcccagctctgccacttagtggcaacataaccttgggcaagctgtttcagttcagcttccttatttataaagggataattagagtttctacctcataaagttgttgtgaagattaaataagttaacacatataaaagcatttaagtacctggcacataataaatttcatgtgttagtcattaatattgttactataatataattattacataaaataagcacttaggctgggtgcagtggctcacgcctataatcctagcagtttgggaggccaaggcgggcagattgcttgaggccaggagttcaaaaccagcatgggcaacatagcaagatcctatctctaccaaaaaaaaaaaaatgcaattgcttaataagtggtggtggtgattattactattataaaaaattccaatgtaaattttaatatgaattctcaaggaaattttgtacatgcagtagactattttgttgttgttgttgagacagtcttgctctgttgcctaggctggagtgcagtgacgcaatctcagctcactgcaaccttcccctcctgggttcaagcgattctcttgcctcagcctcccaagtagttgggattacaggcacctgccaccatgcctggctaatttttgtagagtagagacggggtttcactgtgttgatcaggctggtctcaaactcctgaccttgtgatccacccgcctcagcctcccaaaggcttgagccaccacgcccagccacagtggactattttcacgttatacctctagacttactctagggatattgcagcagaacagcttgggaagtactggggtattagaaaagaatgctaattaggagtcaggagacttaaattttggttgtggtctaccttggagtgttggataacttcttttctaggcctcagtaaaataagagggttagactaaatctctagtgttgtgactctttaaatttattaaagttaaataaaagtaaaagttgagctcagctggattgtctacatttcaattgttctgtagccacatgtggctagtgactaccatattgaacagctcattgcagtaagttctactttacagtgctgttctaggtctctattagtaataaccttacgtgattgtaaggtttgacacctagct

SEQ ID NO: 1880254 - DNA, 4001 bp, Homo sapiens
aaaacatagcataggtgagagataagcagagttgcaatttgtcaaacatggtttggagaagaatagttaagtggcttgttagagaaccattgcaaaaatcaaggcgagacagagttatggaaatggggcaagagagagtttgtgggcaagaatgccattgctctgaaggtgatggaagtgatttaaaaatgaacaggccctgctaacttgagagatcagcaaataaatgatcagtcaataatggacctaaagaatgagcctaacaatgtgctgtcttccatgctcttaagccaatactacgaataaaatcagtacacagccaacttttacagtgcatgggccaggcacaaagccaaatatttcaaaaaaaattatcctattttctccacacaaaatccctataaagcagatactttttattatcctcagttcatagaacaggaaggggcagagttgagatagctttcctaaggtcacatagcccgtggtttttaatctaagcagtatcactcccaagcagccttatcctcaggggatatgtcccaagaccccctagtggatgcctgaaacctcagatcaatttctttttccttcttcacttcacaatttcactgacaagattcattctttccgtagatcttagcaacctcagcatatgctgttttttctttccttaagtctttccttaagaactttcaccttttcacttcaaaaaagcactttaaaacttactgttggcagatccaaatcgccagcatcattactcccgtactttggggccattattaagtaaaataagagttacttgaacacaagcactgtgataccaccacagtcgatctgataacccagaaggctaccaagcagctaaagggcagcaagaatatatagtggaatattctggacaaagggatgattcaccttccattctggaaggagctggttggctcaagattttatcacgctactcagaacagcatgcaatttaaaacttactaattgtttatttctggaattttcatttaatattttcagactgctgttgactggggtaactgaacctgcaaataaggaggtatggcttgtacagctgcttcttgatttatgatggggttacatcccaataaatccgtcataagtggaaaatgtaagtcaaaatgcatttactacccctgtaaacccatcataaagttaaaaaaaaaagtctaaccatcctaaattatatacgatcgtacttttctctgcgtaaaactactagagttgtaataatggaggggctcactaggaggcagtaaactccttaacactggtgatgttcaagcatgcagtaacaatgatttgccagagctgttgatgagcggattccggcattcaataccttagcaagctacaaagtctttagattcccttagtattcatataataaaatcaaattttctaaactttgccacacaagatagttcccaggtcagcagtttcaacatcatttgggcacttgttagaaatgcacagtatcaggccctaccctacacttaaagaatcgggatctgtattttaaaagatgctcagctgattaatagccacgttaaacttttagaagcactgatctaatcccctaaatttcacatataaagaaacagagaccacccctcagaggagcaaacacagacatgctggatccggtcgtcactggatgggaacagggctcctgaagtttcgcactagaaggcaggcgatggacaggcgcaaaggggcctcacccggtcaaggagtaggatgcggccagcgcaggagctggtggtgaaaaactgatctcgcatgttcagaaactgcacaagctctaccacatcctcgtcaacactgcccttccggctgaggtccgctttgctcaaacattgcgccttccatttcctgaactccgcgctgcgatccatgggtgacggactcagggtctgcgctcggctccttcatggtagcctcgtctctccctgggggcagccatattgaagcgagcggtggccgaaaaggtccaaacttcctcttcgttcttaatttgggaaattctagtgccttcgcctaggggtggagagaggcgcacatcctgggtggagcgaggcgcacatcctgggtggagcctgcaaaagttggagaaggtgtggcagtcctcatttctgtggaatctgaagaagcccacgcagattttaattcccactctagattctggtaagtggttttaaaaactctccttagttgtttagacagcgaatctccccactgctcgtccaagtggaaccgagtttgattttggctgcacccctttcctgccctctgtcctcccagagaactagtgcgtagagctccagaccgaagccattcccctccaggggctgcaagttcccatccataaatcaggtaggaagttttgccttctggtcctgggctcctagccctggtcctgcgtttaggctctgagtttaggctaccacaccatgaggtgtccgttggcactacccctgcccagcctccgccccccgcactccctgtcccccagccccacgctgcaccccccccccccccccccgccagtcacccgcttgatttttccctgcagccagtgcctgggtttggggattcctgcagcagcgcccagcggtctgtccagggccccttcccacagcccagctctcagctgtagaggatttgtcctaggtagggccccttcccacagcccagctgtaggggatttcttctcctaggtagggccccttcgcacagcccagctgtagggatttgatttcttctcctaggtagggccccttcccacagcccacctgtcagctgtaggggatttctcctaggtagggctccttcccacagcccagctgtgggggatttcttctcctaggtagtgccccttcgcacagcccagctgtaggggatttgatttcttctcctaggtagggccccttcccacagcccacctgtcagctgtaggggatttctcctaggtagggctccttcccacagcccagctgtaggggatttcttctcctaggtagtgccccttcgcacagcccagctgtaggggatttgatttcttctcctaggtagggccccttcccacagcccagctgtgggggattttttgtcttggattcccacaattacaggtttcccggagcttcctccagctttgccatcaggattgcagtctttgagagaaatgtatagttttattgaccctgtgacgcccaccacctagaataatcttcaaaagaaaattacaaaacaccctgttaacacatcgttggatgtttatactgagtttctagaggagactcagtgaccagggaaggtgtgtcaatgattaaacctaaaggctaaagtttggaatgcttgtccgtagctaatggaaattgttgtgcgagtccctctgaagccactgtgattacgtgtctggttagcgcagcgagttcagcagcaaatctctccaagctctactcctccagcattagggaacagactgccctgttccatacgatcatggaacctggaggagtccgaaattattaaactcctcccctcttcttaccccgtcctatctcaagtgaacagaagtgacctgataagatcacacagccaggaagagactttctctgaccacttgtaattcttgccttttttacatttctgggttaataataaaccatatgcttacatgagtcattgtgtattagcagcagaacaatttgtaatgattgattttttttctaagttttcagtttttaaaattcttgccagaattcttatttaattttacttttgctcttgtctcataatgttcctttgctctggctttgtgacttgatctgttcatcctatgttaaaatatactcctaacattttcccaattcctttaattttcgtttaaatcaaatggatacaagcatagccaggaaaaagatcactgttggaagagggattttagattttctatttcc

SEQ ID NO: 1880255 - DNA, 4001 bp, Homo sapiens
aactaagagctcatccatgcacttatccagatcggagtggggaaggatttgatgtctctgtgctcccctacctgtagctattgcagcatctgaagaggatcatctccgacctgtgtaaactctataacctccctcagcatccagatgtggagatgctggatcaacccttgccagcagagcaggtgagcagctgaggagcctcgggccctgttgtgcagagttgccccacagggtactcagtaaataattgagacaaatcagtagtttctctccatccccaccggctcccaaaaacatacacgtcttatgactctcaccctcgttcttctccagatgggaatcttcttttgctaaatggggcactggtagcttcatctctgatatcaaaattcattctcatgggcagcatcccagatgttgaaagggagcgggggaatttttaccattatcttagcaataacagttggtggccactggggacccaggccccttggtgagaaccaagaatgcaatatcagtctaaagaagatcaagtaaaggaggggttcttaggagaattaaactaggatttaggaggtgggtgacagagacagccattttgcttttcttttattctttggcagtgataggcgaaaaataatgggctggtagcaaagccattccctgggctgttgcttccactcagatctggctggtggagagactggcagcattacaggcaggcgcacaacttccagacctgggggctcaggggagtaggttggaggctgcattctagcaagccactggggctctgatctccatctttcccttccttgctgcagtgcacacaggaagacgtgtcttcagaagatgaagatgaggagatgcctgaggtaggcttgccccctgaggtggcattggctggaagctcttgcagtcagcaacattggtacccatatccagaactccagtctaaaactggagagagaaaaatatcaaaggaataaagacagatttactgacctggaggaatagccagtgtagtagaggagacagggcacccatatccaaccactgaagacaggtgcagcgcggttcaaaccaaatactgggtaagttaatttcaaatggctttggagtccaacaaacctgtgtttgcatcctagctatcctaattgaggaattttatgtaatctcactaagctacagttttcttatctataaagtaggattataatacctactgcatatggttgtcttgagattaaatgaggtgttatatataaaatgcttcagatgatacatgataaatgctaaacaatctatctgatatattctctaaaaacatacagaatataaaatcatggttaggaatttgagctttagagctagacagaacttgactgaatcttagctctgctaagagctgtgactttgggcatgataattgacctcactagactcagcttccgcatctataaaatggataatgatagaataatgagtgatggtggtaagaatgaaatgagctagtatctgcggcacctaggacagaacctggcatgtaataaacactcagtagacattacctgctggtgtggtaattaggtatgtcctgccagaaatggggagatcactctgattacttttatttcctagcattagattaatatcccaggttctataaccgtgtaaggttcttgagactggcaaagggctgacgacatgaaatttactcctcccagatagtggacagccctctgggccacacccccaacatctggctgaggggctcaaccctacataggttctcctccttccctatgctcagtgagctagttgcttgctcacttagagcaggatgaataaggggctaattctgttcttgacctcttccatatatctctctggacatcctttctcatttccatctggcagtgcgtgcctctgcatacctgattcatgccttgcatttgtagcgaggagaggagatgtaatgattcaggtttctcctttaggcttggggccctgagaactcccgggtgcaatagtcacctggtgaaacatgagctttgagtcacagggtcaggcccaagtcatttctgctaggaattagggaagagtttctgctgccaagggagttttaggaacagttggagcagggtcagtccaggaaacaagagggctaagtccctgcctcgatctcagctgcagctctgctcgtttccgaagtccttgctgtagcttgagagctgaagatttagactgtggagggaatggggctggaaattgttctaaaaatggaaagcacgttgcgtttataagactgctagatggactgcttcactttaacttttggctcttcgccaaatgggactgggaaggtgatggtcattctctaacctgtgtcggtttttttccttttcttttcactcccaccccacacctcctccaggacacagaagacttagatcactatgaaatgaaagaggaagagccagctgagggcaagaaatctgaagatgatggcattggaaaagaaaacttggccatcctagagaaaattaaaaagaaccagaggcaagattacttaaatgtacgtgccttctagagagaggctggtgaaggggttggtgggaaatggctgggaagtagtaggccatcgcatctcagtatggagagcagactccttttttgtgcctaatcctttcttaaatcctgggcaagctgccagactgcccctaaggtctaacgtgtgtttataaaccacacgaccaaggaatgttcctgtcatccgtccctcacagggtgcagtgtctggctcggtgcaggccactgaccggctgatgaaggagctcagggatatataccgatcacagagtttcaaaggcggtgagtttgccccagagaggggcctgcacaagagtcacccataaagaagggtatggtggcaaggggcccaagaggttctggggtccaggagtgcttatgaacttttcaggccaagaatggagctcctcaagccagtggcttggttgcatgtccatctgtggtgaacctagagctgttgatctttttctctcagtctgggaaaggggtctgcattagagaccactcaccacctggaccattctactaacacctgttttttccctccttccaggaaactatgcagtcgaactcgtgaatgacagtctgtatgattggaatgtcaaactcctcaagtgagtggggactctgggattggagaggaagttgaggaggagtgtgagtggggctactgtggtgggatctccagggcagccccatccagcattttcattcagggtcccggagcgggtgtgggcagtggtttcgtggtctgctgccagccagggcaggggagcccttatgaagctcctgaggtggaaccaggcatctgagcccaggcttgttgcttcttagagttgaccaggacagcgctttgcacaacgatctccagatcctcaaagagaaagaaggagccgacttcattctacttaacttttcctttaaagtaagacttttcttttccagtctctccctctggcctaggctgcccagtctgcctgacagtcctgtggaggatgctggcctccctcccctgattgtcgtctctctctctctcaggataactttccctttgacccaccatttgtcagggttgtgtctccagtcctctctggagggtgagtggctggcatgcggaagagggcatctcctctggcagagggcggggaagagacttggagattttgtcaggcacagctgactaacctttctcatgcaggtatgttctgggcggaggggccatctgcatggaacttctcaccaaacaggtgagcctgtctctcctccttggccaggccggcctgggcggggattgtctgagctttacagcacacacccctacgggctgggtgatagacatgatgtggccctttcattctgctgggctgggtctgcacccactgacctagacagacaggtggtggcagtgc

SEQ ID NO: 1880256 - DNA, 4001 bp, Homo sapiens
ggcaacccaaagaagaggcctggcccagaccaggccctccccagcaactcccacgggtcacagacttcccttctgagacgagcagaaacaccaccactgacatgatcttctttcacgacccatggaggagcaattcaccttggagagaatcagaagacattagaactggagggagggaggaaagcaaggaagtgtaggcaggcaagtttgcaggtctgatggcagaaggctgaggaagtttccatatgatggcttctattttctctctgaagagggcagtaaaggtatcttctaagagggaggagggagggaggtgggagagggagaggtgggaggtttcgcaagcaaaacaacgttttgaaatagccattgagaagaaaggagaggctgggcgaggtggctcatgtctgtaatctcagcactttgggaggctgaggcgggaggatcacttgagcccaagacttcaagaccaccctcagcaacatggcagaaccccattctacaaaaaataataaaaattagccaagcatggtggtgcacgcctgtagtcccagctacaagggaggctgagctggggaggtccaggctgcagtgagctgtgattgcaccactgcactccagcctgggtgaaggggcgagaccctgtctccccttaaaaaaggaagaaaaagaagaaaggagggagagagaacccagtggtcggttggggatggaagtgcagggctgagagtctaactgaggttagagacctcgtgtttctgttacaccaaggtgtgtggctggccaagacttcttcaatacccgtgtgtaggtggactggtttggcttcaggtttcatcagatggaaggagagtaggactcgggcagggaggatccttttgagaatgccgaggtaatgggccaggatagggaagaagcagattgatatcgagggggaaagcggagacagcaatggacaggaaacccaaagatggtgaaaaacagatacagcggaagtgactcaagtggctggaagtggaagagattgtggctggggacatcaaaggaggtgcagatgctgttgataaggttcccagtgtggccccggagtgggaggctgatgtgaaaagaggtcagggaactggcgctgaaagggctgtactgaggatgggggccctgctccccgcaactcagataccctagaagcatccactcagagtttagggttccgagaatccatcagtcccacagcctcattttaaaaccagggacactgagagggtcagggcctgacccaaggtgagaaacggattttgagactagtggtgctgctccccgctcctccatgccccggccagggctctccctctcccagacactctcccccagagagaaacagaggcggtgacgctaggaagaggaggagagaaggaggccgcgggtccctgtcgcctccaggccaggcaatccactccaggctcgcaatccaccgacctggagttcacggcctccgccctcctggcccagcggcccccacccgaccccacccgaccccacccgacccaggccggttccggtcacgccggaagcacgtggccccccaccctgcggcgttgcccgggagaccagggttgtttaccagcaggacagagcccgggcgcaggcggcggatggagcggaacggctaggtgagagcggctgcccgatcccgcggcctgcccttggcctccgccaggcctggaaggggccgggggaggccagtccccgagaccccagcacatcacccgggagggcctccccagacccagcccgggggacgcaaaccccgggagacaggcgaggagcctggagaaaagtctgctcccgaggcaaagcaagcctggccagagctcacctttaccaaaatagggtgactcccgggctctgcagaaaccgagggacctatgcaaccgctgggccatgccctccaggctgggatgtagcgacggggacacagacccagggagagaaaaggatgtcccagtctccggcagggcagagacgagaaccagagggcccctcccccagtcctgtgctctttctctgaagtcaattctcgctttctaaacgctctttctcgcccctcccccagatccctcctctgcctcttaagcctgttgccttctagggcgctggaacttggacttaattgagttatccccaccacctccctgcccttctgacgctggaatcatccccagttctctatccaaacatttgatcacttggtggcttgtggttcagtgtggcactctgcataggacagtgtattctaatccctagtttggggtagaactgggaatggtaccagagttttttcattctcaggccaaccaccatctcctgttggttcttcagagcatttttatcctgaaagcctggtgggggtgtgggttggggggggcgggatggcaacggataggattaactgatacagttttaaaagaccaattcaaatgtatgtatcttggtatataccagcagatggtatgtaggtggttatattttactgcatatactgtaggcttagatttgggttgtgagtgaaatagggtggtctgaccctgtggtgggtggtgggcacccttagaaagcaggagccctgctttagcttctcctatccacatttccttctttccagttgatttggtggtgaatcttaaggaatgggcacctgcccttctggcaacttcttggaaacagttggcagtgtttgcttcctgactcctagcaggccgctggggtgcagctattgtgtttaagtaaacaggccactcgcctattcagcttggcagcttgatagatgcctacgcctagatcttgtcaaatcggtttgtggttgagtggctgccaggcctagaggtggtgaagtgaactgagcagggagaatcatggctgctgcctcaatcctggactgagggtggtgggcagagttcaggacctgaggtgtgaatataaaggcacagttggcccagatccccaaacacctgtttcccccaccgcccatccctgtgtgatgggtgctggggagagctggtgttccctccgtgtaacagatggtccctgtgctcgggaggaggcagtgggttatgaaagcaggttggatataatggttttacctgaaggaggtgttagtctctaaataaccatgagtgggctcctaggaattagtcataattgaggtttttctctgagatagctcacagtcatgttatcttatgaccagggtgtcttgaatatgacaccccctgaacatggataattatatggaaccaaaaggtatagaaagtgcatgcacatactcaagttttactgttaaaaataatcccacagagagcctgtgagaacacatgactctcctcatcaaagttgttaaggaagaggtttctaagttaccaaactcactgacagttaaaccttcctgaggcatgtgtgggtgttggaagccaagcctgtgataattctgtagaagctgtggcaaattaatagccattccacaagtggggagggtgggccgagaggggcgtgggtttgcctgtggagcttatctttggcagaacagttggacagttatgaccttctcctgccatcctgagtgaaagtgcagagctgctaattgccagagaaagacttgagaaggagactaaagggggaaaaacacattcttcacagttgatcagaaaatagatgaaattaacaaggagatgggcagtcttttttgatgccaaaagtttgctaaggagaaggctcctgagctactagcagccagactgggtgtgaaagacgagggagaagtggaaaatgggagtggagagagactcaggctgtgagtggaatgcagcagacatagaggcctttaaaagagggtagctttgtccaagattttgaattgagcaggacatcaggaagatatagggataatgtgttgcgtttggtcctggtctgagtggagaggaagcagatactccttaaaattaggcagc

SEQ ID NO: 1880257 - DNA, 4001 bp, Homo sapiens
tcccagctactcgggaggctgaagtaggagattcgcttgaccccgagagatggaggttgcagtgggccaagatcgcgccactgcactccagcctgggcgacagagcgagactctgtctcaaacaaaaaaaagaaaatttcccaatccttaccactgtgcctgagatatagaagatgaacaacatatgcttgataaatgacattccaaatattaagctgtgtacaacaggcaatatctacatcaacgtttaattgttaatcccgcgtaaaagttttaacatcgtagagtcaataacacttgggaaatagataaaaacgtactgtccaaagaagagactaagaacaagataaatagggaaggataaaaagtaaaatgtgttgattatttaggacgaaaggcactaaatacagccagagagaaactgtgaggaaagcatgtggcctctagtctagaacactagctcaagaaaactcacttcaccggaagccagaaatgagcagagagcggaaccagtgaagtggcctttcaggcccacgcagtcagcgtgtgtggacgtcccgaagagctattcacacattcaaggcgttctgctttgaataaccagaatctcgagttcctgggcggcttgagccgcagacacctcacccttgagaaggcgcaccctagggtggcttctgcaggactaatggcctgagcaatgcacttgacctcaccagcccgggataaggtgcgcgccgcagagaaggggcagtgcaaagggcaatacgtgcttaagagcttggggagcgagggccctcaagtcaattacaggatttgggtgccaggtcctgaggatgcagcaggcacaagactgacacgatccttgccctcgtggtgtggctctacaaattactgtggaaacgcgactgtctcgagctgaggagagggcagaacatctacatttcccccacccggactccaggttcctgaagtcacctctccagacgcggggcggcggtggccgcagggaaccactccatgcccagcttgggcctcctcccgtgaccccaggcccaggacggtccccttggttctcaccgaatcctttaatgagctcggtgaagaccccggggtcgctttccatgaggcaccactccccggcattgcccgtcatggccctggccacacaccgccccgatccacctctcgctctcagctgccccccgcaccagctgccgccggccacagatctcagcaaacccgccgccgagctcgtcaaccacacgtcaccccgcctacttcccgacagcctccgggcgccgtcacctgcagcgcgactgagcgcgggaggacgctctagccaccctagagacatcgaaactcttcccaggccttgcagcacccgtagcggattcggaagggctggggcctgagaagaaagggcggtgattcacagcgccgaggaggcaacatccgggatcctcgcccctctggggcggaggcggggcaaaagaagaggggcaggactcgttcccgggaaccgaacctggaatccccggcggcagtggggctgttgctgttgctgtggctgtcgctgcccgtcaggctgccttcttttgtcgtttcccagcgctgcgcaggacttctcctggcggcgctgcggatccagggggtcggctgccaggtacaggtgaggacattgcgggaggccggctgggagccttttgtgcggccccagggacgcgcaaattctgaccagtcctccatgtctctcacccgcatcccaggggttgaggctgggcaaacgccgcgaaactatcgctcttccccgtcccgcttccgcgcctgtccaccctgggtaacggaaccagcatcgcggtagggacatcctcgctaggcccggccggaccattcctcagggtgggccctttccgaagccgggaccgctcctgcttgtcggcatcgctccccacaggccgacgtcgagagggcctgctttactcctcctctttctcctccttctcccgcggcttctgcgcggagaggcgtcgcccgggatctgggttttggaagaaggatctttgtgggaagacagggtgaatttatcacagaggaataacgagggagaggagaaaggtttgtccatggggctgctagactagtggaaggggatgcggtgcgtcaagggaaaattaggttgaaaacaaatgtcgtgtattaatctaaaaacatttggaatggttctaaaactggatgatgagttaaaccaaatatttactaaatatttactaaattgccctcattcagcaggctcttatagaatactatagtgttaagattaaagtttttaagagtatattgaagtcgttaagtgtatatttactccttaaaagctacatattccaagaaagacctttggcttccagaaaaaaaaaatgttttagtgggtaaaactctgactccttccttctcaaataggtgacttgtgccctggagttagggagccttgtgctacagattatgtgaagccatgaaataaacgtggtaaattttattgagggaagcaacagagcagcttttgtattaaaaggagcctgagtacgctatggggtagaagccaaaatttgtatgaagtgttggtttaaaaaaaattttttttgtaactttcttgaagtttatctccggaaactctgccctcaacttggagactaggaggattctgtacagtatatttccttgagatactttattggaaaagtttaagaggcacagagtccagaatgattggcatcagagcccaaagtagtttgtggtattttttttaatctgtaatattgctatgaacttgaaaatgttttctgtgcaaaatacatcaaaactaaaatgtacttgatacccaacttaattaacatggtacctattgtagaaagaccaaactgaaaatttagcctttggcacaatctagaagtaagcagagaagggggttaagatgcctttcattatgttaacgtttaatcctgagagtttacataaaaagccagatttctgggtctttgagaaaaatgagatctggcaactactagttccataccacgtggcaaccagttggcagctcccctcagactagcatgctgtcatttttgccacagttccttcctcatcagtttttatagcatcacattgatcagtggattcagatacctgtatcatgggtaaacaaacctctatcatgggcccaattttctattgttgtttctttacatttgtcatgcactctcatagatatgtcagctttgacttcatttaaaaaggaataatctgcaaatgtgtttgacttcttgagatgaaaggcagcattttcaaataaattataaagagactttggaagatattgagatgtgtaaattcaagaaaaatgtaggattccttggaaataacacattagtactgataaaagatactgtatatgctgtagttctgatgattgtgaaacaagtgctattatataatgtgtgttactagcatttcctgattttgcattctaaattaaatttaaaagtagagaaatggacattgtataaaatatccacaaccaatttaatatgcggccatgcttggccgggcaccgtggctcacgcctgtaatcccagcactttgggaggcccaggcgggtggatcacgaggtcaggagttcaagaccagcctggccaacatggtgaaaccccgtctctactaaacatacaaaaaattagccgggtgcggtggcaggcgcctgtaatcccagctactcaggaggctgaggcaggagaatcgcttgaactcggagggcggaggttacagtgagtggagatcgcgccactacactccagcctgggtgacagagtgagagtctgtctcaaaaaaaaaaaaaaaagtgtccatgcttttaatattatagtattgtaatatttaacttctcaagaacttaatttatagagatttaatacaacattagttgtatggtgtgttttaagagcactaga

SEQ ID NO: 1880258 - DNA, 4001 bp, Homo sapiens
agcaataatgggagataaggaagtttattgaaagtgacatctgaaagaaaccaacctaacagtgtcttcccagaccttgaaataaaattggatttagcaaatatcattctaatacagatgtcccccaaccaccttacaggaaaagctcaggttgtagtaagaataatcttagctaacatttatgaatcacttactattaccaggcactgtgctaagtgtaataaggagaagaaaaaaggaatgattttaaatcctactcaacaaactgtctttagccctacataactgaaaacaatttgcttacattctctaaatgcatcagtgaatcctactggtatgtttctattattagttgtaataccaaaaagtctcacaggtaaataaataagtaaataaataaaattattttggcctggtgcagtggctcacaccagtaatcccagcactttgggaagctgaggcgggtagatcatctgaggtcaggaatttgagaccagcctggccaaaggtgaaaccccatctctactaaaaatacaaaaattagccgggcctggtggtgggcacctgtaatcccagctacccaggaggctgaggtgggagaaccacttgaacgtgggaggtggaggttgcagtgagctgagattgcaccaccgcactccagcctgggcgacacagcaagactctgtgtttactttaacagagaagagtaatctctctctctctctctctctctctctctctctctctctctctctctctcagtatacatacatacatacatacatacatatatatatatatttgagacaatctcactctgtcacccaggcaaaagtgcagtggtaccatcatggctcactgcagcctccacttcctgggctcaagcaatcctcccacctcagcctcctgaacagctgggactacaggcatgtgccactatgcccgactaattttttttttattgtttgtagagatacattcttgctatgttgccccggctggtcttgaactcccaggctcaagcaatcctcctgccttagcctcccaaagttttgggattacaggcataagccactgcgtccagctgataatttttaaaaaaacttttaaaaattgacaaaaaggttggggttgttgaaatccttttttctgaacacaggaagaaaatatataaaacaaaatgagaacaggcacagtggttcatgcctgtaatcccagcactttgggaggccgaggtggatggattcccaggccgaggtgggtacactccagcctgggcaacaagagcaaaacttcatctcaaaataataataataataataccaatggaggaatgggtaagaaaaatatttcttcatttaacctgcagaaagctgtgaatctaccaaatacagcatagtcttggcctcagggcagtgagtttcaaactttagggtacaccagcatcaccaataagcttattaaaaatatagattcttgagcccaactggaagaattctgatgtagcaggtttggaataagtcctagaattctgccttttttgcaggcaccacaggtaattgggcaggtggtacagagtcctcctcccaaaactctgtcttaggatagagacacaagccttccccttttctatgaatcctgagaattgtgaacagttctagtgcaaccacagaggtaatctgatttacaagggttcagtttggtctggatcctctgatctggaactattatagttatcattgtgattatcagagagacagattaggggcagcattatttccaggcatgatgtaaactgctatttattatgatggcagctttaataattgatgcaaaagtatgcattaaagaaattattttcatatgtctatctactccttccctgattcacaaagaaattggtctcacctttttatagttgttatggtagtgggccattttattttggttttctacttcagattcagcttcgagaatgagaaagcatagtttgggcaaaatagatgtttgtaacattttttattaacctgaagagtgggtgatcaatatgtttacctattgcatagcagcctgaagcaccacattgagtggctaaaaccaggaagatggagagaatatgtaaacatctttggtaaaatacagttaaatttactgttactttgaagcaaccctttgaagtatcccttagcaactggttccttaagacagagattattaagtgacagatcctaattattactaagacataaggttttatcatttctgtttaatgtacgaaccacctgcatttgctctcattcattgagtcaaacaggagaagacatgaaatatatttaacatctacttattaaaatgaagtccccctgcccaatgaatttcatacaacaatgttcactccaaagagtgaactatctttccctatttttctgcagaactttttgatgactttgcaaaccagtcaacaattcagcacaaaggcatccagagtcacgctggcatgttgtgacagaatcgcacaattacatgggatccatcccactctgaaaatgccccgaacagcgaacagcacaggtaaatcaaatcaaacgtcagagccagcacagcctgagagcgccttgaaactcagactccacaatctatggggaaagtgtcctgctgtggcatgaaataaatgaaacagaaaatgatggcaagactgctaagaacatcctttgctttgctcttccttggcctctttggggtgctgggggcagcaacaatttcatgcagaaatgaagaagggaaagctgtggactggtaggtaaatgaaatggaaggactgctgcatgcaaacagcctcggtacagagttggcctggctcactgcgaagttcctaaggggaatgtccattctctttcctccctttacaaataaaggaagttaaagtgtgcaaatcggccaaactcccaggcaggggtaggcttctgagtgacggagtttccccctgaaaaagagctgagcagcccctcttgggcctgattcactgttctcagcggggcaaggctggtagccacagaagtgggattgagctgacagcttctgtgagctggcaatttcttttaattacatcatggcttttcctaacagaacacttccaacatcctttgaaagactgacagagtaaagaaggcagattatttttttctgaaaatggagcatgtgctgctccttatgagaaagagaagggggacctggtcacacacagcactgtttgcctaacatcggtttgtttggaagcagaggcagctgttgccatgattggtacgtaggccactggcctgttgtacagtgtcaaagacattaaatgctgtgttgcattatagtcatgggttctcctaaagctttaactactttttcaccctttaattgggatatttaggtttgccataatggttggtgtcaagctttttgtgtaaacttcaggctacagaacacagatatactcaaggcagtagtcagtctttcctcagttactgagctcaacagaggtctgtgtggagttttgaaaatataaatatgaacgaaacatggttcctaccctcaaggacctcacagttatgtggtaagggcataggtggaacactggggaacagagagcccagaaaacttctctaaggatgtaatttttgagctaagttttaagaacaattaagaagtagctggaaaaagaagggatgtgcaagagcatctcaggccaatgaaggagcaatgaggaggtagagaggcaagaagcaacatggaaatttgggagttgcaaagtagtttggtattgctggaacttcaggagaatacaggaagatgaccggaggtgaggttagagaggtggggacagccaaggggtctgtgtgctgagctacaaggtttgaacttgacattgaaagggagctattggaggacttcacgcaggggtgtgaatggtcagatttgcactttaggaaacccattggcagtactatgagggc

SEQ ID NO: 1880259 - DNA, 4001 bp, Homo sapiens; identical to SEQ ID NO: 2368

SEQ ID NO: 1880260 - DNA, 4001 bp, Homo sapiens; identical to SEQ ID NO: 2382

SEQ ID NO: 1880261 - DNA, 4001 bp, Homo sapiens
ccgcaacctccgcctcatgggttcaagcgattctcctacctcagcctcccgagcagctgggactacaggtgcgtgccaccacgcccggccaattttttgtatttttagtagagacgggttttcaccgtgttagccaggatggtctcgatctcctgacctcgtgatccgcccgcctcggcctcccaaagtgctgggattacaggcgtgagccaccgcgcccggcctattttctaattttaagtgaatgcatctcaaaagggtgacgaaggaccacattcctatcgaacagcaataattcactgtggcaatatcttgccacaaataatttaaacattaattgtggttttgaggggcagtgtgcagtgggagtaaaaggggtagggtttagagtctccaaaagatttacttaagaaacacgaatgcactgcttgtgcactgcgcaaaagttctggggtcaagttccaactttcactaaggatcccagaacagcccggcaggagctgcccagggctaacgcgctttgctctcaaacccggccgccagtcgccgacgcatgcgcagtctagcaccgtggcacaggcctttctcaagcaggtttttgtggggtcagcaaaagggccagaacagcaacggcaaacagttccgagcctgacagtgcaggggcaaaccagctccaagtgaaaatcacctcgcgaggaaataggctcagggatcggggcggtttccgcaggcgtctccacacacgcactctcactcactttgagggtgccaaaacaccactaggggcaactaggaggaataggctgaggaatcagctatagagaatggaggggatagagctgcaaggggcgagggggcgacgatctctaaaactttcagcgccgtgctctactgatgctctaggcacttttttcattgctctggggagtctgggtgccccaattaatccgtcgctcctttgagcatttgttgtttagggggtcctgggggaccccatcgtattacagtattcagccacactccccgcaaagccgggaagccgccccgagagaagaccccaggacgccgggggctgcgtgagccccgcaaggctgcaggcgggggcgcgggatcccctttctggccgccgcccccctccgccggcccctcccccgcgccccgccctcggccacagaccccagccccggccgccggcgcgctcccacccgcgcgtctggggacttgcggaccgcagcgagaccggccggcgtgctgggcatgctcagtggcgggccgggcgctggagtcggaagcctgtgcgcggcagccgccgccgagccggccggggcgcacggagagcgcgcgggactcgctgcagcggcggccgggtcgcggcgcacccgggccgggaccggagccgagcctagcgcggcgcccgcgacccgtcagccgcggctcctgctccctcgatcccgcgcggggaaagggccggcggctgttggcgtcggcggggcgcggaggaaccgcggcggcggcggcggcggccgcatccttgccgcccgccccggcccagccgcgtcccggagccgtcgggcatggagccgtggaagcagtgcgcgcagtggctcatccattgcaaggtgctgcccaccaaccaccgggtgacctgggactcggctcaggtgttcgaccttgcgcagaccctccgcgatggagtcctgctctgccagctgcttaacaacctccgggcgcactccatcaacctgaaggagatcaacctgaggccgcagatgtcccaggtgaggaggccggcacgggcgccccgcctccagccggcagctcccattaatcatgcggctaatttctttgtgtaaatgcaaacgtctaggtgcgctgagcttgccctgcttcccagccttctgctttgggaccacttcggcaccactttggcgtttcctaccttggcttgaaatggtttagctcctcaagctgaatgcgaaagctttgcgtccggagatggtgtgaggatttcgtaaaggctttctgtgaggcgggaaagaaataagttgtcttagggtgcccttcacctactctgcgtgtgtgtggcgcgacaaagggaatttgatcaagctcttctataataacgaaggggagggacgaaacgaggtgatggggtaatttgcctttagtctcttcttttgctttgcgtcttgtactcatgttttcctaaaagaggaaccatgacatacatgaggactcgaggaagtgaagggcgtttggtcccgttatctgtccaggagtgacattggtcaaagggaagaacagggagcagaacccggaggccgcccccagggcccctgagctggtggccagccggcaagctcccgtttacagctcttcctaagccatgtgagaaggagcgagtccagcctctctcagcagcgacaggaaatgagaagtttcactagagattccgctttccttcctgcagtgccctgctcaggtgctgtggtgccggtcggctcctggggctggagctgcctctttgagggttaagccagacacctctggaaggttgggtgcaccctagagtcagctcaaaagtcacagttcagtggaagagtagtttatttgtcctgtcggaaaatttttgtacagaaggatgttaaactcggttcagagcctctttctctttcagaatgttaaaacaaaacaaaaaaccaaactgctttcaacttaaaagggagaggacagagccctctccctgacacatttcagcactaatcctctatgacgcagagcctcagctacttagcaaccagagcagcgccttttaagaaggaacggactttatatgatttaataagtatgtatttaaagttagagcacacacagtcatctgtgattcttggtgtcagtgtttcatcagggtcccctgcacttcagattctgcattccttgcctgtttgccttcaacctgctggtgggcagtccctaagaaagaacaggcatggaagtggggagagccatacgtatttaaaagtgaggtaaattattttatacccccataaacatgcatggtgattgctacctctcggtaccccttcagagttgtctcaactctggaaattcctttgaggggtttggcagacttttctattatggtgggagctgcagttagctactctcacacatccccattttccactttgcctgtagcctcaggaggcagcgtgggtcaggatgccttggcccaccagtagggagtacagtactgtgcacatttcctggaacttgtttcctggaactctcagcagttgctctcaataatcacgttttctggacagctgaagacctttttaaacctcgaagcctttatttgaatgctaacaatggatgagaatcgttttgaatgtgtttcactcttctcctcttatgttagatgtaatttaatctttctgatgaccaaagattgtcattataagcatcattaatgaaaattgagcacatacaatgctctaagagttctgttccctagtgggggtagcaaaatgagcacaccaggatacttgccctaaaggaattattacactatgctatcagatggtaaatcactgggttataataaggtaagtaggacagctaatgaccttctttgtgccgttgcacttttgagttcttaagtctgttcaaccttgaggtttctggttccaaattaagtacagtttctcctgtaatgtcctatgagagggtgcttccctcaaatgtgaatcctagaaggctagtacctgagcctggtgatgtctgtttttgctttcctcatggttcttggcctcattgcagagaggcaaggctgctgaacaagtggatgctaggccgatgagtttgtatcatgcaggttgtcattaaatcctttaatgagacttatgaaatgattttatgaaacaacttgacgtatttaacatgcttatagtgcctagcacatgtacttaataaatgtttactattagcaaaattatgaa

SEQ ID NO: 1880262 - DNA, 4001 bp, Homo sapiens; identical to SEQ ID NO: 2393

SEQ ID NO: 1880263 - DNA, 4001 bp, Homo sapiens; identical to SEQ ID NO: 2398

SEQ ID NO: 1880264 - DNA, 4001 bp, Homo sapiens
gggtgtcagcaattaagaagtcaggttaaaggggaggaaccagcaaaaggagactgaaaagagaaactattgaaatacggagaaaacagcagatgggggagccagaagggagatggttttcccctggagttgggccgcttggtggcccaggttgtcctccgactgccccagacaaaccccatgtcgttccgcccgtcagtggcccgctggtgtgctgcccgtgtttcatgtgttcctccgctgatgtgctcccctcgatgtccagccgcctgtgtgtctgcctgctaaggtctcagtattttattttattttattttttactttttatatttttgggacagagtctcgctccgttgcccacgctagagtgcaatggcttggtctccgcgatctcagctcactgcagcctttgcctcccggattcaagagattcccccgcctcagcctcccgagtagctgggattacaggcacccgccatcatacccagctaatatttgtatttttagtagagacgggtttcgccatattggccaggctggtcttgaactcctgacgtcaggtaatccgcccacctcggcctcccaaagtgatgattacaggcgtgagccaccgcgcctggccgggtcttggggtttttataggcacaggacgagggtgtggccgaccaaggtgatcttggaaaatgcaacatttgggcaggaaaacaaaaatttttctcctcgtctaggtccatgggcacatgtccgcgtgtggagccctagccatagaccatgccttgcccctctttgatatcatttaaagggaccacacccttctttccccacttctgtatcattgtgatattaagctgtagttatgcatgatgttgccattgagggaaactgggttaagggcgtacgggatcactctgtattatttcttacaactgtatgtgaatgtacaattatcttaaaagttaaaacagaagtatttctaaaaattgtaataataaaagccaccatttattgagtagttactatatgctaggttctgtttacatactatcaagtggatattattgttaacctcattttatagaggggaaaactgagacacaaagagattaaatcacttacacagagtcactcagcgactaagtggcagaacttgcattcagatccaggcaacctcactccaaagacagggctcttaactactttgcaatgcttattgtgtatctgcctttatatcctgccttctagtctcactcgtcagcccactgcaatttacctttcatcccaatcactcccctgaaactgcttttgcctcaatcaccaagtctgttgccaaacctaatggtcccattctttttacagcctttgctattgcccacgcattcaacaaatatttcctgaggtacattgtatgtctcaggacatgcaatgtaccaagttactttctacagctgtgaaaaagataggcaaaactgctgcaactgaagaatgcaccttttagaattagaggtctgaaatcttcagttctttctttctactcatcactgctgacttgtttgtggatggtcaataggccactttattgtccatgcctttgtttttctgtggctaatcgggttatacagctagtttgtttttggtttcacagcataaatgataaaatattatatttagataccatttttcctttttctcccaagtggaactctgaacctttccatgcaattgtcatgaatatgaatgaagtaagacaaccaaatcctgaagtatcctacccttcttatataattattaaaaatgaattgtaaaaaattaattgccattgaccttttacctactttttctgtatgaagataatttgaattaattttatgctcaccattttggaaacaccaggaagatctctgcagaatattaagtaagtttcattccatatgtccaaataaaaagctactccaaggaaaatactcagcttcgtggagacatagtggtagctttttgcgtatcaccaaagctaagcatttgaatcagagttaaagaggcgtcatcttgtctccttccacatatccatggttattatctgtgttttcattcctttcttccaattcagtaaagaagaaaaaaaaaattctctcctacttcttcatgccagaaaaacagctcttgttttattacttctaatgggaatgtattttccttggtgattggaagcaactctagtcctcttgcctacatccagggttagtttctgtttttgtctgatagctatttgtttacagcagcagttagcaatttgcatggacagtgtgtcaatgtcactgccctgaatgaaacccaaatgcctcttggaagaaagatgacagattcagcccagggacttgcaaaactttaaaagtgattccttatcaaacacgtgaaaaacaactcttccctctctataacttgaggaaaaaaatgagaaactatcttacaacagatggcgattccttgttagtagaacaggcctgggctgattcagctccactcctttatgttctttttgcaaaacccacaaagaacacatttggggccacttttcagagttggcagcagtctctgctttttaaggaaatcatgtggatgaaaaaaaaaaaaaaagccacagttgatgaagggcttgtaatccccagagtaaagaaacgggatgcataggccttaaattctaggtcatcaggtttggtagcttgattaaatttggttgaaacaaacaaatttggggctgggcgcagtggctcacgcctgtaactccagcactttgggacgctggggtgggtggatcacgaggtcaggagttcaagacaagtctggtcaagatggtgaaaccctgtctttcctaaaaagacaaaaaaaaaaaaaaattagccggatgtggtgacaggtacttgtaatcccagctactcaggaggctgaggcagagaattgcttgaacctgggagtcggaggttgctgtgaactgagatcacaccactgcactgcagcctgggcgacagagtgagactctgtctcaaaaaaaaaaaaaaattggggaaagtttatattttcttgctgattagacttcttcttaaaaaaaaaaaaaaaaaaaaaaaacagaaaaggaggagaggaagatgaaaaagaggagggagaggaggaagtagaaactataaaaataccttttggggtgatggaatgataaagtgatctctaactttcaagttaccctatatctaaagaattcaatctttaatgttaagtccagtacctttttccaccacttatatgtaaagtactatagctgctttgatgtatttagaagttatttagagaggcttggaaccagtgtgtgagtgtgtgtgagtatgtgagtgtgtgatagagagagagagagtgtgtgtgtgccttcttaataagcttggctttttacagatagaacagatgcctcaggacatcatgaaactttctcactgaagatgttgaagcagaatctggtggggtattgtggagtagacttaaacactagattaataaccaaatcagttagcttgtatgatttttttcttcacctaagagtctatgcttcatgaatcagaactaagcccccttcacctgttcttataataaccttaatttggggtattttcagacatttagggtaatacttactacttagttcttcttatatgcaagaaaacactggccacctttactaatgttctattttatttctttaggtgtctgaacacacacaattaagttggatcctttcctgcatggtcagactacctcgattacaacatttacatcagtggaaggtaaatgccagtaatctgattaataaacagacaagaagctatttttcccttcctgttaggctctgggaatcctgagtttactctcctccctggtctgccactcactaatggttggaacatcatctttaacctccctgcttcagggtattaaaaggaaaataaaaggattttccaaga

SEQ ID NO: 1880265 - DNA, 4001 bp, Homo sapiens
taaaatatgcaccaaatttcaaaggctagaaaaaaagaatgtaaaatatcttattattttatattgattacgtgctaaaataaccatatttgggatatactggattttaaaaatatatcactaatttcatctgtttctttttacttttagaaatcacatatgtgacttaaatatttcttttctttttctttcctctcactcagcgtcctgtgattccaaagaaatgagtctctgctgtttttgggcagcagatatcctagaatggactctgacctaagcatcaaaattaatcatcataacgttatcattttatggccccttcttcctatatctggtagcttttaaatgatgaccatgtagataatctttattgtccctctttcagcagacggtattttcttatgctacagtatgactgctaataatacctacacatgttagaaccattctgactcctcaagaatctcatttaactcttattatcagtgaatttatcatcatcccctattttacataaggaaatggggttagaaagaccaaataacattttttcaacatcaaaacactagcttgagatcaagcccagacttggatctgtcgtctgaattccaagctttttgttatttattgatatgttttgttgttttcatgcaataatgcaaatcttagcccaaacattttgttagtagtaccaactgtaagtcaccttatcttcatactttgtctttatgtaaacctaaattagatctgtttttgatactgagggaaaaacaagggaatctaacactaaccagcccgtagtgtgtggtcaacactttcgttactttagtatacatcaccccaattgtttgtcttcaccacacactttggagttaggtagtagtatctatttttacaaataagaaaacccaggcacaaaggggttgattagcaattatcttttgaaaagcctgtagttgctcatctgaagaagtgacggaccacctcttatttagtggacagacagtaactagttgagaagacaggggattttgttggcggaaaaaaaaatttatcaaaagtcgtcttctatcagggagttttatgagaaaccctagctcctcagttccacagtgggtaactgtaattcattctaggtctgcgatatttcctgcctatccattttgttaactcttcaatgcattccacaaatacctaagtattctttaataatggtggtttttttttttttttgcatctatgaagttttttcaaattctttttaagtgacaaaacttgtacatgtgtatcgctcaatatttctagtcgacagcactgctttcgagaatgtaaaccgtgcactcccaggaaaatgcagacacagcacgcctctttgggaccgcggtttatactttcgaagtgctcggagcccttcctccagaccgttctcccacaccccgctccagggtctctcccggagttacaagcctcgctgtaggccccgggaacccaacgcggtgtcagagaagtggggtcccctacgagggaccaggagctccgggcgggcagcagctgcggaagagccgcgcgaggcttcccagaacccggcaggggcgggaagacgcaggagtggggaggcggaaccgggaccccgcagagcccgggtccctgcgccccacaagccttggcttccctgctagggccgggcaaggccgggtgcagggcgcggctccagggaggaagctccggggcgagcccaagacgcctcccgggcggtcggggcccagcggcggcgttcgcagtggagccgggcaccgggcagcggccgcggaacaccagcttggcgcaggcttctcggtcaggaacggtcccgggcctcccgcccgcctccctccagcccctccgggtcccctacttcgccccgccaggcccccacgaccctacttcccgcggccccggacgcctcctcacctgcgagccgccctcccggaagctcccgccgccgcttccgctctgccggagccgctgggtcctagccccgccgcccccagtccgcccgcgcctccgggtcctaacgccgccgctcgccctccactgcgccctccccgagcgcggctccaggaccccgtcgacccggagcgctgtcctgtcgggccgagtcgcgggcctgggcacggaactcacgctcactccgagctcccgacgtgcacacggctcccatgcgttgtcttccgagcgtcaggccgcccctacccgtgctttctgctctgcagaccctcttcctagacctccgtcctttgtcccatcgctgccttcccctcaagctcagggccaagctgtccgccaacctcggctcctccgggcagccctcgcccggggtgcgccccggggcaggacccccagcccacgcccagggcccgcccctgccctccagccctacgccttgacccgctttcctgcgtctctcagcctacctgaccttgtctttacctctgtgggcagctcccttgtgatctgcttagttcccacccccctttaagaattcaatagagaagccagacgcaaaactacagatatcgtatgagtccagttttgtgaagtgcctagaatagtcaaaattcacagagacagaagcagtggtcgccaggaatggggaagcaaggcggagttgggcagctcgtgttcaatgggtagagtttcaggctggggtgatggaagggtgctggaaatgagtggtagtgatggcggcacaacagtgtgaatctacttaatcccactgaactgtatgctgaaaaatggtttagacggtgaattttaggttatgtatgttttaccacaatttttaaaaagctagtgaaaagctggtaaaaagaaagaaaagaggcttttttaaaaagttaaatatataaaaagagcatcatcagtccaaagtccagcagttgtccctcctggaatccgttggcttgcctccggcatttttggcccttgccttttagggttgccagattaaaagacaggatgcccagctagtttgaattttagataaacaacgaataatttcgtagcataaatatgtcccaagcttagtttgggacatacttatgctaaaaaacattattggttgtttatctgagattcagaattaagcattttatattttatttgctgcctctggccaccctactctcttcctaacactctctccctctcccagttttgtccgccttccctgcctcctcttctgggggagttagatcgagttgtaacaagaacatgccactgtctcgctggctgcagcgtgtggtccccttaccagaggtaaagaagagatggatctccactcatgttgtagacagaatgtttatgtcctctccaaatgcttatgttgaaaccctaacccctaatgtgatggtatgtggagatgggcctttggtaggtaattacggttagatgaggtcatggggtggggccctcattatagatctggtaagaaaagagagcattgtctctgtgtctccctctctctctctctctctctctctcatttctctctatctcatttctctctctctcgctatctcatttttctctctctctctttctctcctctgtcttttcccaccaagtgaggatgcgaagagaaggtggctgtctgcaaaccaggaagagagccctcaccgggaacccgtccagctgccaccttgaacttggacttccaagcctccagaactgtgagggataaatgtatgattttaaagtcgcccagtgtgtggtattttgttttgactaatacaacctgaaaacattttcccctcactccacctgagcaatatctgagtggcttaaggtactcaggacacaacaaaggagaaatgtcccatgcacaaggtgcacccatgcctgggtaaagcagcctggcacagagggaagcacacaggctcagggatctgctattcattctttgtgtgaccctgggcaagccatgaatggagcttcagtcaccccatttgtaatgggattta

SEQ ID NO: 1880266 - DNA, 4001 bp, Homo sapiens; identical to SEQ ID NO: 2425

SEQ ID NO: 1880267 - DNA, 4001 bp, Homo sapiens; identical to SEQ ID NO: 2449

SEQ ID NO: 1880268 - DNA, 4001 bp, Homo sapiens; identical to SEQ ID NO: 2450

SEQ ID NO: 1880269 - DNA, 4001 bp, Homo sapiens
gttagaaacctgcaattacttcagctagtcagaaaggctcccctcctccttgctccaaggagcgtggttattaacctctgacccagaagtttccctgagcgtgaagcctcaacttgctggggttttggcaaccccaagtacctatgctctactaggctcaacacaccgctcactggaacccaccaaactggcctaacctctgttgcgtctgaatttctggaagaaacacgatgtgaggataaagtcacccacagttcctcacagctattgagccactttgatttcccagattttctgagctatccaatatacccacaagcatttctggaagtttcccttaccaccaaagccagggttaataaaaagtaacggctatcatccaagagcgcactctctggaacgctttaatcatctcactcacgcctcacaacatccttaggtatgatgaccctcattttagagaaaaggaaatgggcctggattcaatgactttccaaaggatacacagcctggattccaaaccaggcttgtctgaccttgaggcccacgctctttccactggggatactgcctctaggggaccctccaggattccattttatatggtgctcagatcaattttatttttatagccaaatttagcagtggggggttgtatactaactttagagttattaatgttattaagttctggtaacccactaccatcggaccagcctcggatcgactttagatgaggtaggatggtataattctgtgacatcttaagaattcttagccccacagttgcgggtggaaagagaaggaatgggaaagtctgcattatggctggggtgggtccttctgttctttttagacacttcagtaatttaatcataaataaccgggcactgggaacaggacactcactaataaaagcaaggcctggagttatgtttgaaaaaaattttcaagttcctcagtgggtggatctatctgcaaaacaaaagaaaggcccctttcccagcccaggcagagaagtctcctgtacagttagagacaacaggcttccgggcacgtagccaaggttctggggatatttataacttgaagagggtgggagtccctaataagctgctatattctttttccatcacttccctctccaaggctacagcgagctgggagctcttccccacgcagaatgcctgctttccccagtgctcgacttccattgtctaattccctcatcctggctggggaaagggagagctgcgagtcctcccgttccgaggaactccagctgaatgcagcttagttgctggtggtttctcggccagcctctgtggtctcagggatctgcctatgagcctgtggtttctgagctgcctgcgagtctgaggcctcgggaatctgagtctttaggatcagcctacgatatctgggcttcgcctgcaagtctacgaattcgagatctacctgcgggtctgagacctccgggacctgcccgtgctctctagaatcttcctgaacgccaggtctgagagaacgctgcggctctggaacccgttcgcggtctctcaggttttggagacgacgatctagtggatcttttgcgggacaggaggtaagtctgttcgtcccccactcgggttttcggcttcctaccttcaaccggacagggactgctaacatcctgaaggcccgcccggatcagggcctcagacgcccagggtcccttcggtgcgggaggccgctgggagcccctgtagcagacaagccctctgggacgctaaggagggcccgccccccccgcaggggcctggctatctcctccttacacgccctacaccgccacccgcttctgagtcccccagggttttcgcctccccgccgctggacgccactcagcccgccgctcgaggggcgcccccttgagaaggacgcagtcgcacgcccctacagggttaaagcgccgaagccaagacaccgccaggctctactgccgaccgcactcccgagtcgccccggcgcggggcggcgcggggcctctcgggagttgtattgcgtacagagccgcgccgccgcaggcgctgttgggagatgtagtgcgtgggcggggctcaaagttccagcgcggcctccgagtctcccctggggagtgggcggctgccgcttccctctccagcctgtgctgtcaagcaggggctcattctagctcagctcaacacaggccagcgcctaaattggcctgacttcgcagataataaggcccgactcaagagaagcttctagggacgtgaggcgaagcagggcagcctctagcttaatcgtgctgcagtctccataagaaaaaagcgagaatactccgccctgactgggaggacgcgcttactttttcacccttttgttcttttccctccttggcttttggcctctggctagcttttgtacgcgggagtggaactccaactcccggcaggccatgggggcaggcacaggcgcactagaggctcttggccaggctgtgggaggcgggcatagtgttccgcctctgattggcagagtggttcacgaacttcgctcgctgattggctgaggcagctgccggaaaggacccggcctcgagatggcagagcggaggcgttccctgggctgagctgagcacctcctccctgagacagcagcggtctaacccccggcgcgggagggacccagccagggggctgtcctagtagattccggcattgcctccaccccgctgtggcggagacgcagagggcgggtcgcgctcgagggtcagggaggagagtgacccggccctggtccagggccctccctgcccgccttggggccagaactccagccctggggagtgggcagggcctgttttccgtgcctcacgccctgcttttcgcctccttcagcgctgtctgctagctgcttttcctgctctctctccctggaggcgaacccttgtgctcgagatggcagccaccctgctcatggctgggtcccaggtaagccggaggtggcttctcagaccttgtctctgcttacccacctcgtccggcgtttctctgctctgcaagtccctgtgggaaattccctgggattagtaattcgctggcttcgatattctgcctccaggggcctagtaccaggccagtatagtcacaaacaaacatatatcgaacacctgctgtatgcctttaaatactggggagataaaagatggacgagatgggcgctaccttctagctcacagctcacagttcacaatctgtagggagaaaggcgcatccacttaagcgtggcacaacgtagtaagtgctctacttgctgtaggaacaaagtgctgtagtgtgggaatcactcccaagaagtcggcgtgattaagtctatctggggcatccaaggggagtggagccgtgcagaggggtagggggcattgaagaacagttagtactgcagcgggaccttaaagagtagtagaatttctctagtgtgagaagaatattccaggaaaagaggaacattatgagtaaaggtatggagcgatgcaagtgccagatatgtcctgagaaagtcacagccagaggataaagttcctgagtggggcagggatagctggccatgggaccagagcaatcagctcataaattgctgccttctttaccacatctcttttttgcttgtttatttcttatttggactctataggtcacatttaatatatttttcctcctgaatatttctaatcatgtttctaatttcaagaagtcctaaatacagaatagtagggaagtatcgtgtgatttcaggcacctgtgacgtttgaagatatggccatgtatctcacccgggaagaatggagacctctggacgctgcacagagggacctttaccgggatgttatgcaggagaattatggaaatgttgtctcactaggtaagtaaggattctacctttctttgcctccacgtttttgagatcgtgtcaaaatgacttagttctttcaa

SEQ ID NO: 1880270 - DNA, 4001 bp, Homo sapiens
agcacttacagaaggaggcaggcagccaagctgagcccggggagtcgtcctgggcgccaccccgcccccgccccgcaggcctgaggaataaaagaaacagcaagaagacaaagaagggcttaaagcactggggcaaaggggtggggggaaggcctaagaaagtttacaaagcaatctgtcagagaagggatgaaaagggacccccgctgggctgaggggctcaagccctcagctcaccttaggcccagttagaaacctgcaattacttcagctagtcagaaaggctcccctcctccttgctccaaggagcgtggttattaacctctgacccagaagtttccctgagcgtgaagcctcaacttgctggggttttggcaaccccaagtacctatgctctactaggctcaacacaccgctcactggaacccaccaaactggcctaacctctgttgcgtctgaatttctggaagaaacacgatgtgaggataaagtcacccacagttcctcacagctattgagccactttgatttcccagattttctgagctatccaatatacccacaagcatttctggaagtttcccttaccaccaaagccagggttaataaaaagtaacggctatcatccaagagcgcactctctggaacgctttaatcatctcactcacgcctcacaacatccttaggtatgatgaccctcattttagagaaaaggaaatgggcctggattcaatgactttccaaaggatacacagcctggattccaaaccaggcttgtctgaccttgaggcccacgctctttccactggggatactgcctctaggggaccctccaggattccattttatatggtgctcagatcaattttatttttatagccaaatttagcagtggggggttgtatactaactttagagttattaatgttattaagttctggtaacccactaccatcggaccagcctcggatcgactttagatgaggtaggatggtataattctgtgacatcttaagaattcttagccccacagttgcgggtggaaagagaaggaatgggaaagtctgcattatggctggggtgggtccttctgttctttttagacacttcagtaatttaatcataaataaccgggcactgggaacaggacactcactaataaaagcaaggcctggagttatgtttgaaaaaaattttcaagttcctcagtgggtggatctatctgcaaaacaaaagaaaggcccctttcccagcccaggcagagaagtctcctgtacagttagagacaacaggcttccgggcacgtagccaaggttctggggatatttataacttgaagagggtgggagtccctaataagctgctatattctttttccatcacttccctctccaaggctacagcgagctgggagctcttccccacgcagaatgcctgctttccccagtgctcgacttccattgtctaattccctcatcctggctggggaaagggagagctgcgagtcctcccgttccgaggaactccagctgaatgcagcttagttgctggtggtttctcggccagcctctgtggtctcagggatctgcctatgagcctgtggtttctgagctgcctgcgagtctgaggcctcgggaatctgagtctttaggatcagcctacgatatctgggcttcgcctgcaagtctacgaattcgagatctacctgcgggtctgagacctccgggacctgcccgtgctctctagaatcttcctgaacgccaggtctgagagaacgctgcggctctggaacccgttcgcggtctctcaggttttggagacgacgatctagtggatcttttgcgggacaggaggtaagtctgttcgtcccccactcgggttttcggcttcctaccttcaaccggacagggactgctaacatcctgaaggcccgcccggatcagggcctcagacgcccagggtcccttcggtgcgggaggccgctgggagcccctgtagcagacaagccctctgggacgctaaggagggcccgccccccccgcaggggcctggctatctcctccttacacgccctacaccgccacccgcttctgagtcccccagggttttcgcctccccgccgctggacgccactcagcccgccgctcgaggggcgcccccttgagaaggacgcagtcgcacgcccctacagggttaaagcgccgaagccaagacaccgccaggctctactgccgaccgcactcccgagtcgccccggcgcggggcggcgcggggcctctcgggagttgtattgcgtacagagccgcgccgccgcaggcgctgttgggagatgtagtgcgtgggcggggctcaaagttccagcgcggcctccgagtctcccctggggagtgggcggctgccgcttccctctccagcctgtgctgtcaagcaggggctcattctagctcagctcaacacaggccagcgcctaaattggcctgacttcgcagataataaggcccgactcaagagaagcttctagggacgtgaggcgaagcagggcagcctctagcttaatcgtgctgcagtctccataagaaaaaagcgagaatactccgccctgactgggaggacgcgcttactttttcacccttttgttcttttccctccttggcttttggcctctggctagcttttgtacgcgggagtggaactccaactcccggcaggccatgggggcaggcacaggcgcactagaggctcttggccaggctgtgggaggcgggcatagtgttccgcctctgattggcagagtggttcacgaacttcgctcgctgattggctgaggcagctgccggaaaggacccggcctcgagatggcagagcggaggcgttccctgggctgagctgagcacctcctccctgagacagcagcggtctaacccccggcgcgggagggacccagccagggggctgtcctagtagattccggcattgcctccaccccgctgtggcggagacgcagagggcgggtcgcgctcgagggtcagggaggagagtgacccggccctggtccagggccctccctgcccgccttggggccagaactccagccctggggagtgggcagggcctgttttccgtgcctcacgccctgcttttcgcctccttcagcgctgtctgctagctgcttttcctgctctctctccctggaggcgaacccttgtgctcgagatggcagccaccctgctcatggctgggtcccaggtaagccggaggtggcttctcagaccttgtctctgcttacccacctcgtccggcgtttctctgctctgcaagtccctgtgggaaattccctgggattagtaattcgctggcttcgatattctgcctccaggggcctagtaccaggccagtatagtcacaaacaaacatatatcgaacacctgctgtatgcctttaaatactggggagataaaagatggacgagatgggcgctaccttctagctcacagctcacagttcacaatctgtagggagaaaggcgcatccacttaagcgtggcacaacgtagtaagtgctctacttgctgtaggaacaaagtgctgtagtgtgggaatcactcccaagaagtcggcgtgattaagtctatctggggcatccaaggggagtggagccgtgcagaggggtagggggcattgaagaacagttagtactgcagcgggaccttaaagagtagtagaatttctctagtgtgagaagaatattccaggaaaagaggaacattatgagtaaaggtatggagcgatgcaagtgccagatatgtcctgagaaagtcacagccagaggataaagttcctgagtggggcagggatagctggccatgggaccagagcaatcagctcataaattgctgccttctttaccacatctcttttttgcttgtttatttcttatttggactctataggtcacatttaatatatttttcctcctgaatatttctaatcatgtttctaatt

SEQ ID NO: 1880271 - DNA, 4001 bp, Homo sapiens; identical to SEQ ID NO: 2480

SEQ ID NO: 1880272 - DNA, 4001 bp, Homo sapiens; identical to SEQ ID NO: 2482

SEQ ID NO: 1880273 - DNA, 4001 bp, Homo sapiens; identical to SEQ ID NO: 2489

SEQ ID NO: 1880274 - DNA, 4001 bp, Homo sapiens
aacttacaaaaatacagacaattcttcatgcattagggtgcacctgttgtaaacagacatctggtctataaccataatacctttaatatattaaagctaattattaatattaatatcaaccacttggtctacattcaaatctcctaattcttgccataatatcacgggttatcaatccaggatttaataaataaacaaaattccacagcactgtcatatggacaaagagcagtcttgatccatcaggtcctgatctacagggagcaagacagactctctggttcagttcaaatcccaccatctttcctttggaagtccagaaatctgtcctctcccactgcttctctgcaggtgtagagttggattctgtgtccctgaaggtcgctatgcataggtgaaagaggagccactggggattcaggggagcctggatattggaacaggtgtgccaccacttggtgggagtagaagcacagctggatctcagacaagatggggcctgattagcaggtgcaaaccatagacctgggccagggctgaggaaagggtgactccatcggtgctacaatggctgctttgccagaagacagtaacttctctcagaaagttcctaaattattagagtgggctgtagtgtaaagcaaacaaatcacacatacaatggcttgagagatcaggtatttaaagcacaaaggggaatttcttgggagtggaggtggaaagatctctacactatttaattcctcctttcttaaatcagtgaccaggtccaaactaatggctccccggtcactctggaggtcagctgaacttcagtcctacaaggcataataaatcaggaaggaccatcaagactattgttgtgaagcctgtaaataatgttcatcacttctatccacattatcctatacaactctgttttacatggtcccaaccacaacactggaatgcccagaaatgtagacaaagtctgtgtcctagataaaagggaatgctttttgaagaataatatctgatgtctttcctctgtgacttctctactgtctgctaagctgtgacttcaagcaaaaggttttttccacatttattacacagggttttctctatgtgagttctctgtgtccagtgatgactgaccttaggcaaaatattttcctacattcattactttcataggttttactaccctatgtgagatctctgatgttggctgagccttgacttccagccaaaggattttccacactcattacattcatagggattttccccagtgtgaattctttcatgtttagtgaggtctgacttctggtggaagcttttactacatacattacatccataggttttctgccctctgtgaatactctgatgcgacctaaggcttgacttccagccaaagggttttccacattgattacattcatagggtttttcccccgtgtgatttctctgatggctagtgaggattcctttctcataggttttcccacattcgttacattcatagggtttcttgcctatatgaaaaccctgatgcaccctgaggtatgacttgtgatgaaacttttttccacattcattatgttcatagggttttttcccctatgtgagttctttgatgtacattgagatttgccttctcatagaaagttttcctacattctttacattcatacggttgttcacctgtgtgagttctttgacatactgggagggctgacttccggcagaatgttttcctacattatttacattcaaatggcttcttacctgtgtgagttctttgatggatagtgagggttgacttatggtagaaggtcaacccacatccattacattcatagggtttttcccctgtgtgagttctctgatgcaccctgagtgctgactgctgccaaaatgtttttagcaaaataggattttccctctgtgtggattctctgataaacgcttagatttgatttctgacagaaggatttctcacatatggcacatggatagggtttctcttctgtatgtgttctctgatgttttgtaacacatgattggctaatgaaggctttctcatattcactatatttataaggtttctttcctgagtgtattttcttatgttcagtgactttatgcttcttactgaatattttcccacatacatgacgttcaaaagttttcctccctacctgagttagctcttgagcaatagtagctgactcattacaggctttcccacatttattagatttacaagaggtctttcccatagaagcactcttatgtgttaatatagcctccacgttgaaggcattcctccgtccactatattcaaaacactgtagtccaatttgaatcttgtgatcctaagatgctcatgacctctaagaaatgttccatttaaatcataagcatcagatctcactcaagcttccatctcatcaggatcaccagaaagaagtatgttctgaaatacattaaactcctcagatctctttcctgaatagtttccattatttctaatcagttctggtacatggtttgaagtcaaactacatgtttttcctgattccactcccttctcaattgatggtttacttttggtaattacaacttgccacaaatgtctactgtgactttcttggctcctctcaattatgtcatcaactatctggacagctgaagtaagaaaaaaaatcatatgtatgaaccacacataagtatttcctatgagatgctcatgtaaaggtaaataactttctttcttcctttttttttttttttttttgagatggcatctcgctctgttgcccagactggagtgcaatggtgtgatctcggctcactacaacctctgcctcctgggttcaagtgattctcctgcctcagcctcccaagtagctgggactacagacacccactaccatgcccatctaatttttatatttttaatagagacggggtttcaccatgttggccaggatggtgtcaatctcttgaccttgtgatccgcctgcctcggcctcccaaagtgctgggattacaggcatgagccaccgcacccagctaaggtaaataactttctatcctagtgccataagatttcataaaaatcaatgggtactctttttataagtatgtggattctttttctattgagttaattacactaatagattatctaatgctaaattgtttttcttgctttttttttttttaaaaaagagagaaacagacagagtcttgctgtgttgctcagactggagtgcagtggtgagatcatagttcactacaacctcaatctcctgggctcaagcaatcctcacaccttagcctcccaagtagatgggcctacaggcgtacaccacgacacttggtttttggtgttggatttttttgtagagatggggtcttgctatcttactaggctgatctcaaacccctggcctctaatgatatttctgactccatcccccaaagtactgggactacagtcatgagccactgatcctggccttttaaattcatgtagaaatatttagtaaaaaattcacttagtgtcttgtatttttcaactaagtgctcttgacctgccatttgcattacctattcattttacctattttcttcttataacactggacctctcatgctggtatttttctcattcttctgctttaaagatgagaaggttttcctagatcggctacttgtaggagcaggagagggttatttgcctctcaactaagcaggtaaaatgtgatacccagaaatcccttgttctcctcccaacttcaggaccaccccctttgcatacccctatactgggtcctcctcactttcatgatttctgatgctgtatacacaattctaactgctggacttctcagattcttatcaattccctaggtgacctcattcataagtgtggctttaaataccaactttcacctcctgagactcaaatttgtatctccaatagtgatgtccactctctaaaatta

SEQ ID NO: 1880275 - DNA, 4001 bp, Homo sapiens
ccacttttgccatagctgacctttttgttgggtggtggggaggggagcgggcaggattaggcgaggggtagtagttgggatttcttggtcttggaattcaaccatccgatgtatttgtttccctgtgtctattcccttaagtctacaggcactgtctagtaattttatagttttcagcggcaccccaggggacaggacaccttggcctttttataatcactctagagtcacaaagcagaaaggaaaaaagttaacgatcagctatgcaaaggcttgtgtggattgcttaaggacaggcgattttcactttaccagagttactaaaggacttcaggagaaggatcccgtccctgtaggagcgtttgtggttgaagaagcaggaggacgagcgctcaggtgcgcctcggcagtttgcctggggtccgcaagtccagtgctacttattagctgcttgccgtccaccgacactttagcggagaactggaggagaccccagtgggctcccggtccggccaggagcagggcgtttcagaggagaccgtctggggcttcccaacccaggcgatcaggataggcaacagccaagagaggcgctcagttgctttgcaccctcctcccacctcggttctgtccacacccacgggcgccccgccccctcggccttataaaggggactcggcacctccgcgcgcctcgccaccagaggtttcccagagaggaaggcgtggctccctcccgggccagtgagccctggcgccgccgcggccgcggtcccagcagcggagtagggcggcggctgcgccccgcaccatggggggcagcccagccccagccgcggtaaacgccgacctccgccgccgcccgcgccgcgtctgccccctcccgctgcggctctctggacgccatcccctcctcacctcgaagccaacatgaaggagacccggggctacggaggggatgcccccttctgcacccgcctcaaccactcctacacaggcatgtgggcgcccgagcgttccgccgaggcgcggggcaacctcacgcgccctccagggtctggcgaggattgcggatcggtgtccgtggccttcccgatcaccatgctgctcactggtttcgtgggcaacgcactggccatgctgctcgtgtcgcgcagctaccggcgccgggagagcaagcgcaagaagtccttcctgctgtgcatcggctggctggcgctcaccgacctggtcgggcagcttctcaccaccccggtcgtcatcgtcgtgtacctgtccaagcagcgttgggagcacatcgacccgtcggggcggctctgcacctttttcgggctgaccatgactgttttcgggctctcctcgttgttcatcgccagcgccatggccgtcgagcgggcgctggccatcagggcgccgcactggtatgcgagccacatgaagacgcgtgccacccgcgctgtgctgctcggcgtgtggctggccgtgctcgccttcgccctgctgccggtgctgggcgtgggccagtacaccgtccagtggcccgggacgtggtgcttcatcagcaccgggcgagggggcaacgggactagctcttcgcataactggggcaaccttttcttcgcctctgcctttgccttcctggggctcttggcgctgacagtcaccttttcctgcaacctggccaccattaaggccctggtgtcccgctgccgggccaaggccacggcatctcagtccagtgcccagtggggccgcatcacgaccgagacggccattcagcttatggggatcatgtgcgtgctgtcggtctgctggtctccgctcctggtaggtagttccagggttgggggaagtcaggatgcgtgtgcgagtaagcgggaacctaagactttgctaagtggcagcacccgcaggggtgtgtttgcaaccgcagagcgctgaagtgtcctttcctcctgcccgcgcggtcttggttacagcttcagagctgagctcctcacttactagctgagcgccttccaagagccaggattcgcattaggcactgtttatgagcacatagagatcacagggctgctcacattctagtcgggtaggagacaggatgtgtcattgaaatgacatatatgcagagctagaagtttgtcctgagtgcattaaaagcagaattgctatgataactgtagcctgatattgtggggtttttttttttttttttttttgagacggagtctcgctctgtcacccaggctggagtacagtggcgcagcctcggctcactgcaagctccgcctcccgggttcacgccattctcctgcctcagcctctccgagtagctgggactacaggcgcccgccaccacgcccggctaattttttttttttatttttagtagagacggggtttcaccgtggtctcgatctcctgacctcgtgatccacccgcctcggcctcccaaagtgctgggattacaagcgtgagccaccgcgcccggccgggttttttttttttaatttcaaattcctctttcacgttaataagattttcagtctgcaaccccatacagtcacagccctcctgcagcttctgaaagactgcgcgacctatgggtgccttcaaggttcattcttgatgaggcaggagaatgaaagatacgagttgcctcctcagcctttcgccatggtgcttgaccctctaggaagtgcccgaacgacagtcagtgggatccggaagctcagcagcttcttcaggccagcatttacttacccttgtagcactcaagcagggttcgctaatcctgagataggaggtagaggtttctccatgtcctagctcctcacaccagagcaatgcagaggagcaagggatgtttgcagaggctctttgcctaacacctgcccttacgtgatatttttgaggtttttttgtctgtgttacttttagctagaaatgtccgtgtgtaagtgctgtttactaattcctgaagaatggatgcttacttaggccctggggtgtctgggttaatagatgttgcagaaagagcgatatggtcactgttacaaaggtataaccaactatatgtattatacagttgtggaaaacctttgaaacacgtgaacgcagttttttttctttcctaattatggtaaaatatattacatacaattcagtattttaaccattattatgtgtacagttcagtggcattaggcattaagtacgttgagttttttgtgcgccatgtatacttttaaatcccttgcatttgaaaatagaaatgtaatttctttaacctggtttggtagattggagcacaaaccttggctccaaatcagtgacatgaggggacaaggagtgttatgctgagacctaactgcccacaagtcgctgtatggtcacagttctttattccaggagttggaactcaggctgatgtcatcactatggcttatcaaaaccagcaccagttttagatatacagtatttacttttatggctgaggaatggagtgtacaggtggccaactaggaaggaagaaagagttctaaatagtaaacactttactaaagtgtggtaattaatataactttaaaggcaaacagggtatcagtttttcacaagtgtcatttgagtcccacatctttgagtttgctgtatcacatgatttatatcctagggaaaaaaaatgcagttaaatcaattgaacaaaatacccatacagttaatcagacttataatttattgtttgtgcattttgtttttaagtcaaagcgaagccatgtagtgtgtttttgatttagacactttaattctagtaccaaaagtatggtggcctcagaaagaaagtagatcaatcttgaaaactgtaatttaggatggccaaactcactctttcaagaaagactgcatttgaaactagtcttacttaatttcaatttattttcatttggataatacttattgatttatagcattttactgggtactttattaattcaatta

SEQ ID NO: 1880276 - DNA, 4001 bp, Homo sapiens
atgccaggctgctaaaactccaagaggaacctcatatttctggtgagaggaccttgcgagacaaaaggagaagaatgtaagaggagagagctagagaagaggatcccctaattctatgtatgaacctatacaagttctgtgttcacacctaaactgaacacgtgcagaacaaacacaaaatagcatagcaaaactgaatttcaatttaaactactgctaacatccccaaataatccctgagtattgtaggtataggacacagcaaagcctttgaaaacccagctgacatggaaccagtactcatagaagatgagaccgaacttttgacctgaaccaaattggatcgattgccttctaaaacaaaaaaaaatcaacattccctaaaggcttttaacaggactcagtctatgcaacataatgttcaaaatgtcctagataaaatccacaattacacagtataaaagaactggaaaaatgtgaccaacttgcaagggaaaatataatcaacacctgctaactcctagatgaccaaaatgttataatacagattttaaagcaacaatcataactagagagtagttgaacaatttctctcctaaacataatcatacttgcataaagacatttcagtcaatgatgaaccacatatacaaaggtggtcccataagattacaataccatatttttactgtacctttatatttagatacacaaataccactgcgttacaactgcctacagtatttagtacaataagatgtactaaatgcaggtttgtagtctaggagcaataggctataccatatagcctaggtgtgtagtaggctatacctgctaggcctgtgtaagcacattctatgatgttcacacaacagcacaattgccgaaagtggcatttctcagaacatatccctatcattaagtgaggcatgactgtatatgctgtattctaaaaaaaattaatgcatttatataccagaatctatgcataagaatgctcatactggtgttgtttgtaataccaagcctgagaaacagaaggaataaactgtcacaaaaccacaaaacggaatagtatcagtatacatcagtgcaaataaaagaattacacctatacacttctacatgcaactacctaggattaatttagaagcataatgaacaaaaaaagagtacagaatcaactatgcttacacagctcataaaattaaacatacatgtatgttaggttttgaagggaaggcaaggattaaagaaagagagggtggcttaacaacaaatacaggatttatgtccagcataagacctacagaggtgggagaccagcttaatgccagtgcccgttgcttcttacaggctggggtgatttataggcctgggtgggagtggtctggggggccatggcctgcttcctgggaacatgttgataaggtgttcccaggacgaggcggctctggcccttgttccagtggaatgtggtactttctcccagcagagtataagaggcagcctgtttctcacgcccgaaccccgtggaatgtttcactttgactaaggtctgcaaaatggcaggggggcttacaaaaatggtgcagtttggactaacaacgtacataaatttttaaaaagcaaaagaataaatcccaaatatgggaaagtgttatctgtggaagaaagtaatgggatggtatcagaaaagacactggtaatttaaacagtgttgacaatgtctcagttttaaaattaccagctggttcccatgtataagttgcttacttatctgttacacctatttatgtatatataaaaataggtttccaaacgacatcccatgtgtatgaaataacagaatttttatgccttattaaaataatttctctaaacacttgaagagcccgagccgcctcttaccctaaacgaaccccacgcccctgaattgatcagtcacttccgcctccacctttccagctccacctaaggaagcggaagtactttactcttgggtcctcccacctgtagggggctctccgaggcttctagtgccacgaaggcctcctgcctgggttgtccttatggcgcctgtgagtttagttctagaaaagatatttgtattttaacttttccatctaacaaacagtagcacaggcatcttagtctggacaacaacgtacaagctgaattcctggctagttccctcattatcaaaccctgacacagtagtaggcgcgagtcaggcagtgtggggacagccccgagttgccgaaagtccccggcccgttttcctcctgtgaagacatagctgcgggtggctgtgctggtggcgttcaagatgtcgaccaagaatttccgagtcagtgacggggactggatttgccctgacaaaaagtgagttcaagaagggtcctgaattgggacggagtttgttagtggaagctttccgaggtccgtccggcattttccttttttatgattttctgtgccttaagacgggttgaggcggcgaaccgccagttccctggcgggaagaaggctcccaatctcctcacgagagaggtctttccgggagcctttgttctagatatgtcttcagcgtttcctcgacattacctccgcaaggtagcctctctttttagagtgcgagatggcctacctttttgcccccacccccctcccccgccccggccaggttttagcgataggaaacctctccagtcaggccagcttggtgttggatctcccccacgtgacttttctctgcagaactttactcttgttcacggaaaatattgctttctcgcactcgtccttttgcctcttatagttcaccttgttttgtatttttactcaaacttttcctccatactattttccccttttccggaagctctaccctcttcggtttgggaaattctgacattttctttgtggatcatttctccacaagaattgggcttttcgcctccttagagccgaaaaggagggaagaggcctgtgtttttgcctactcagcccttaagatgcctgcagcagagaagcacgtgtgttagtggctctgctttttgacattgttgccaaagccagtactcgactagatagttaatcagattttttttgaagggtgcacaaataggtgtatctattcggaaataacatggaaaataatttaatgtacaactcatgttcacataaaagccttttatttgttgtacctaagttagccacaaataggttttgattgtaaaaagcaaaaactttgaaataaacctgggtttagttaaaattctattacttatttaactgctaaaaaaggaatagaattttttttttaatgaaaacatgaaataacatggatagggtgtgtaaacagtgacgtgtagcaaattctaattggtggctattgatagtaatttgatattaagatgacctgaaggagtagttcaagcctaacaaatgatactgaatagaaccaaagttatatgttatggatagtattgctctgagtggtaagacattattgaaaacgttcaaaagatttagaacaacaacttctgactttgttgttacctgtaaaataatgtgcttttgtcagtgtctttaatgacagcacacccagaggtaggactctcaatgagagttcatttcaactcatttacaaatatatgaatagaatgttgtttgtacaatatgtttaaatgcaggataaattttcagagtatattttccatgcttaatggagttaaaaggaatatttttaggggaaaaacttaacctaaatattatttagagtgtttcactttagtgtcatcccatacttcacatctgtattgtattctagtataatgccttaaaaatcagctttttaaagtttaagcattccatgttatccagagcatttaacatacttttaccaatatacacgtacacttctaaggtcatgtgagtgaaccagtaattctttaggtttgagtttgttgagtataagcataaagtcttactgtact

SEQ ID NO: 1880277 - DNA, 4001 bp, Homo sapiens; identical to SEQ ID NO: 2502

SEQ ID NO: 1880278 - DNA, 4001 bp, Homo sapiens; identical to SEQ ID NO: 2514

SEQ ID NO: 1880279 - DNA, 4001 bp, Homo sapiens; identical to SEQ ID NO: 2520

SEQ ID NO: 1880280 - DNA, 4001 bp, Homo sapiens
ggaagtttccttcatcctctatttgctgaataaagtttttgtaacattggtattatttcctcccttaatagtttgatagaattcaccagtgaagtatattttttctctacaggaagatttgaaattactgatgcaatttctttacttgatattggtatttgttttttttctttttccttgagtcagttttggtaatttgtgtctttctaggaattgttctattttatcgaagttgtcaaattttttgccttaaagttattatgctattttcttaacatccttttaagggtagggtctgtgtgatatttctctttgattcttgatcttgggaattagtgtcttctttcttttttcttggtcaatttaactaaatattatttatcttcttgactttctgaaataagcaattttgggtttctttggttgtttttaatgttatcctgttctgtatttatcgttttccactgtgacatttttatttcatacatcctacttacttttggcttggtttactcatctttttctagagtcttaagatggaagttttaattatgaattttagattattttttctttctgttttaaagctatacattttcctctatacactgctttaattgcatcctgtaaatattgctatgttattggttttttgtattttgtttataacattttatttataaaaataggctgggggaaaaggatttataccactgcattctttcctgggggagaactattttgggccatttttgaaattttttttcctcttaacaattttcagagtcacatttgaattccttcagaatggtatttgtcaacaaaaaagttcaagtgaaaagggggaggaaaactgtggaagcatgaagaaagggagtgagagaaggaggagtgggcatacaacagtcaacacataaagaaatggcttttactgaaatgactctgccctgtgcctcatgcactaggtgatgcaagcatgctgctcagacatcaacaccaaatgtcatttagaaatggtagtcttctctgggttctgaaggacacttgttccccaacatgacactattaaatggtgctttcaaggcagacactaagacattactccaaagagaaggttctggtggcagatgctgggaccatattctttatagtccttcttggtgtgacagacctgaaataactccagagttgaggctagcattaagcttccaaaccataaggcatagtgctgcatgtgatggattaccacccgaacctctgtaagcttaggtttgattctcctgccactgagctccttactgagttttaatctggcatgtaccactcttcaaatctctctgtagttgagattcaaatacctgaatatggtcaaaccccttgaaagaacaacattcttatacagtggacaatacacatcagtgggacagttttgtattcatcaacaacattcaagatggattccataaagtctgggttggcaaactctgggtaaaaaaatatttcaggttgcaggaaccttttgtaaccaacgtttattatgaacttctcctggttgatcacattgatacctgtgtactgtttcatccacttccagggatccacatcatacttagcaaattctttgactatatcagggcaaatgtaacagtatttctccttaatgacttttgtggtctccagtgactgctcaagagggattcctacctccctctcccttagcagttgttgaatgaaatacacagtatcacctacaatcaggatgtgattgatgcagctcccaattacataaccttctacaactgggagaacaagggtgactccatctcctttgtcaatgactatactcattaacatatattcacccacttgttgagatgtccaagatacttccaaggctagtacctcctgaactgcaatgtagaatcctggtacattaaataattcaaacataatttctgcaaaaatgttctgtattttctagtgtattcagtggaagttctgtcattaaaaaataatggtcctcagattctgctcaaagatatttaaaaaccacttgctccatgaacctttccataatatcccagtcttcagtgattccatgtcatattgaccactttgtagcatacatagatttatcaatggcttcatcctgtatgaaaaagtcaagctcatcaactcccctcaacattctcccttgggctttgtcaactacctttgctgactctctgatagaaatgcatgaaagaatagtaaactatggctcagtgttgcctgcacagccaagctcggaatatctgctgaggtgatcacagggctgagacccagagcagtgggtgcagctcaatctccaggtatgggctggatgtcaggggctgagagcaaggcaatggaggagccagggcgggcactgagtggcccttacctgatgccacagtctgccacacaggaaggcaggaaccccgccatgcttggaatacacaacacttagccctactggccaccgtggagcaccctgccaccatccacttggcaacccactcaccccatacaccctgtctcctgtgtgtttccacttttattcattttaagatatattgtagatgggtgcagcaaaccacatggcacgtgtatacctatgtaacaaacttgcacgttctgcatatgtaacccagaacttaaagtacaataaattttaaaaaaggaatattttaaaggatcaacctactatttgacagtcatggaaatagtgaatgggaattaaagggaaaaaaataagtaagcaaaggaagggaggaggaaagggaaaaagaaaggaaagaaaaggaaaagggaaatacaagaaaaggagacaaataaataaataaataaacaaataagtgactgaaagtctgagagttggcaaatactattcagacaacactgacaaaataggcctcttgctaaaaatagcagaatgcacaaagtacaggagcagcctgtctgtcctgagaggctgaggaggtttaggaaaagaggctggggagatttgagacaggtctgacatatgtagtcagtttttgcttggtggaaaaagtaatcacgggtgattcagaaaaaggaagatacttacataataattgttttgtacctttttttagtattctattactttcataaaattatctttgcatcaaaagttattaacactttcaggactccttgtatgcaaaattctttgaattgcatttcttaatttgtgattgcactgttaatttatctagcacaatgaactgaatgtgtgtctttatgtttaaagggaaaaataaaattcaaaacagcatatttgatataatttatgattagataatagagaaatatcaattttaatataatttttagaaagtaaagcttaggccagtcacgatggctcatgcctgtaatcccagcactttgggaggctgaggcgggtgtatcacctgaggtcaggagttcaagaccagcctgaccaacatggagaaaccctgtctctactaaaaataccaaattagccggcactaatgattcatgagaaatctgcccccatgatccattcacctcccagcaggacctatctccaactttggggattacaattcaacatgagatttgggcagggacacatatccaaactatatcaacagagtttcattgtgttgctcgggctagtctcaaactcctagcctcaagcaatacttctgtctcagcctcccaagtacctttggggattataataatcaatcatcttcactttttacaatctactttggtttaataagttttacttaattccagtgttatatagcaactttgatccaatgtatctcttatatgctatgagctcagcagtattgttatagttattgcctataataatcagatgattttttaaaaaaagagatgaaatcagaatacacacacacacacatacacacatacaatcttttgtacttacaaatttatttaccatttcccatgccgtttat

SEQ ID NO: 1880281 - DNA, 4001 bp, Homo sapiens; identical to SEQ ID NO: 2539

SEQ ID NO: 1880282 - DNA, 4001 bp, Homo sapiens
gaacacccttacattccttcaataagtctaacttggtcatggttttctccttttaatatgctattggattcagtttgctcgtattttgttgaggatttttgcatcaatattcataagggatgttgatctgtagtcttcttgtggtcttttggtctggctgtgccatcagaatgatgctggcctcatataatcaattaaaaagtgttcccttcttttctattctttcgaacagtttgaaaggattggtgttaccttcatttagtgatctgagagaaaaaaaaggactggtgttaattctttaaatgtttggtagcattcacatggaagtcttctgatcctggacttctttctgttgagaggtttttgtttgtttgttcgtttgttgagacggagtctcgctctgtcgcccacggtggagtgcagtggcacgatctcggctcactgcaacctccgcctcctgggttcaagggattctcctgcctcagcctcccaagtagctaggattacaggcatgcgccaccacgtccggctaattttttatttttagtagagaaggggtttccatgttgtccaggctggtgtcgaactcctgaactcaggtgattcacccgcctcggcttcccgaaatgctgggattacaggcgtgagccaccgcgtgtggccttttctttgagacagagtctctctctgtctcccaggctgttgtgcagtggcgcactctaggctcactgcaatccgcctcccaagttcaagcgattctcctgcctcaggctcccgagttgctggggattaccggagtggtaggagctcactaccactcccggctgcttttttttttttttttttttttgagacggagtttcgctcttgttgcctaggctggagtggcgcgatctcggtttactgcaacctccgcctctcgagttcaagcgattctcccacctcagcctccggagtagctgggattacaggcgcgcgccaccatcctctgctaattatttttgtatgttagtagagacaggtttcaccatgttggccaggctggtctgcaactcttgaactccggggatccgcccacctcggccttccaaagtgctgggattacaggtgtgagccaccacgcctggccatgaatgtgattttttgatattgaataataaaagctatgcagatcttctatattcttctatctaaatgttgacacaactttatatctagaaacttcggatttaaagctcagcccgagagaacccatcaaatgttggagctgcaaggggctagaaagcatcaccagacctggattcgcgggcgatgttggctcaaggtagcacaggacgttggcccagagctggaaattgaggccaggtcttccggcacacccaccccacaggacgaccaagcagggcttcacagaggagttgggggttaggtttatttctgttgttaaaaacccggtgaacaaaaggttgtggaaaaaacacatgcaaaagacaggcgaaggtgtgagctggatagggacaaagatgggggaacccgtggggtcactccttgaccccacccgggacacctagacatccacagtgtcgggggaggggccccagaccaggcagaagacccttccccggccctggggaacccaagatttccgagagtaagcggacctgtgcaaagacccacaagggaggccagtggcctgtgctgggcactgtacagccgccccgaccccgacctcacgtgggcctcggaggctgcagggacctacccggccgcgcgccgcccaccatcccaggtctaccgcaggggaatcccccaggcttgcgagcgcttccgagggcaggaaagcctgtactgcagccccgccgccctctcctggcgcgtagccctctccccgagccctcgggccacgccgccaggcccgcgatcccagggcggcccggggggttcggcacagcccgataatgcgccgcgccgaagcctgcagcaccccgcggtcgccgtctctcttgcactggtcaggacgaatagagcctgacaaaacctgagttaattggccgagcgaatgtcgttcgcgtcaggagagcacgtccggagaagccaagggaaatgtggagcaggagcagccaaagtggcccatcggctctcgagcagggtttgcgcgtcgcggtcgcaaagcccctgtgagtgcaggtaccgcggcacaagcgctgccccggagctccaggaggcggcggcgggctcggcgttcgcggtccaggagaaaccaccgcggggtgttgggaacattttgttaaaaagccgggaagctcagggccggtgtggcctccgttctggcctgagaacccggactttgggcagcttcttttccttgcctttgggtctccggctttctcagctctgtgaggtcccatgggtctcctgccctggcaggttccttcagctggagaaagcgggggtcatggctggatgaggttgcggtaagcattagagggctatcagcagcatcttatcgcagcggagccttcgatagctcagttggtagagcggaggactgtagtggatagggcgtggcaatccttaggtcgctggttcgattccggctcgaaggacttcgtctgtaatttttaacctcaatttaattcaattatcccataaggggaaaggcttggaggcctcctgtgacttagcattcgtactgccgtcagtccatagggaacaccgtagtatgtagtatacggtaacgctctttctgcgttcaatgtacatgtggtaacgtgttttagaatgttttctgcttaagcacacgattatatgcttgatttttagaatcttgcacatggatgccactgtattgtactctgctaaataaatgtcctgaactgtggttgatccactggtcagtgaacagtgcagtgaacctgtaaggcaaagggaaagaactaagcagcaggcgggggattagctcaaatggtagagcgctcgcttagcatgcgagaggtagcgggatcgatgcccgcatcctccactcagcttttgcgtccgtcacactacagaacacaaaacgggagggattcccggcgcagtgggctacgtgtttcattttagagacacaagactgttaagcgataaggagtttcacacgatgtctttttatttcgcagttgagtcccagtttctgccgctttatctttcccgcctcccggcaggcaggccgttaaccgtcttccggaagacgctgctagaaccctccggccgctcctgcccgccatcgtccccgaacgacactcgctcaggtacccactaacgtgcgaggaaccctgagagctgaccaatggtagcgagctttactgggcgggtcgccagctgcagccacggccaataggcgagagacttcttgtttcctggcagagcggggtcccggcaccgcggcgctcgggtgtttttgggggcccgggtggagggcccgggtgccggggcccaaggtgcggcctcgctagcgggagagggagcgggatcaccggcccggagagaggtgaggggctctgcgcggactacgggccccgccagccccggccccgccagccccggccccgcccccttctctcagccccttgagcccgagcccctcgaaggccaccccgcaccccgctcccgacctggcttacgcggtcccgaccccgcccagctccgtggcctcacctctgactcctaggccctccctgcctaatcccctgccgcgggagcccgtctcgaccccttccatgcctcccagtcccaccctgcccagggcaagcccgctcggtgtgacggttccccgcgagtcgagggtggagaagccagcctccttcccccgagtgggactctagcagcccacctcttttaggggtgctgagaacacccattactcatccacagctactagggtagctttctcagggtgcagtgcttacggggcggagggggatggaaacagacccatgccctggctggaagggagctccagt

SEQ ID NO: 1880283 - DNA, 4001 bp, Homo sapiens
aaccactttattccacgtccattcaagaacaaagcgcaaattagtggcagaatttggttgttcttctgttatccatcttcggatataaccagtcaaaagtcccagggaactagtctgaattgctgttgacaatatagcttctaactgttcttcttggcttaaactggaaggctgaacatcaacaaaacttggggaaagaaggccagctacaagacgtcgattataaccaccaggaatgagttcattgagtgatggacctgatttctttaaaaaagtcaaagtctccttctgaaagccagtacaagttaaatgaacaactcccgagtttaacaaacaagtggcatcaaaattataagtgcttgggttaaaaaactgctcgggaggtggatatgaaggagggactcctctatttaaacttctctcatgtactaatatatccaagatgccatgtggagaagtcctacttacaacagactccaatgaccacagtgcaaaataagagcaattatgtagatattctcctgaccttaacgaatctggcatttgtgcatgataccaacgatttatatcaaaaagccccaaatatacagaaggctttccctgtccatatatattcacctgccaggtaaagactgaaacactagtgtcaggcgatagagcttcattcacgccttcctccctgtcaccatgagatcgaaatttctctatactctggcatcccaacaatttggtattactcgtctgtcccctcaaagggaacatgccacctgtcaggtccagagtgtatctttcttcacagtattctaaccactcatataagatttgtcctgatgccaaacactttctattaccaaaggccagctgcagtagatgcaaactcaaaacatccccttcactatcttgtgtagactgaacagcccacaagtagcagcaattccgacgatcattctcaggttcttgaaaagtgacagcatatacaggaacttgtccactttccaattgtatgtaatattctcttttcatgcttttcatgttccaaagtgctagatagccatcagaaaaacctgcagcaagctgatttgtcctgcttatgtaactaagagttgaaacggctgttcctgttggacttactaactggaaacacagatggcgcccttctctcatcacactttctctaatgtgtggtacttcagctgggataccagttagaacttcaagatctgatgcttcaacttcattttgattgcatgacaagtcatccaaacataggtcaataagaaggatctgtccaacatcagtgaccacagctgccactccaaaaagccatcgcagacttggatgtaaatgctgagtgcttgcactggctcctccatgattaattataggttcaatagctgttacccttccaggaagaacaactgctttaactacttttgatattccaaggtcataaagacagagaacactcccttctgtttcttccaatcctattaataatccagttctcttctgccaagagaattctttcacagctaaaactacaggaggctgttcattgactccactgaatctgtaagcagacaatcgctctcctgttatagagtttactacctcaagttgtggaccacaagccaagcaagcaagtccatttttccccgcagcaaactttccacgaagcacagattctaatgttatttcgtcttctccaagggcttgaagagtcacttctggaaatggcaggagaccactagtcacttgagctcttaagtctcgcatacttccacagcgccgttccgccgccatgtgccaccgctcctccggtccgagattatgtaacgaagcccggcgcccgcgagcctgccgtacccgccaccgccagcgctcgccccctcgagccccatccgttggccccgcgcacgcccggcctaggcccggcgctcgcggggcagaacccccgccgccgccgccgccgcgggcccaggccgcgcctccttcttttcaaagtctgaatgatatttcttttttttttttttttttttttttttgagacagagtctcgctctgtcgcccaggctggaatgcagtggcgtgatttctgctcactgcaagctccgcctcctgggttcacgccattctcctgcctcagcctccggagtagctgggactacaggcgcccgtcaccacgcccggctaattttttgtatttttagtagagacggagtttcaccacgttagccaggatggtctcaatctcctgacctcgtgatccgcccgcctcagcctcccaaagtaaggccgaatgatatttcattatatatgtgtgtatcacattttctttctttttttttttttttttgagacaccgtcttgctctgttggccaggctggagtgcagtggtatgatcttgtctctctgcaacctccacctcccaggttcaaagtgattcttcggccttagccacatgagtagctggaattagaggcatgcaccaccagggtttcatcatgttcgccaggctggtctcaaactcctggcctcaagggacccacctgcctcggcctcccaaagtgctgggattacaggcatgagccaccatgtccagcctacattttcttcatctattcagcagcaaacactttgtttccatgtcttggctattgtgaataatgttgcaatgaacatgggagtgcagttatctctttgggatagtgattttattcttttggatatatacccagaagtaggactgcttgattgtatgatagttcttttttattttttaactttgtgagaaacctccatactgttttccgtactggttgtaccagtctatatttccaccaacaatatatatgggttctttttttttctccacattctggacagcacttatcttttgactttttgatacataaatagttattctaacacttgtgaggtgatatactattgtggttttgatttgcatttctctgatgactagtgatgttaggcaccttttcatatacctattggccatttatgtcttctttgaaacaatgtctattcaagttctttgtccattgaaaatactgagttatttgttttcttgcaattgagttgtatgagttccttatatattttggatattaagcccttatcagatatgtagtttgaaaatattttctcctattatgcatgttaccttttcattttgttgattattccctttgctgtggaaaaactttttcttttgatgtagttgcactagcttatttttgctttcattaactgtgtttttggtgtgatatccaaaaactcattgccaataccaatgtcatggagcttcccaccatattttctcctagtagttttacagtttcaggtcttacagttaaatctgtaatctattttgggttgatttttgtgtatggtgtaagataaggatccaatttctttttttttgcatgtgaatacccagttttccaaacctaattaattgaacagattatccttttcccattgtttattattgctgcctctgtagaagaatatttgagtgtatatgcatgggtttatttctgggctttctattctgttccattagagtatgtgtctgtttttataccaagaccgtacatagtgttttgattactatagctttgtaatataatttgaaatcagcaagtgtgatgccttcagctttgttctttttgctcaagattgctttgactgttggagtcttttatggttctatatgaattctaggtttgtttttatattgctgtgaaaaattacattggaattttgattgaatctgtagattagattattttgggtagtatggatattttatggtattggttcttatgatcatagatatttttccttatttgtgtcttcagtttctttcatcaatgttttgcggttttcaatgtataaatctttgacttcttttgtagagttttgttctcagtattttattctttgtaatgctgttgtaaatgagatggctttctta

SEQ ID NO: 1880284 - DNA, 4001 bp, Homo sapiens
aaaaaacagaagaaacaccctatactaaaaaaaaaatcatttaaaacatgacaaacactgaagtaatttataacaggtttttcatcaacattaatatctacagggacattcaaaagctgtatgtgacaagggacaactcttcattgtgtggaactgtcttgtacattatagaaatagtaacatacctgacacctatctactgcattccagaaacaatccccaattacagtgatgacccaagaaaaatcacataattttccaaaatatctctttgggaggcatttactacccgtcaagaaccactgccttccacaatctagtcttctccctttcactctcactctccaaacacactggcctcctccctttcctttaacactccctttcctttcacacactttacctcagcaactgtgtgcatgctatttctgtctggaatgctcttgtcactgttaactgccttactttctcaccttactcagatatttaattcaatacctctttctcaggttctgtgttgaccattctgctttgtctccctggctcttatcccaccatctgacatttattttacttgtttggttgttattcatatactcttccttaatgtaagctcatgatgaagaaatgtttgtctattttgttcagtggtgtgtcctcaggctatagatgaggatggcgcatatcaggcattcaatatgtatttttggaatgaatgaataaatgtccaacagtagggtagtgaataaattgttatgttcatacaatgggatattacatacctgtgaaattatgcttttagagaagttttaaagggaaatcctaatatatttaagttaaaaaaataaaaggtccaaaaccgtacacagtgtggccaatatgggttccctaaggacaaggcatatctagacaaacactatttcgcaactactcagttaatagactgaaaaaagtcaatcataagatggtgaaacacaagatggttgaatgacagtatagtgaagtactcaaaataggtgtgagagtaatcttattcaaaagttttagaccttttttttttttttttttttgagacaaagtctccctctgtcgcctaggctggagtgcactggcacaatcttcggctcactacaatctccacctcccaggttcaagcaattctcctgcctcagcttcccgagtagctaggattacaggcatgcaccatgacacccaggtaatttttgtatttttagtagagacggggtttcaccacgtcggccaggctggtctcgaactcctgacctcaagtgatccacccaccttggcttcccaaagtgctaggattacaggcatgagccaccgcgcccagccaaaagttttagactttttatccatagcccttagtaaacatttttattgctaatttggataaaaatacttatcaaatatataaatggcacaaagctgaaagggatattttaataaaataaatgatcaaatttgattaaaaatcattccaataggcttgaacactgatataaaagcaataaaaagaaatacaggagagttaaaaagtattacatagggcgaggcgtaatggcctgtaatcccagcattttgggaggccgaggcaggcggatcacttgaggtcaggagttcaagaccagcctggccaacatagtgaaaccccatctctactaaaaatacaaagatcagctggatgtggtgtcatgcgccactcacacagctgtaatcccagctacccgggaggctgaggcaggagaatcacttgaacctgggatgtagaagttgcagtgagccaagatcatgccactgcagtccagcctgggcaataaagtgagactctgtctcaaaaataagaagatttttaaaaaagtattatatagatacaagaaatgagaataggaatcttggcagcagttcatggtttttgtttggtttgttttgctttgcttttttcctacagctttaagttttgaaagcagtacatggttttttttaatgcccaattatgctgtgaccattaaagatctcacagtacattgacagaaagagaattactgaatatacttcatgctggtcagatcagaagtgaaattgtgtttcatctaattcaggacaccttattttaagaaaaacacagacaaaccagagtctacccaaaggaaggcaacttgcttgctgagggatctggaaatatgaacgcaagaaaataatttttaaaaatagggaaacacagatcactgagaaaactatgtaattttaaacaaatgatgctaggatagtgctcactttggcagcatatatacaaatggtgctaagacaaccaattgcccattttattattcttattattttgtcaattttgtttttcacaagcatatacgtaaaacctaaaatccaatctaatttgtacttttcaaacttttccaaaattgagataatccaaataaactatatcactggagaatagttttctaagaaactttgtatgaatcaggccatgaaatccttgcatgatagctatatcaattctttcaggattaataatagtaataatagctgccagttactgagtactaactagacatcacacgttctactaagcattttataggcattatctcacataatccacaccaaaaccctctacgataggcattattataccctattactatgcaaaatagcagacaaaatgccttatccacaggagaaagaataaattatcatgtaatcacacactggaatactgtacagtaataaggaacaaatgaaaactctgcacatctacatagaagcagctcaaaaccctaacactgtgtgaaacacctagttctcaaaagaatatgtatcatattgattccatcttagagttcaaaaccatactgaagagaaggaaaatcattatatatcaaaataagaaataaaaaagatatgactgggaaaggagaaacaaagaacttcaacagtatttggtaatgttctatttctcaagctcgatagtaaatatatgggaattatttttacttgctgctattctttacataaatgattcatatatgctcttttctacatatgaaatagttaatagaaggaaaatatgtactattaaaatgaaagccatttatacataagctattatagctgtgtactcaagtatttaaaataaacatttgaaaatagctggatttcaagataccactttcaagagaaaataagggtgacatttagtcttctctgttcttaaaaaaaaaattgataaaacaagcaaatcagttcttatttttctaagaagataaatttttcaaaatatgaatttggaatcaataaaaacaacatatctagactgtaagaatctaatacttatatcttaacttttgaaaaattaagatgcctgcctaggcacagtggctcatgcctgtaatcccagcattttgggaggccaaggcaagaggatcgcttgaatccaagcgttcaagaccagcctgggcaacgtagagaccctgtctctgccaaaaatttaaaaattagccgagcagggcggtacacacatgtggtcccagctacctgagaggctgaggtgggaggattccttgagtctaagagttcagggctgcagtgacctgtgattgcactgctgcacttcagcctgggcaacagagcaagactgtctcaaaaacaaaaccaaaaaaggctttagccaaatattatcagcaactcaactgatgcccaagtaagagatcctaattccatcacccattctttcatatttactttcttcatttccagatttcttttataccttggacaagtcagttgttcttccatgaccaaataactctgccttgatctcttctactttcctcctgtcatcttcatttaattctgaaatggagtatccacaatcatgtgctaaattgaacttcatattccaggctggagagaaagcatacacttgagataatacaatgcaaaagtgataatttgtcaacaat

SEQ ID NO: 1880285 - DNA, 4001 bp, Homo sapiens
agaaaaaagagtaaaaagaaacaaacaaagcctccaagaaatatgagactatgtgaaaagaccaaatctacatctaatttgtgtacctgaaagtgatgaggagaatggaaccaagttggaaaatactctgcaggatattatccaggagaacttccccaacctagcaaggcaggccaacattcaaattcaggaaatacagagaacgccacaaagatactcctcgagaagagcaactccaagacacataattgtcagattcaccaaagttgaaatgaaggacaaaatgttaagggcagccagagagaaaggtcgggttacccacaaagggaagcccatcagactaacagctgatctcttggcagaaactccaatccagaagagagtgggggccagtattcaacattcttaaagaaaagaattttcaacccagaatttcatatccagccaaactaagcttcgtaagtgaaggagaaataaaattctttacagacaagcaaatgctgagagattttgtcaccaccatgcctgccctacaagagctcctgaaggaagcactaaacctggaagggaacaaccggtaccagccactgcaaaaacatgccaaattgtaaagaccgtcgatgctaggaagaaacttcatcaactaatgagcaaaataaccagctaacatcataatgacaggatcaaattcacacataacaatattaaccttaaatgtaaatgggctgaatgctccaattaaaagacacagactggcaaattggataaagagtcaagacccatcagtgtgaccatcaggagacccattacacgtgcagagacacacacaggctcaaaacaaagggatggaggaagatctaccaagcaaatggaaaacaaaaaaaggcaggggttgcaatcctagtctctgataaaacagactttaaaccaacaaagatcaaaagagacaaagaaggccattacataaaggtaaagggatcaattcaacaagaagagctcactatcctaaatacatatgcacccaatacaggagcacccagattcataaagcaagtccttagagacctacaaagagacttaaactcccaccacaataataatgggagactttaacaccccactgtcaactttagacagatcaacgagacagaaagttaacaaggctatccaggaattgaactcagctctgcaccaagcagacctaatagacatctacagaagtctccaccccaaatcaacagaatatacattcttctcagcaccacatcgcacttattccaaaattgaccacataggtggaagtaaagcactcctcagcaaatgtaaaagaacagaaattacaacaaactgtctctcagaccacattgcagtcaaactagaactcaggattaagaaactcactcaaaaccactcagctacatggaaactgaacctgctcctgaatgactactgggtacataatgaaatgaaggcagaaataaagatgttctttgaaaccaatgagaacaaagaccagaatctctgggacacatttaaagcagtgtgtagagggaaatttatagcactaaatgcccacaaaagaaactccatcatcccagcccaaaaatctcgttaagctgacaagcaaattcagcaaagtctcaggatacaaaatcaatgtgcaaaaatcacaagtacaccaataaaagacagagagccaaatcatgagtgaactcccattcacaattgcttcaaagagaataaaatacctaggaatccaactcacaagggatgtgaaggacgtcttcaaggagaactaagtcctaactgtcaagttcaccttcctaacaaagttattccggatgtgatgtctccaccatcgtcctggtcccagagccccatcaggtgtgtcctcctgggcagcagcctcgcttctgacatctggtgccttcatgccaagtccaggcacagcacataacaagccttcggccactgtttgttgaatgaataaatgaatctttcaggtccgacaaggaaagcccaggcttttatcaggaaagctacaaaaatgcagaagtcacagtaaatcctgggagcaagagacgcctgaatgtcaagtgaggtcgctgtgttttgaggaagccacagccacgggtgagcatggagggagagacagcacacagggacggagcacaaacctctccccctccacgtgaccggcaggtttctgactgaatattggttagactcacactagaagtactcagtggtgctttggagccaccgctcacctcttttgattcctaggccaactcctgcttgacactgaaatgttgcgagaacactctaaagatgagccatggacttcctgcccagacttgatgctccttagacttttcctcggaggtggtgttgggtaccaaagatctggaatctcagcagcctccactggctggccctgggttcctgctgctgactcccagcttctggtttctgctgaagaaggctgcagggcagcacctttaggggaagccttgacttttccagatctgggctctctccagtgttttcctgaatgcccctaccagaagcctggctgtcgtctctgagcccttcctcatcctcctccctgtgtgaatcattccaactcctgccatttctgccccaaatgcacctccatacggctcatgtctcaccttcttgacttcctccctctggtgaagccactgctgtctcatgggcctctgctaacccaggcggcttctttgtgaacccagagctaggcacagcctcaagccatgcagcccactggatgcagagtttagcaggcaagcaacgcctttgagcaaataagaaaaggttgccttttcctttggccagtctcagtttcgtgccatggctcatggcttggcaaccagagggaggcccagttttagctcccaccagagcctctgggccagctgctcttgtacagtgagcacctgcatccctgtactggaggccccgctcttgcctggatgtggcatgagccttgaggggtagctgcttccattcctacctcctcagatccattgtccacctgcagccagagtgatgcttgcgtgcgcacacacacacacacacacacctcctcccctccgtgcatatcaatgtcctccccttgctcttggaatagagtccaaactacctaacctagatgacgggcccagcgtggctgatcatcaataggttagctaatctttggaagggaagtttcccttcaatagcatgtaagttggtgtggaaaagggctttttctgttaggttttgcttttgcctatcttgtatatgttgcatccttgtaattgggccccttgagatttcagcaccacaccatgttttagtgactgaaataatgaacattctgatcagaccgttgctggcttgcacatgttaaccacttgcttttggtccaatattccttgttcccacaacataatgataaactgctcatgtactgtttctttgttcagcaggaagacattccttcagggtcaggaaaagtttgcagaatgaatgaatgccttgaaggacactgtgaccagctgctgacactgagaagcctggttgcacaaggtgttatctcagactgaggaaacacagacttttcctctcaatccccctgaactcccccttcctcactctctagctgcataaaaacattctgctgctgcttctttgttgaactgaagttgagagatcttgctctcctgccttcttgctttggccaaatcgaatacaactttctctatctccaagcacccatgtgtcagtgtttgggatcagctccacgtcgggtacaagagcatgaatttgggcctccccaacatctgcagtgcaaaatatttaacaacgggtgtggcacagcctctgaccaacagccagaacacacacaagccacacacagccatgcctgtcaagccgaatgtcaaccttgctcatggctgaaatgaccccaggacacaggaagtgcatgacacaca

SEQ ID NO: 1880286 - DNA, 4001 bp, Homo sapiens; identical to SEQ ID NO: 2552

SEQ ID NO: 1880287 - DNA, 4001 bp, Homo sapiens
aaaccactaatatttagaggttaatttatcacagacgcaagagtttccataactaatgcatccaggggttccctgtctatgattttagacaatacctgacaaagcagtgagtaacttttaatcatttactgagaaagttgttccttttgcaatgctgtggcgcccatgagagagtggatagaaagaggtagcttgtgttttctaaacaacaaatactttgaatacacatacaaagaagaaatacaaatggccaacaagcacatgaattgatgcttaacatcatttctcattcaggaagtacaaatccaaaccacaatgagatatcacttcacacccactaggatggaacaaaacaaaaacagaaaataacaagtgttggcgatgatgtggggaaattggaaccctttcattgttggcagaaatgtaaatggtcacagctgctatggaaatcagttggttagtccctcaaaaagttaaacatagaattattgtatgacccagcaattgcactgcctgagtacatacctgaaagaattgaaaacaggcacccaaacatatatttgtacaagaatgttcacagtagcattactcacaaaagtcaaaaagtagatatagtagcccactcaaatgtccatcattagatgaacagataaagaaaatgtggtatatacaggtacatacacaaaatattactcaacaataagaagaaatggtgctataatggggatgaacctgaaaaacattgcgctgagtcaaagaagccattcgctaaagaccacacattgtatgggagccaaggcagtatccagcgagactctggcctctggctgggctgagtgacttcttttcccccagtgcctttgaactctctgcacccaactcagccatgagcaatgctgtcaccagcaatgggcagaggggctggggcaagagtgggatggaaagaatactggatgtggagaccaaatgtgacagtgtccttgcccggctgcctgctttagatctcaggggacacgccatttcctctccgataaactctaagctcttagggtaacccatggacctgcctggctgggtctttgttgacatttacaaggagcctctcccgcagccctccaaggggtccctctcccctgcaggctgcatgcccagttctccctggacctccccaaccccctctctactaacccccgtttgaacaggaagacacagcctgagccaggtctcccctcacaaatctccccaccagggctggatcgcgcaacaaatagagccagccccagggcactcgccggcagggcgcagccggtgatcgtcacagtccttcgaaattcttaagatctaggtcttgctgcacccccacaacctacaaacagcgtcggggccttctctgcacctccagttcccagctcacctccctcagtgtcacagccggttacctttccttcctccctggcaagggagggcaagacttggggcttgctgactccaggcccagcccagcccggggcacccaggagcccctcaattgctactcaaacaagacaagaagcggcccgagttagtggccagctccaccatgcactacacatcctgacctctctgagcctctactgtcactcggggtcacaaccctttcctgagcacctcccggggcagggggcgatgacacacatgcagctgcctgggggaggccggcggtgtcccctcctttctggaaagcggagggtcctggtgggctctggaaacgcagcccagacctttgcaatgctaggaggatgagggcggagacctcgcggtccccaacaccagactcccgccgccaccgcgcccggtcccgccctccccactgcccccccagctccccgacccaggcgccccgcccggccagctcctcacccaccccagccgcgactgtctccgccgagcccccggggccaggtgtcccgggcgcgccacgatgcggccgcggctgtggctcctcttggccgcgcagctgacaggtaaggcggcggcgcgcgggctacccaagggtctgcgctcccggggcctgagcggggaggtgataagtggctgtcctggccctggtcctggcagggtgcagcgtcgagcccgcggtggcggggcgcccgggaggcagcttggcaggcacggtccctaagggtggaaataaaatacccccatatcgcattaccccgggggaccggagagcccctggactgaggccacctcccctcaaaagcctggacgcaggagaaggggaggcagtgaaaaggggagcgagtgagggaaggaaagagagggtcgctggaggtcaccaggggaaggaaacaggtccctgcccagggtccccgcaggatgtgctcggaggaaggttggccaggccatgggtcctgtggacacatttttattacttccggggaagtgtttgtagtacaatcagacaaacatcgggcgttctcagttctcggagggctagggcagggtgatccctctggctcccgttctccctgatgtcgctggtgttgggtgtcatgggtagcgtggctccctaggaagcagcctggaggttgggttgttggagttggatggggcatctggattgtccttctgaataagcccagccagactgccttttggaagaagcctccacacacccggaaaactacccaaactggtcgatttgctctcgtgcccaaaaagcccaaagctggtcatcttgccagggggtgacaaggcctgcccgccgggggttctggcccagtgagtgcaacatcataaatagaaacagcccaggccgttcagagcactaaagtcattactgatggatctagaaacatcaggtccctctgagaatggaattcctgggttaccgaggggaacatgcagtgaggcctggctccatgtccagcacacagcagggccttggccacagcccggagtattcagttcctaggggacaaaaagcaagtgggccccgggaagagccggggtgtgtctcagccaggagaggaaatgcacactcacagcccaggccttgctcttacaggagtcgcttctgggttttcccggaagggcttcgggcacctgtgtacttgcagccccactgtgtgctcgtgagcacataaccaccatcagggagaggattgcaggtttcttcaattcagtggttcaaagtcaggttttggggtcccacaagctgggttttaatctggatcactgtgtgaccttgagcacatctttaaccctcctgagtctctctttcctcatgggtaaagtaggtgcaaaacagtatctcccccacaggatttggtgaggatcaaatgagataatgtatgcgccatgccaggcacagctcaataaactggcattattggttcttattaactcccccaagaagtgagtgacccaaagcaaggaaaaacctctgctctgctggaaccgcagtgtggtgtttggggaaacaagaggaagtccagcagccacttgtgccccaggcatcatttccttcttgtttttatttttatttttattttttaataattttttcttttccaagatggagtcttgctctgtcgcccaggctggagtgcagtggcgcaatcttggctcactgcaatctccgcctcccgggttcaagcgattctcctgcctcagcctccctagtagctgggattagaggcacgcgccatcatgcctggataatttttgtattcttagtagagacaaggtctcactatgttgcccaggctggtctcgatatcctgagcccaagtgatcctcctgcctcgatctcccaaagtgctgtgattacaaacatgagccaccacacccggccccatcatttcattcttgatgcgagcgaaagctaagagtggtccaggagcgaagtcaaaaagtcgaagttcatttcatcagtgttggagaaggccattatggggccacggagcctgagctgcaagtgcaggcaggattttaaacatgaggtgctcagtaagctg

SEQ ID NO: 1880288 - DNA, 4001 bp, Homo sapiens
tcaggttacgcttgatccataaatagaatgaaagaatggataaatacagttggggagttcaatatttttaaataaactcctataaagcaatatttttgcaatagtaattatttatatgttattttatttttaaagaatacaattaaaatgaaatgatcaatccagctttgtttgcataaatggaatgagtatataagaaaaacatatgtacataataaaatatatagataataaaatctggaaacagataaaaatattccctttttacttctgaggaggctaaaagctcaaagaagataacaacacacacaataatgataaacaatagaaagtgagaaattattttcatcagcacaagattcatattcctctcttcccaaggattattccattaataataaacttttactagaagttttgtacatgctcactgcagcaatcacagataagaaaaaggaaaaaaactttacttaaaatacaaatgctcagaaattacaaattttatattttgtacatatttttgctaaaacaagaccatagtatgtgtatgtataatttaactaattttttttcctcgctagctataacaaaatacatctttgcacatcaacgtacttctgtatctattgccaccttcagtggtcacatattattccatcctatggatgcaactgaaatttatttataggatccattctatgggttctttttaaagtaagtactgtgaaaaataaagtgcatgtctctttatttcctaagggtattttagtataatggaattggtgggtaaagggcttacacactttttaaatgtagtacttaccattttcaaatgagtactttgaaaagtaatcagcaacttaaactttaagcagcagtataaaacatcctcacaaatattgtggatagaaaactgtttcattcctcttttaaattcttataccagaaatgcaaaggattttttcctatgtatataaataacttgtagatctggaaaaaggtactttgcccacttttagagtgtttgatgatttgatttgaaagaattctctgtaaaatgaagatgtacttttcatctcatgtgtatatataactgatatatataacatatctgttatatatgtatacatatcagtaatatatatatatatatatcttacgatatataataaacaacataggccaggcgcggtggctcacacctgtaatcccagcgctttgggaggcggaggcaggcagatgacttgaggtcaggagttcgagaccagcctggccaacgtggtgaaactaaatatacaaaaattagccaggcatgctggcacctgcctgcaatcccagctacttgggaggctgaggttggaaaattgcttgaacccggcaggcagaggttgcagtgagccaagattgtgccattggacaccagcctgggcaaagaagcgagactccgactcaaaaaaatatatatatatataatgaattccctataaaatgaaaacatacttttcatctgaaaaaatatatatatataatatagtaaatatttttcaagtaagctctcttatctgacaacttttcgcccactgaaataactcacggtatttttgataggggaacgagttctctcattaggcacctcctataatgtatataaaccatgttttaaaagcgtacgttaaaaataacaacgctgtatatgcttaactttgtgagttaaatcactcaaattctccaactgctccagccagagaattatgagggatggaaaacagctgagagtccgtttggctccgccgctccgagggtgcccggcgccctgcaaggccccgtcccagggtctgcggggaagccgggcctggggaccccctcccaccccgggctgagcccccgctacctgtgctgcttgtcccgggcgtccaggtctccgctcctgcgcgccaggcagcgctccacctccgcggcgtcgcctttgacagctgccctgtggatcttctgcaattcggagtcccggattcggtatccggaacccgtgtagacgtggtctatggagccctcggccgtctggcccctgcggctcccgaagccgaataacttcatggcggtgactacttctcagacccccaaccaccggctcttgagcgggggcagctccctgtcaccttttcaccacccccctcccccgaccccggccgacccagccccaaatcgcctatccaaccccaaagccccgatccaaccccaaatccgctatttcaaatctatgatctactccacaatccgcgatccagcccggtccaccacagccttcagcagcgacactggcagcctccgacctctcagaccgagtgagcctcgcaaagccgttgggcgcgcgcctgcaccgcggttgctgccaggctcccggaagacgctccctggcggcgcgcgccggcaggtagggctgcagctctgggcaggcgccgatgggctctccggttctcctgggatcgcccgggcggccccagaatcgcaggcgcgcagccagcccggcctgaggaggagggcctgtctggccttgcagcccgccccgctcctcctcggaagagagggtgctggcaagggccctccgcggccacctgagtggcttcgcggattgtctggctgaacgctgaggctctggccctggagtctgtgtggctagtgtaaggtagctggagaggcatggaggcagagtcaggggctgctccttcccccacccgccctcactgctgccagtgccacacgcgcggtttgcaactgcagatctggcactggcgcaggatggcggagcttcccttggatggcctcagggccgcagagcgcacagcccacctggcctcaaaggtccgctcctcttggacacctttctggatcctgggccctggcgctgggcactctgtatccacacggatgaaacagcggctgctggcggggccggttgcctgattttgccgcctgggggtctggcctcaggatccacgctactggggggcgggcatggtctggagtgtccagccacttgctgccggtgcaccacgtctagactgcagctgcggctccgatgccggcgtgagctggcgggcctggtacctgatgtcctcagggtcaagtgcatcgccctcccacttgaggggttgctctgacttggcctcctccaagaacgcaggggccgccggggctggctcttcgtggtaaccgggatggtactgagcagcaggttttcaccctggtgccgctgctgtgcggactgcctgacttgggcgcccaggcaccggccccagggtccgcgtggcaggtgtgcaggtagggtgagtggcgcggagggccgggggttgctccgtcatctctgcccgtgtgcaacttgcagttttgtgcagcagctgaggcgctggcacgggaaggtggagctcccctggatggcgtcaggtttgcgggcacagagcacagcccaccagacctgaaggtctgctcaggggccatagtggttgagttctccatggaaactgggatggggtgaaaggccagttcccgtcctttggccgcctggccaactgccagacttaaccgctgccgcccaggcatctgtctctagcgttgctgctacttgggtagaagtgggggtcggggtggggcgtggagcttcaccggttgccaggccagcactgtctttgcaacatattcagatggcggcgggcagctcgggcgccagcatgggctggcggggctcccctggacggccctcaggtcgctcacagcattgtcccaggacttcctccgcctgtgccaggtgggcaaggtaggggggagcttccaaggcttctatcccaactctacctatttctacctattttctcttgagttattttgcctttatctcagttttatttgcaaaaatagtatacgcaaaatacatcgagtgaatgcacatcaggcatatagaagatctggcagaaacatgttttctcctgcccatttccagtcagtat

SEQ ID NO: 1880289 - DNA, 4001 bp, Homo sapiens
ggcatttcacttatgaaactaattctttccctactagtataacctgtgagcattatcaagttctaaattcttagatatttgggtgtttctggattttctactctgttgtattcatttacctgtcttttcagctgttatcaaataatttgtgatttatttatttatttttgagacagagtctcactgtctcccaggctagagtgcagtgatgggatctcagctcactgcaacctccgcctcccagtttcaagcgattctccctcctcagcctcccgagtagatgggcttacaggctcccgacatcctgcctggctaatttttgtatttttgtagatttgaggtttcactatattggccaggctagtcttgaaatcctgacctcaggtgatccacccgccttggccgcccgaagtgctgggactacaggcatgagccacgacgcctggccctttttttttttttttttcaaattttatttatttatttatttattattattattttgagacggagtcttgctctgtcacccaggctggagtgcagtggtgcgatctcggctcactccaagctctgccttccaggttcacaccattctcctgactcagcctcccaagtatctgggactacaggcgcccaccaccacgcccggctaattttttgtatttttagtagagaccgtgttagccaggatggtctcgatctcctgacctcatgatccacccacctcggcctcccaaagtgctgggattacaggcatgatccaccgcgcctggccatggcccattttgtgcaaattaatagcacattttgaaatctagaagggcaagacttttctactccgttacaaaatgttttaaatgtcaccacaatagtaaaagacagcgtgtgtaattttaaaaatgttaaaacgttgataactttatttggtttatgtaaaactgataaagaacttgcatcttcagaaaaatgagtcttcttaaattcgaaaacataaaccatcttcccacctcaaagttaccttctaaggtccctcagcaaagaatatatttacatagacattcattgatattgaaatggatactggactttatccaaaaaatttttagccaagaagttaatatattatgggaattatttcattatgcaccatttcataatgtatctaacatcttttaaaacctgtacattaaaagtaaaaccctgtatgtacttaattttataagttaaatcactttaaaattctctacacagtgctctgtgagaggaagtgggagtgaaggagaaagcagctaaagtttggggttgattttaaggtggcctgtgccctccgccctgcagggcgccctcatccaaggcctgggggacctgcccgggaagaaggccaagacctcggggcccaggacggccgccccgctgcccgccactcctccacctgctcccctcgtccccaggacccccaggccccactctgaaggggcgatcctcccacagcctcctcctcctcctgcagccccggctcaggcagggcctggtacctcttcttcgcatctcttatgttcaggtccattgtcgtcttcttcatcatcctctccagcttccaggcttggccccgggaggcagctttgtggatcttcctgagatccccatggtgaatcacgtaagagtcgttgttggtgtagaccagctgactgaaggggctcgggcgctctgggcccgtctggcccttgacaggggcggcagagagcctctccatggctgcagccacctgctagagagagcccgtgcctcccgctgctcgcccttccccagtccccgccgctcgccctcgcccttcttcagtccctgcatccgccctgacaagactagaaatctcagtcgggccaagcttttggacactccaacctctcccgggagaaaatggctgcgcaaaaccgttaggcagctgagcagaaccgttaggcacctgagcagaacctttaggcagctgagcagaaccgttaggcaacagcgcatgcgcaactcagcagacctgggagacacgcgaggcaggaaaccgccctggctgcgcttcgcccagcacggcgtgcaggtggcacctgctactgaggcgctatcgggctggcggggctccctggagcggaacgtggggggctccctgccacatggcctgcttgacagagctgcccctgtcccctcctcaacctgagatccaggagctgggccctggcgctgggcatcgtgcagcctccagggtggcgctgagcgtcggttcccggcctcttgcagccagggacccatccctgacttaggcgcctggaggcttctggcccaagtatccgcgcggctggtggcgctggcagggtcagggttgcagcctctcctgccacgtgccatgttcaggtggcagctgcagctgagcccatggtagaggctacagggttgggcccagaccgctgagcatcgccgagtacatcgcccttccacccggggctctgctcttcctcggctcgcgctggcagcgcaggcttgccaccactgggccctgtacagctgcggcgatgaggctttgcggcaggttcccacgatcctgcaactgaggtcccactgcctgacttaggcgcagtggcggtgtccgaccctggggttcgcctgctggtggcgcggacaggttcgggggttgccaccgctgctgccaccttcaaatgccagctgcagctgagcccacggtagaggctgcagggctgggcccgacggcctgagggtagccgtgtggcacacgccctcccactctaggccctgctcttccttggctcgcgccctgagcgctggtttgcaggctctgggcactgtgcagtcgccaggatgcggctgagcagcaggttcagcgccgcctgggcccagaggggaagaggggagtttggggttgcttggccgtatttgcctgtgcgccaagtgcaggtagcggctacagttctgacaggcacggatggcgggtcccgtttagagggcttcaaggttcctgagagcgcccgctgccaggcctcaggatcccttcctcgttgaccagcatctggagtatggcagtggcgctgggtcatctgcagccctcctggatggggctgagctgcagttctcacccttggactgagagggaaactcggctgagtggagcagatggagaaacagttaaattgaacttatctataaagacttccaggctgggtgcaggacctcatgcctgtacttacagcactttgggagaccgagataggaggatcacttgatcccaggagtttgagaccagcttagacaacacagggaaactttatctctataaaaataaaaccaatcagccaggcatggtggtgcatgcctgtggccccagctacttgggagattgattgtggcaggatcacttgggcctgggagttcgtgggtacagtaaactgattgtgccacaaacaaggaatgagaggtcctgttgctccccatccttgacagcatttgaccttttcagtcttctggattttggttattgtttgattgtttgtgccgctgcactccaagcctgggcaacagagactctctctcaaaataaataaatgaaagacttctagtcactatatcttatctatgtcgaattgtttacacatctagcttgaagaattaaaacccacagagccctctgattatgtgatagggaccatgtgattaaagtgggtgaccatgttcttgcctccagggggcccaagtcaagggatgggtccccagctgcaggagggtgggaatggatgctcagcaccaccccggaggctacacaatgcccagccccagggcccaactcctggatcctggatcatgaacaaaaacccaagaattgaagacttgagtgttagatatgctcatttctgctgggatatcattgcttctagaccgtcttagtttacagagcaaagaaataaatgtgtgtatacaaagctgtgtatacacataactataaa

SEQ ID NO: 1880290 - DNA, 4001 bp, Homo sapiens
tctgataaatgcacgcatcttccctgtgaagggggtcagtgcccttcagcatgtaatagctctagaattaccacagttttccaagtaggagaggagccagcgaccaaaagaaccataactgatttaatgagccattcgcagttttactgtaccagccctgcgtacttagacatgtatggcttaatctttgagacaagcatatggttctgataggatcaaccaggtaggtagaaagcggcctctgggactcgcgaggatgagcccggcgtcccagttgcgagattgggcgcggcagggcgggcgatggggcgtgggggagggagggagcagcttggggtggtgggaggggggtggtggggcggcgaaccggacatcccatccacccacaggacacaaaaccccccgacgggctcaccactcccgacccttcgtgcccatgtgcgaggaggccgaccgcccgacccgtgtgcggcagccgcgagggaccggcggccactcatgcgcggagggcgcggggcggccccgacgtttgggcagcgaaggagaggcggaccgcggtgcctggggtctcaccgccagtggcctcggggcatgaaggcggcccctcgcggcacctggagcggccgactggccttcggcgggcctgcggcttccccaccgccgccactgtcgcggccagccccctgaaccctcttccctgcacacactgctggccgaccccaaaccctccgggtgtccaccaggcccactcggggtgccgccgacctggtcccgaaggcgcacgcccggggacacggacaacgggccaaccagtggctagcggcggcgccccaccaggcagagccgggtttggtcccagacggggccaccacagcctaaggcggtgagccgctcggggagagaggatccgcgggcagggtggggggcacagacaggcaaggccagggaccgcgagggcaagggcacctgggagcccgcagaggggcggctcggggagaaacctcaggcacggccgggccaccaggaaaacacggccacgggatcccaccgccacagacaggagggaggtaccgcagcgacccgcctaggatgccggacggccctcggcaccaccgagacccgcctcatgagccccaggtcccgccatcaggaccccgaggtgacctcagccacaaacctaacgccagggccacgttgctcgtttctcatccatcctccaacccggtcaagctccaggagaccggcatgccccccacttgggacgcttcccagggccaggcggcccaaccccgtgccacgcaaacacggtcgtcggcaccggtcgctgctctgcaggggagcgggcagagagccggctcacagcggaacgggtcacaagccggactgaacgccaggcacagccaccgctcacgcagcctcccaaccgctaggacgccggcccggcccggcgggattctcccctgactcggaaggggaaggcgcgggccacacagtaggcgacgagcttccctgggtccccaccgcggaggctggcggaacccttgctttcccccactcacctcatcaagggggaagtggaggagggtcctctgcaagccagtcgccacggcagcgctaccataacgcaaagagaggcggcaggccgggggatccggtaccccaaaggcacacctctcagatcgctagagaaggctttctcaccgagggtgggtcacactccccacacgccagtcgcccctcgtcgggcccgcagaggcgctcagggacgcctggggaagggagggggcctgcggtaccaggaaaaatctgcgtgcggcaaccttgagccttcgcggtctgggcagggggcctggccgctgcgcgtgcgcgcaatccccgaagggccccctagtccaccagcctcctttctcccaggcaaagcacctccaagtaaacccacacacaacctgtcggaggcagaacggtagcccctcggcggccggccggcgcacgcgtcatctgccccagcccaccgcaatagctcacacggcccgtgcgcagccgccagaggggagcacgggacctgcgctcgccagatcaggcggcacccttccccgcgtgggaggggcgcgtctcactcaaccgcctcgacccccacaccaacgagctccctcaggacccactggtggacatcgcggcggtgaccggaggagggggcgctgggggtgggaaccacacaccaccactcgacctcgggcacctgagggataagctggggggtgaaggggaggagccgggcgtggtaggctcacgcctgtcatccccgcactttgggaggcgagggaaggtggatccctcgatccaggccttggcaacatggtgaaacctcgtctctaaaaaaatacaaaaactaactgttttcataaactggactcaaagttaataaatagataagtaggccgggagcggtggcttactcctgtaatcccagcactttgggaggccgaggcgggcggatcacgacggtcaggagatcgagaccatcctggctaccacagtgaaaccccgtctctactcaaaataccaaaaattagccaggcgccgtggcgggtgccagtagtccccgctacttgggaggctgagacaggaggatggcgtgaacccgggaggcagagcttgcagtgagccgacatcatgccactgcactccagtctgggcaacacagtgagactccatctcaaaaaaaaaataataataaatagattaaaattgaaaatttataaaaaacatagctggcgggtctcaaatgctcatgcctgtcatcccagcactttgggaggccgaggtgggcagatcacctgaggtggccagttcgagacccgcctgacccacatggagaaatgccgtctctactaacaatacaaaatcagccgggtgtggtgacacatgcctgtaatcccagctactcaggagtctgaggcaggagaatcgcttgaacacgggaggtggaggttgcggtgagccgagatggtgccattgcactccagcatgggcaacaacagtgaaactccgtctcaaaaaaaaaaaaaaaaaaaattaagcactgtattctgttatttttacttcctacccagagaagaatataatacaactgttgtctgcctgcctgcctgcctgcctgcctgtgacagggcctcactctgtctttctcccagactggagtgcagtgacaccattatggctcactcactgtagcctcaacctccccagggttaggcgattcctcaagggatcctatggcctcagcctcccaaagtgttggggttacaggtgtgagacaccagcacccgacctgagttaatacatctggtctcactacgtcttaaccacacacccatgaagaactcaagtcaagagagagtctgagagaggctctcagcattctctcccgaaagcagtgaggtggatggcggctgtgtgtcccgagctcctgtggttttaggtggccacgcatagaggagagatttccaatgtttccagagatgcgcgagccacagtctttcggggcatccgagtgtgagatggggtttctgacagtgacttaagggccaggaagggccagaatctgccaaggcccgtgtcccagggtggggccgatggaacccaaggtagagggagtcagcggtccacacagagagagctccagccttaggacccactgtgcagaccgaatcagaatgaagagagtccttcgtcctatatgccacatccctccactgaacttgggagcggatctgttttccaaacatgaggtgactctcgctttgcaatggatcacaaggggctgggctttccagagtcggcaggctaaagaagtcattctggctcagcctcccccatcccctggtaactggtgagttttttttttatttttatttttattattattatactttaaattttagggtacatgtgcacaatgtgcaggttagttacatatgtatacatgtgccatgctggtg

SEQ ID NO: 1880291 - DNA, 4001 bp, Homo sapiens
aacagtatttcattccttttttaacttaaataccttctcctcccaggaacactaaatattttttcctatgtgcataggttgcttgaatatctgaaaaaaaaatgctttgctctattttaaatgagagttcttgtttatttgaagaattctctgtaaaatgaaaatcacttttttatctaatatgtatatacacatattgtcttttgttaattttttcttataaactgaattttttttattttgctaaatcaaccttcagaatgtgtgcttgtgatatttgtaggaatataaacatgtataagtaggcatttgtgtttttttctgttatctttcttattttgtgcatttaaaatttttaatctacattccataacgaacttatttctgtgacataaaaatctagccagatttatccaagtagttagcaggcacttcatttatgagtaattcatcttttcctactaatatgaaatgtcaccattatccaattctattagattggtgcaaaagcaattgcggtttttgccattccttgtaattgtggcaaaaaccacaattgcttttgcaccaacctaataaattcttacacatattggtgtgttcctggattttctaacctgttccgttcactgatttgttgtttcagctgttagtaaataccttgtggaaattaacagcacattttcatatctagaaaggcaagtcttttttgactccatttcaaaagttttcttaatgtcatcacaatagtaaaagacagcatgagtaattcaaaaatgttaacactttaataactttattgggattatgtaaaatttataaacacagaaagagctcagaattttagaaaaatgtgtctttctattcaagaacacagaccatcttcccacttcaaagtttccctctaaggtccctcagtgaaaaccacattgacataggtgtccattgatatcaaataaatattgcatttttatccaaagaatttttagtcagggagttgatatattatggaaatgatttctctcattatgcaactttccataatgtatgtaacattatgctttaaaatgtgtacattaaaaataaaacgctgtacatgctgaattttattggcgaaatcactttaaaatgatttataaagaagaagcatggtgagtgattggaaaccagctgaagttttgtttttgttttgctgctagtgaaaatggcctgggtgctcacccccgccaaggtttccacatcccaggtgcggctgagcctgccaggaaagaaagtccagcccctttggtgacaggactcgcccccctcacctctgcacccctttcccccaccccattcacccctacacctcacccccacctccagtcctctatcccactgaaccctcaccccatctccccaccccacactgtccacacccctaccccccaagccttcattccatccacctcagcccattcacacccccaccccatgcaccccctactccccactcccatcccccaactcactccacaccccgccaccccatatacccccactccccaggccccgttccactcactcccaccccagccaggcaccccctagcccccgtccataccccgagctccggaccatccgccccacagccctcagcctggaagggggtacttctccacatccacaggcctcctcccgcagccccggctcccggcccccattacctttcctccttgtctctctcattggtgtcatgatacgtgagcagaaggtactccagtttctccagattaccatagaagacagctctgtggatcctcctcagatgagacgatttaatgtggtattggggaaatgagaagccctccgagcacaagcgctccctgagggtgggccacctctccggctcctagtcttccacaatcgtcggctacaaactgtagcctgggaacgctccagccgtatttcagctcgccttcggggatcgccgcctccgaagcgcaacaacaagcaatgcagtctgtccacctaccttcgcacagactctcagcccctcccgcctctcagcagaaacgcccaacagaaccgttaggaccagcgagcacgcgcaccttagccggccccgcccaacaggcccgaggcggagaaaccgccctagcagctctctcgccccgccacgtgcaggcggcggttgctgcggaggcgcagcgggctggcgtggctccctggagcgcgaggcgcgccctgccccaaggcctgtatgactgtcgcccgcgcgctcttctcctcttccaccggctcccgacgcgcggagccctccgcgctgggccctctgcagcccagggatggggttgagtggcgcttctccgcctggtgccgccgccgggcccacagcccgacttcgccactgcgtcgcccccgggtccgcgctgatgggcgcgaggcggaaggactggatccggggttgccaccgctgcagccagagcaccacttgcaggtggcagctgcagctcgggctccggctggggctggcggggctcacctgggatggcctcctggtccctgagtgcgccgcctatccggccggagggtgcacgcctcctgcaacccgggccgaagcccatgcccagcgctcctgctgcagactgcctgacttgccgctgccccgctggccccggggtccgcacggctggaggcgcagtcctggtcggggattcccaatcctcggcgacccctggtccgtgtgctggtggcggctgcagctgcagcgccggtgggctgacgtggcttcccggagctgcggcccgccgcgcccaagggccccacaggctgcgccgcccttgccagctgctcttgacccctgccctgagcgcaggacctggggcttggcactctgcagccacagggatgaggctaagcgccggttctcggcctcgtggcgccgctggggccacaacctgacttcaccacccagtcgcccaggtcgtgtgatgggcacgtgtgaggaggggcaatcggggttcctatggctgctgcctgcatgccactccgtggccactaggatagggctgaggagccgccaggggatgagcatgtcgtcgtggccatcgggatggggctgagagtctatctttatccttatgcacctactcagccgacttcccgacagccactaccgcagtgtcctgtcagggagtccttgctgctggggcagtggtggggagggcgtggagaatcagggatggtctggccattgctgctggtgcctgacgtgcaggtggcagctgcacctagggcgctggcacgggctggtaggtcttctcttttggatgctgtccaggtggcccattgtgccgtggccaagcccgagggtccactacaccttagcccgcactaggagtccaggggccacaggcgtgggtactgctggccaaccagaaggggatcagcagccagttcagctttcctgcctctgcagggcctggttgacagcggtggcagtgtctggtgccagagtccgcagttagggtcctggttgggggaaggggtgggcagatggtggttgcctggccactgcagcccaagggagacatgcaggtggcagctgcactataggtgcaagagcaggctagcagggctcccctgggatggcctctgggtggctgagtgtactgccaacctggcttaagagtccactcctactccacccttgcctggagcatggacggtggcactgggcactctgcagccatgcgcatggggctgaggggtggtttcctggggtgaagccactgacacaccaactgcctgacttcataccatgtgaataattgcaaccatgtgaataatttcattaaatgtaaattaagcacatatattaaaagaacaaagctggaggcatcacgctacctgacttcaaactatactacaaggttacagtaaccaaaacagcatggtactggtaccaaaacagatatatagaccaatggaacagaacagaggcctcagaggtaacacca

SEQ ID NO: 1880292 - DNA, 4001 bp, Homo sapiens
atgccacatgaactcaataaactttaaagagggcctttcatgtgcaaggcattcagtatcatctaactagactgtgagctccatggggaaaaaggcctcttgtgatactgcacctatttcaagaatcctaatgtgtgatggctaagaatgtgcaccttggagttgagcttgcccagatgtgactcccagagtcatgcgaccctgaaaaaaattactcgacctctcagttttcattttccttttttttttttttttttttttgagacagagtttcactcttgtcgcccaggctggagtgcaatggcacaatctcggctcactgcaacctcgtcctcccaggttcaagcaattctcctgcctcagcctcccaagtagctgggattacaagtgcttgccaccacacctgactaatttttgtatttttagtagaaatggggtttcaccatctctagccatctctggccatctctctggccaggctggtctcgaactcctgacctcaggtgagccatcttcctcggccttccaaagtgctgggattacaggcatgagccaccgcacccggcttcattttcctcatctttaaaatgaaatgatgatagccatcctctcataaaaatattaggattaaatcacgtaaagcatgattcttgtcttgtctccttgttcccaattctttctgtctggtttctattttattgtgcctgttcttacctgtccttcccttttgtggagaaggggagagcagagagccccagcagagctatgctgtatcattgctatgtagatggagctcattaaacacccctcgattgcttgaatacatgggagatccactcttagaacatttagggacaatatttcctgtcccctcatgtcaccttgatacttcccctgaaaagaaatggaactgagaattacctacgactgagaattacctacagtgctaaccatcctcacaaccaaaagcacagtttaaaaagagggaaaatataaccagaaaataggacaatatgtgatcttttatcttttcatagggcagaaaactttctcttaattttgtttgaatggaaatttgacatcccagtgtaaaatgaaagctgtttatagaagtgtttctcttttctttgtttgagtacttcatgagtaaaaaacatttgaacatgtacatatacagatacatatacatatttatattcaatcacttaacaaatatttattgagcatttactatgcaccttaccctgttttaagtgctaaagacacagcagtgaatgaaccaaactaacaaaataatctttgtcctgttatctatatcttagccacatgtaagttttggtttttaaaatggggggagtcaaatatatggtatgagggatttacactgtggaggaaaataaagaaaggcagacaggaaatgtggagtgggcattttaaatagtgtggtcagaaagggactcactgagaaggtaacatctgaggaaagacccgaaagaggtaaaggtgagccatgcagatatctagggaggagctgcacagggagcaggaacagcaagggtcccgaggcaggagcgcagctggtgtgttcactaaataggaggaggccagtggggctggagccaaggagccaggaagaggtggacagcagacaaggctggacagttgagtggatgagctgagtgcagaggtcactctaatgaccttagctttcacctgggtgaaactggaagtttttgagcaggagtgacaagttctgagttccatcactctgagagctacgttgagagtagagtgcaggggccaaggtcagacggaaggagaccagtcagaggctgctgttataacccaagtggtgatttggccaggtggcagccagtgaaaaatacagccaaaaagatgacacagtactagcaaataagatgtactaaaactacataaaaattaaaagtttaaaagaatgatttaaagaaatatgaattccaatattctctttcccaaactccaactcaataaagtattgtgttcatccttggggtgtaggccacacctacttttggaggccattgtttcacaataattggttggttgatttgtcccggctgacctgaatgtctgcctggctttctgtctttagacttctcttatgctcactttcctttttcctgatcttgccagtcttagacaccaaaacaagtctcctccacagagactaaccatacagaggctggtgattacatgtaggaattttcttcctttcttgagaaagtctgtggtcaccatgtcaactgcacccaactctgggccaacccttcagaaataaacttgttagatgcacatgttatttgggttcaataaaataggattttgcctgggaggacccaaggtatttgctaaagcaacacctctgaagaaggctaaggtgggccccagctcacaagagacaagcatggcctttgtaaggattgctccctttatcctgtaagaagttcaagaggattctcaaagaaccacactgagaacagccccaggggttctgtgtccccacagccaggctcctggagatgccagaagacaaacttcttggagaaaggactcctcacccttagacaaaactcaggatgtgtttaccaaacctgggaaactttaaagctgccacaaacacacttgggagaaaatcagaagttcataaaaggcagatactttttgaactgagattccacaagatgagaaaagactgacattgaaatatgtgaggagctatcttagaatgttagagcttggaagaatttagagaattttctacctgttcccattttgacagacaaagaaacgaaggccaggacttaccccaaaccatacaacagttagaagaaccatgagtagaatccacgtcttctgattcccaatctagtgttatttttaaaacaaactaaagcaaaacaaaattttttaaataaaaaaagcaaaacttttagagacaggttagaattgtaattaatttccatgtctaggctcaaacagatgtttccacaagtctccctaattttactaaaagctctgaaagctttcttaggggaaaatggtcttctggtataaaagatatcctagaaagctatgcttggatgcttaagactccccaggatgggagcaaggggactctaagcaaacaaaaaccaagaaatgcaaacaattatcgacttagtaatccctgaaacagcccaaagtggactatatatttatttgcttagctcactttatagaatataaattttaagttttcaaaagaggaggcaagtgaaaagatccttaaaaattatgaatatcataattacaagctggattcatgaatcattaatttcaacctcttaggctaccaacatatttacaaacataaacactgataagggcaaatacctgcattcccgacctctgaaagcagccaaagccaaataatatattggttaaaaggttaaaaaggagtaatctataaagagggcaatcttaggccaggtgtggtggcttacccctgtaatcccagcactttgggaggctgaggcaggcagatcacatgaggccaggagtttgagaccagcctggccgacatggtgaaacctcatctctactaaaaatacaaaaattagctgggcgtagtggtgcaagcctgtaatcccagctacccgggagtctgaggctcaagaatcacttgaaccccaggagggggtcggcgggggttgcaatgagccaagattgcaccactatactccagcctgggaaacagagcgagactctgtcccaaaaaaataaaaatacagaataaataaaatgggtaatcttagattatctatgaattgaagtagggtggagaataggaattagtcctaagtcattgacatgggttaaaatccttctctggaacttgaagctgtttgactttgttacctggaaagccttattagagctcatctgcaaatacacccttcataggcacatttgtaagaaat

SEQ ID NO: 1880293 - DNA, 4001 bp, Homo sapiens
ttttgcatcacagacttcatttctttccttctctatcttcaacacactcctactgcttttgtgaagattaacagcgacatctgcatcagtattttcagttctcatcccacttggtctctcaacacttgctgtatttgaccaatctccttctattttcttgagatgaagtcttactctgttgcccaggctggagtgcagtggcgcgatcttggctcactgcaaactccacctcctgggttcaagtgattctcctgcctcagcctccccagtagctgggactatgggactacaggcatgcaccaccatgcccagctaattttttgtatttttagtagagaggggtttcaccatgttggccaggctggtctcgaactcctgacctgaggtgacccacccgccttggcctcccaaagtgctgggattacaggtctgagccactgcgcccggacctgacaaatctccttcttaaacacactcttccactgcttccggaataccccagtcttctgaatcttgcacccccttgccaccctctcactctcagtcccttgggtctacttattctaatacccattcgtgagcctttgaaattccaccggcttagacccagggtctcttctcaactacaccctcatcagtactcctggttttgatctcaatgatcaaatgtaaatttatacaacccaccttgacctctcctctgagctttcaactacctacttgatactcccctttggatttcttaaaaggatcttaaactggtatgtgaaaatccagattcctgatctgtcccctgaaaggtggttctactccagaatccataactcagcctcttactatgtaaatgctaagtctaggagtcactcctgaccctccttcttgtcaccctttcctgggccactgtggtaaccatctgttaccctgcattcacttgtgttcctcccaatcttttctccatacaacagccagagggatctttcacagtagtaaatatgatatgactttcccccattcaaagtcctttaatggctcccccttacctgtgcaaaaaattcctgcccatccaatctgaattaaagtcccacctcctggcctccaccttcctttccagcctcctactatggggtgaatgtgggtgtcatagtcaactctctaacatgacatgtccttatcatttggaattgcttgatttctttttaattcccacattctgcaaagccacagaccaatgcacatgacttttactttgcctagaattccctctccatgtcccatttattctccttcgtcacatcttgataacatgtgtttataattgaagtttatctccagcttaactctttgtgaagcctccctgaatgctcaccgtgtcctaactcttgctctccgctatactcccagagcctgggtcgcaagtcccatgtataaccctcttcatgttctgctgctggtggttactgacaggtctgtctgtctcctcattggcctgtgagctccttaggggcaactggtttgtcattcctgtatcccaagtggccagctcagtgcctggcacttggaagtctcctaaaagaagtttgtgaaacaaatacgggtgagtccaaggaatgcctgagggaaatattcagaaaataaaagaaaagggggcagttaaatgctgtcaatctgtgcggagctgctctgggagacaggaaggctgttaccgcacttacctactcatcacgcgcatcctggcttttccttctggcttcataaaggtgcttgtgtggcagaatggactgtgcgaaggtcctgccctggaccagagggagaggagttccatgaggtgaaatataagggaaaaggtgcgtccacctggggccaagtctgggatgaaaaatgcttttcataggttcctgagggtgacagttgtacaaaggcctccttgggggcagaaggtggcaaaggcacagctgcagatgggctgatgagactgtttattccctcgcagttggcataaaagcagaagtaaatcaaaagaaagaacataaccgttagttcagatggaaatagcaagttcctgggttgggtctacaggctgacattcttctttcttatacgatttggtacaaatcataagggaaaaaattaatgtttcaatttttcagtaaaaacaaagtcaaagtttgatgagtgtcatgattgttaacagcctactgttgagtttctcctctctggtgggcctggactgggtactggggacacagggtgctgagagacagcccagccctgcaattgcattctggctggagaaggccgggggtgggaggagcggaaggaaactggcagctgttaagtagctgctctgtactggcagctggagacagatgaactgcaaggaggggtggcaggagctgagcatcaaggagtggtacaaacacaagctccccaggaagccagggagtaaagggctgcagaggctcctccgggggagcttgttcttacttacttttctattggtgtcagaagcatccagcgttgcttcaaggaggccattcctggtattgcccttagaccctgggtcactgggtcctgtggccctctctcaccattcccatccctcaggagcaagggagggaggagggagaggacagggaatggaaccagcacagaatcagatgggaagctgttccctgggtgtagaaagaagtcaagcagatcctcttggcgacacaggggaggctagtaggagactggggagaggcagacaggactgtggaaagtcttcaaagcaggcctcagatttgagacagaattctggggcctgggagagttactctgagtttctgaaccaatatttctagaagatgaatttgactgtggtatgtagtagttcccaattccaggcctgctgactggtcgcatccatgacctggggaggtttgtaaaagttcagagcttgtcctgggccatactacaggtggttctaatccagtaaaatggaggggaatctcaggcaaaaacatcttgaagaagcttcctaagcaattctgggaaatttgagaccctgctatgagttaggttgcatgggaggtgttggaaggaaggtgaccgtatagagaatctgttgtaataattgcagtgtaattgaagatggtctggactcagggagtgcaagtgcagaggacaagggacagatgagcctgcagaccgctacatgagcccagcatcaagccttggctctaggggagaaaaagcaaaagggtaccaatagcattaatatggaagtcaggagagagttgtttagtggagtaaggtgagggttacgatgaactcagaaccaggtatgtaagggaagggtcagaaaagagagcagaagtagaaatggattcagaaaacatatggagatgtcacctggagtctcaggaatggatgagtcattaggtgaagaaagtgcatgcagataatttagctacaaaggaaacagggaggatgaatgcagagagcgagtgggaatgaaagcagctgcatctatgggaagggctgtctcatagatgagggacaggtctacccagggttagcccatatgtggaagtggcaggacagcagatctcagcttaaagtaagaaatggcttctaacagatctgccgagaacctcccaagccagctctgactgtcagctggtacagtttaccagttctattgggacttcagcatgattagttgatgcgttgcagggaggtgaagtagggaaaataatagctgaagaatgagtaatgtttaaattaagtaccatactaggtttttttgtaatgtcattttttatgcctctgagagatgaggcccccatcctggagtttgttcttatttacatttctattggtgtcagaggcatcaaatgttgcttccaggagcccattcccagtattgccctttggccctaggttgctgggccccctgtcaccatgcccatctccaaggagcaaggagaccccagggttaagggacattccaccaacag

SEQ ID NO: 1880294 - DNA, 4001 bp, Homo sapiens; identical to SEQ ID NO: 2573

SEQ ID NO: 1880295 - DNA, 4001 bp, Homo sapiens; identical to SEQ ID NO: 2588

SEQ ID NO: 1880296 - DNA, 4001 bp, Homo sapiens; identical to SEQ ID NO: 2603

SEQ ID NO: 1880297 - DNA, 4001 bp, Homo sapiens; identical to SEQ ID NO: 2604

SEQ ID NO: 1880298 - DNA, 4001 bp, Homo sapiens; identical to SEQ ID NO: 2607

SEQ ID NO: 1880299 - DNA, 4001 bp, Homo sapiens; identical to SEQ ID NO: 2609

SEQ ID NO: 1880300 - DNA, 4001 bp, Homo sapiens
tattgtgaggttcacatcagacaaatgtagtattattctcccttgagaatagccagcaatgtttctgcctggaatgcagaaatgctaataagcctgattcaacagttggtgccacctcctgccccctctccacctccaccacactctccaccagacctgccattctccatgggacccagtgtggcatggagtcggaacctatacaggtgtccattttctccactgtaaaatgaggccgatctaggaaaccagaactaggtccccagacctgtggttttgcgactatcggatgcatctgtagctttggcagagaaaaataattgggtggtggaggcacctctccccatccctctccgttgcccctacccctttccctctaccaggatttggcaaatgctacaattctgtttctacagcgccaccttctgcccacattgaatcacacaggcaattactcttcctgcttccgtcctcaaatgtaagaacatttgagggaagaattttgtgtagatcagaggttcttagcccaaggaattaggcccttgaaattgtgtgcagacctttgaaggtatgcatgaatgtgcctgtgcatttttctggtaggagtttctacagtttcgtctgatttttcagggttcgtgacccagaaaagtctaactctctgatttgtataagttgaacaagcatcagaatatcaggggtgcagggggcttgttaacaggcagattgctaggccccaccccagagctctgattcagcatgcctggggtaggaggcccaagaatgtacatttctatcaagttcctaggtgatgctgctggtatggggaccacacggagaacctctgttctagagaatcttctgactcctgtagtctgtgattcaaattggtccctgtttgagaattggagtaagcactcaccttaaccaccagactccatccccaatgtctgtggctgctttcaaaagagtctgcatcagctctgaagacaatttccaaagaggagcctccgcactgccctggccattgtcagcaggagggaccttagaggcagcattcctgtgcacaaatcccgacaggcttgctaagaacttccagtcctccgtgtgtagacagcagctcccctgtgcctggccacttgctggttgagagctcagttgaatctccagcacggggttacattgcactgagtcatgccctcttcctgcagccctcttagtaaccgacatcaaccgagttgatgggatcaggcctgctcagtatgcggctgggaaatagggccccttaagatacaagctcctggactagctatcccccacgggaattctcccaggtacccactgccataactggtcatgagatcccaccaccaacaacaataacgacgaacatccagcacacacttagagcctggggctcttcctaaaggttccagacactacaccctccatgcctgagtgtgaaaacctgatggcccttccccagatctgaccacaatttctgccatttaaagttcattttctctgattttgtccttcagggacacagaacgcaccactctcctctccactctcctctcctgccaccctccctctctcacccacataaactcacatgaaaatgatcactttttttttttctttttgagacggagtcttgctctgtcgccaggctgaagtgcaatggcacgatctctgctcactgcatccttcttctcccgggttcaagcgattttcctgcctcagcctcccgagtagctaggactacagaaaatgatcacttttaaatcactccaccgcctgatttctttggggcacactctggcctgtgttctgtacagcaacttttcccctgaggttgaaacagccctccgtcacctccagggagatgacaaataatgaggcagggcccgtttcgtatcgaaacacaggttatcagagtgggagaggaaaacgagccgggacgtgtgttccacgcgtttcccaggccctcgctgtccgtgctcctgggctccctcttgtggttgagaacccaagacgcctgggtgttcggagctcctcccacctcggagccctcctccccggccggcctagtgctgaagcccccactccgcaaggctgaggggtggtttggggaaccacaggtcaccttcctggcatcctcttcacaggacaagggaggactcaaggtagcgctcccttccgtgtgattgtcagggctgcaaacctagtctcaagttcgaccagcaggggttccctggcggagtggtccctacttggtcacaccttgctggggaattggaccctccgccccaacccgcaagcccttaaggtcactagtttgtggccagtaggtgatataacgatagtaatgatgatgataatcaccagcactgtgctgtaacatgtcctaaaaatgtattatattttaattgcaaaaataatacatgctccttgtaacttagtgaaaaagaggaaagacacgtaaagttaactatctgcccctaaccgctttattctcagccccgaaagaccctgctgaatacgctcaaacacaggcaaatatgttagaggttgacctcggggtcagtcccttgagagccaagggactgacagtggatccactgacagtgtcagcggatacacattttacgcattcttttggatactggcatagcaggcgatagtatggatgtactgtaacttactcaatagtcccattattgacagacattcgtatgttctcaggttttgccattacaaatagtacaatattgtatcccttttaaacggacgcttttgtggttataggatagattcccagaagtggaattgctggttcaagtacttttttatttcaaattagatattgacaatttggggcaagatggcttgcccagaagggttgtggtaattcacatttccaccaaccaggtatgagaggacccacttccccacatccttgctggccctgaatatgttctctctgtagttttacctatctaataaatgaaaactagtactgtctcgcttttatttacatttctctgataactaggaaagttgagtgtctgtccatatgtttaccattttgattttgcttccttctccgtgaaatcttcctaccaagcaagttgtgcatacgggagctccttgtttattgctcacaggctatcttttgcaacaataaatgaaacaaagatttcatctattgtgtctctgccatacagaagtttgaaatactcatatgatcaaatattttttgtttataccttctgaatttcttgtcttgcttaaagacattgctcatctgtcttttaattggattattcagaaagataggaaagaagaaaagctcttccagtattttttaaaaattgtttttactttatatttaaattttttttacatgcctggaatgtatttgggtttatgatgtggttatcttctaactagatatcctcttatgttctatatattatttcccctctgagaattaattaatatacaacatttgttctataatagtcctataaaatctgggatctccttctggactttttttctttcctactgatccatttgtctacctcatatcaatttactgcttgacttcagtagctttataacaagttttaatatctgaaaaggcaagtcctctatctctgatctttttcataactactttggctattctcagacatttatgtgaactttaaaataattttattaaattttaaaataaacaataatccattagggttggatcaaatttatatacttttcaaaaggattaatgtttttatgctagtaactaagaacattaagacaataatgttcttcattgtttaggacttgttttatgttattccataatttttttttgtacctttcttgttatatttatttctagctattttatgagttttggccctattgcagatgggatggttttctccgttgcctcttctaactggttactactaaaatagaaaaaaaag

SEQ ID NO: 1880301 - DNA, 4001 bp, Homo sapiens; identical to SEQ ID NO: 2618

SEQ ID NO: 1880302 - DNA, 4001 bp, Homo sapiens; identical to SEQ ID NO: 2622

SEQ ID NO: 1880303 - DNA, 4001 bp, Homo sapiens
ctgacctcgtgatccacccaccttggcctcccaaagtgctgggattacaggcatgagccacggcgcccggctgcaaaatgtctgcagcatagcaaaatctcaataattatttatcactcatgataattacctgaatactaaaatcagagagagtacattaaaaagaaacacaacgaaccattcttaaataataaaaacatattcatcagtggtctttatttactagcaccaataaaaaactagaagctctgtttagcataggaaattggtgtcatactcactttataatatcatcagtgctgggtggggacaaagccataatctgccaaaatctgcaccatccttgccaggtttgggagttctgtagagtagttaccactgccaggtctgactgccatagctcaggaaaagggtgcagtcatttctcttagcataatcttgagaagatgtctaagagacctatgtaatattaagtcacagaaagaaacaatattattggtggtttagacatggaatgtaatagctaacaattacggaatgcttacttgtttcaggaactgacgtgttatctcatctaaacaatgctacagagcatgggtactgttattaaccccgttttacaggaaacctaggtttagcaaggttaaggaattgcttgagataacaaaggtagtaagaggcaggggtggaatttgaagccatatagtctggttcttcagggtgtatacatccgtgtatctataaccacaatgctgcaggggcactcgaacaggctggaaaagaattatttttctttaaagggcaaattaatttcctcaaaagtaatctctgttcactttatcccataccagatgcttattttcatttcatatcctaaaagttagattggcacttacatgccaacttaaaatacctttaagtctttaaaatttatagtattttagaatttatcatagtgaaacatgtacagtctgttagtccccaagacaataaaataaggatgatagtgactgatactccattcccttccgatgtaatgacaaacacgtagaaacactgtgtttcatttattggaattatttggatccaaaggattgcttttaataccttaacaaaataggtcattaaaaaaaatcaagtgcctttcagtattcttccaagtttcaataactgatcttttccattaaaaaacttttgattcattattccaaatcaacatatcatctaaatatttacacatagttagatgtagcttttccctaacctactcccttttatttattagtactcatttacatcttagtttgccacatttacagttctttgaaagtttcatctaatattcaccagaccattcacctcacaattttcctccctctttctaaataggtgaatttgtttactgcaaaatcgatggctacgctattaaaggttactatcacgattttaaaagacatgatcaccatcatttaccaagattcttaccacaaggaaatgatcacaaggttggacaaacaggctccaactcttaagggaaagggcttgcagttagatcacacagggcgggcagggaagcaagcggggaggggtaggtcggaaaaggcagtgcttgattcaattcaacattcactgcgccacttaccaagagccagaaaaagaaaaaaaaaaaaaaaaaaagccaaccagctgggcgttatttcgagcacggggccctgcaggtgggcctgtgggcggggacccggcgcccgggagggaaggggctggctcagagactatagacgggcggggaccgccccggcccgggcctccagcgcccggcgcccgcacactcgccagcccagctgccggcacgccggccagccagccgctgccgcttaccagtggcgcctcgctgactccccgggggcagctcttcaacggttcccgcagtcagagcaccaccccgcggtggggtacctccagcccgcccgcagctctcggtccccgccgcgccgccactctcgcgagaagccaggaagtccgcgaagtggggggaggaggagcagggaggggcacttaacggtggtggctggttctgcgccggatccgggagaggggcgggcgccattgtgcttcgctgccgactgcatttcctcagtcacgggcctagaactccaaggagaaaggcggcggtgcgtgttgctgcgagtgggacgcgcactggtcggtgccggctcaggagccggggtaatgagctgcggagctagttcttctccgtcttgggcgctagttcgggaccaggccgcgagtgggggaggggaggaaacgaagaggcctggggacgcggaggccgcttcctctcaggatgaggtggagaagcttggtccggggccaccggggccaaggggccacagcgcaggcctcccttgccaggggcctttggtcgggtggtggagtttgtggcgggtgcaggggacagattgtgtgtcttcctcagggacgtgtggcgggtgacgggaagaagcctgagccctcctttggcgcggggcggcctcctcttgggccgtggggcggggggtcttcggagccctgcgggccgcgggtgtcgcgcgtgagctcgccggtgagcgcggggcaaaggcgggcagggctccggctcggccagcccggcctcgagtcgaagtgacttcggtagccccttagattcggccaagattgtcttattggtaacgtcagtttttgaatatcgtgacgccctgagagttatttttgtgttgtggtgaattgtgggttctgcaactcgaagtaggtgattgtattaaaaatggacctgttggcctaagaagtaaaaatatagaaggcgccgggagtaggaaactccctcattttggtgaaactgcgtattgaagatgtgtgtccaccccctcaccccaaaatgctgcacttaatactttttctcaagtaccaaagtaaatatattgggaaagtctatctgggtaataaattcgtcacgactaatgttgtttgttactattagttaaatgtgtgaaaactgaaatttggcgaggttttctcccccattttgtaggattgattagctatttttctgattacatgttattttaaatctccacctttctgtccagaaccaagatgtaggattaaagatgaattttcgatttaaaaatccaatagtatacagttattaagaaggcacacatgtagtgtaactagatcttttacttgaggtagcaaaaagtttgtttgagaaatgaggtcagtataatatttttatttaacagctctacagcattttgggagacaggactggtgcatgaggcagtagcaccagactcagaagacctgggtttgagtcttgatttttgccatagttatttaagttcacgagattgtctcagaaacatggcagttaatttctagagaggattaaatttgctgaggtggtgtgtgaagcagtcactaggggacataatactagtcttggtttttttccaagtttagtgctgggtcaggtgtcttgaattaagaattcctacttattcaagtacaaatgatttcttttttctgccacctggaagagggctattttcccagataaagcacgaggatgcccaggttatgttctacatgaaggtgtcaggtaacgaacttggacacaaaagtcatccatgactctcatgtagccaatttttagtccgctccatacccaccttacacaactcttttatctgctctatgttcaagaatcgtctacattttgacattttattgtaggaaaataattttataatgcaaaatctgtcaaatatcttaaaacttttttagataatttgtaatttgttgtagtcaaattacaaattatggagagcttcacattacaagaatgagcttgacatggcatctgccctccacaactcactgtttagtcatcagactaatgtataaacaactattattatcttaatatgactgtacagtggttctgtgggagcataggggag

SEQ ID NO: 1880304 - DNA, 4001 bp, Homo sapiens
aggcatgagctgccatgcccagtctgagatcatgggttctttaactgtaccctcttcagaccttagcccagtatgggatataaaggagcttctcaggatagattgactattatttgcaaaggtaatgagaagtgagtctgtgcttggaacagataccagagaatgcagcctctgtgatgagatcatctgggccctgtgaaagaaactgtttggcagagacggttgcttatcaaagctggctgggtgtgttttggccctgtgttatctgtttagagtcaaggctggcctcagtgaggagcaaagagccagccagtgggtggtctagcctcctgcactcaaatatgtctcccccaaaagctgagagtccctttagaattcagtttctttcagctatttctgcctggttcaaatgtgaacaccctgtcctgaatggtgaatgaatttttttcttcctcatttgggcttctagttgaaaaccacaccctaccagatgaaatgcagaagtgaaatttgtggaaagtggtctgggtggaaaccctcctctaaatcccatctgagatctcaaaggacactggttctcagaagagcctagaagacagagatggggcaaggaggggtctcacagctgcccaacaccagccagcacataatttgggccaagatttggttaactgtggattgggacaaggtgaaagaaaacatggctcacaaaggaagtccaatggcacccatgaggcaaatgtacgctgggctcagttacagatatggggaggagcaagtttggaagtcgcaactgtcaccatcagggagagctggggccacagctgggagacaggacctctagtcagagctgctggtgcttcagggatggaagactcagacgctacaggcttgacctgccttcaaggtatgaatgatggcaggtatgctgagaagtttacttgcctcctgcaatgttttccctacctgctcacagatgcctgacattccttttaacagggaacaggccttgtattacagagcaaaagagcaagcttaaaatggccattggaggagagactcatatctgagaaagacagcaagagggggagaatggtgtgtgtgtgtgtgtgtgtgtgtgtttgtctaggatggtataattttgctcaaggccatggaaataagaaaatttggaggctgggcacggtggctcacagctgtaatcccagtactttgggaggctgaggcaggcggatcatttgaggtcaggagtttgagaccagcctggccaacatggtgaaaccccgtctctactaaaaatacaaaaattagccaggcatggtagtgcatgcctgtaatcccagttacttggaaggctgaggcaggagaatcacttgaacctgggagatggaggttacagtgagccgagattgagctattacattccagactgggtgacagagctagactccatctcaaaaaaaaaaaaaaaaaaaaaagaaagaaaatttggggtcctgttggtggggtgggaggagggacagcatcaggaagaatagctaatggatgctgggtttaatacctaggtgatgggttgacctgtgcagcaaaccaccatggcacacgtttacctatgtaacaaacctgcacatcctgcacatgtaccctcgaacttaaaataaatactgattaaaaaagtaaaaagaaaatttgctttctcccccacatatagcagtagcagcagcatttcagaatggctttaacttctcccagctttaagaagctgaggaaagcaaggcctttcttccaggcaagaatatgaaaaggggggggggggttgttgctttgagggaagttacgcttattttttttttgtcttttgtttttttttttcctttttctggagaacggggtctcgctatattgcccaggcaggtctcgaactcctgggctcaagctatcctcccgcctcttagcctccctgagagctgggattacaggcgtgagccaccgcgcccggcctcttattctcgattgaaattctttcatagatctcaaattgtcgctctgaaatgcagtacttccctctgctggccatagggttatatagctcatcaaaaacaaggatgactcccaagtcgtctccctcatctaagactaaggaattgactcaggacatgaggtgggagataaatcaaatataggatgattttccaaccctcacaccccctcagaaaacatccttgagtgtcttttggctctgaatttaaataggtttatctagcttctccagcctgtgcttagccaattaggtcacattggcatgaatgtgcaaagaacaatggcttggagccccacccacccaattgcaggaccttggccccctcccaaaacctccctcagagatcctggaatactttcagggggcggaggctcatgatttggggtttggggcctcacagagagtccaccatgttcttcttgctggcttctgtccctacaccatctcttggttaaaaagcccctcaaggtctcaagccgggcgcagtggctcatgcctgtaatctcaacactttgggaggccgaggtgggcggatcacctgaggtcaggagtttcgagacctccctgagcaacatagtgaaaccccatctctaccaaaaatgcaaaaattagctgggcatggtggcacatgcctgtaatcgcagctacttgagaggctgaggcaggagaatcgtttaaacctgggaggcggagattgcagtgagccgagacagcaccactgcactccagcctgggtgacacagcaagattccatctcaacaacagcaacaaaagcccttgaaagaaatttcccgctgctctattgtcctgcctgagccagagtctgctaattctcgagtctgcctcggttgcagtcctgctagtgccagtttctgtgcagatgtaggaaaaagggctccacaagagaggtggaatttattctgatgtatttgtatgaccaaataacaagttacatgctctccattgcatggtggtgtgttttggttaaaaagctaccatatcctagcagggtggtggtgatgtgtacctgtagtcccagccactcaggaggctgagggaggaggattgcttgagcccaggagtttgagatcagtctggaaaacatagtgagaccccatctttaaaaaaaaaaaaaaaagctaccttgcttagggggcttttttcattcttgtgaaactgaatttccacaaattgattctgaaatcagagtgaatactctactagtattttctatttctttaagatgttttatttatttatttgagacagagtctctctgtcgccaggctggagtgcagtggtgtgatctcggttcactgcaacctccgactccctggttcaagcgattctcctgcctcagcctcccgagtagctgggactacaggcacgcgccaccacgcccagctgatttttgtatttttagcagagatgggggtttcaccgtgttagccaggatgttcttgatctcctgaccttgtgacccgcccacctcagcctcccaaagtgctgggattacagatgcgagccaccgtgcccagccaagatgttttattcaaattctactttgattttatttgaggccttcaaaaccttccataatgaaggctggatatatcccttaggatgagaaatagagcctaaaggagatgttctcaacatgactctccagtaaacagtggtagtaagtactagggtcaaacctcaccttggggagaaaaagggtgtttataggtttatgggcctttctcaaaggcacactgaaaaacacgaaacacaggtctcattgtagaggctgagaagtgggagcatatccagtttttaaaagcaaataaaatacaagttattacttgtgacacaaacaagccggaaccccaagacccagaggtgcttcttggcatctggaagaagctgatgcggtggcagtgctctgagtcaggggatgctcaaggattactccgta

SEQ ID NO: 1880305 - DNA, 4001 bp, Homo sapiens
ttccatcactttgaacgtcactccaagtagcctcactgtcattaagctctgatagtctctattttacatcagttgtagagatctctttcacatcagttaccatacaaagtacaggatgctaggtgatgccacatcctgttacaacttaatccccatatagctctgtgggcactgaggcaattcctacctctagttggactcccacaattctcctcccctgctttagttttctatatagcattcagaatacttactagcttctgaaaagaatgtaactcatgtccttcgcctagaatgttagatacttgatggtagagatttttgtttgttttctttactgcttattcccagcctgtccagcaacaggttttcagtaaatgttttttgtttgtttgtttttgagactgtcttgctctgtcacccaggccggagtgcagtatgtggtctcagctcactgcagcctccgcctcttgagttcaagcgattctcctgcctcagtctcctgagtagctgggattacagacctgtgccgccatgcctagctaattttcgtatttagtagagacggggtttcaccatgttggccaggctggtctcgaactcctgacccccggtgatccatcagcctcagcctctcaaagtggtgaaattgcaggtgtgagtcaccgcgccctgccagtaaatgtttatggaatggctgttcagtaactgtcattggaagagagatgttagatccttatctcacgttattcacaaaagtaaattccagttggtatacaacacaaaacccaacaaaacaacttataaaagccttagaagcaacgtgtgttcctcgagtaaggaattcactcttagatacaaataattttaatacaaaattcatttgatttatagctagtaattggaagttaacataggcaatattttcttttttactaaaaagaaagttgatttattgaaatagactctggataaattgcaattctgtcattcgttttcacaaaagataaaataacttcatcattcaatttagtttaaaaaagtttccacttcatactgataaatatgtttccagccataatatattatctggtgtatttaatcatttctatatgtaatataactagatatttagttacatttcttgttctcccctaaacttgatactttacttttttttgttttccaaaagtgcctattattatagtttgtatattggtgcttcttaaatatctgctgcattctttcatttagcagctaacctattaagttgacccttgaataatgcaggtattaagggtaccaacccccacatatttgagaatccaagtataactttttctttttttttttttttttttgaggcgggattttgccctatcacccaggctggagtgcagtggcatgatcttgtcctccccagttgcagggactacaggtgtgcgccaccacgcccagctaattttttgttatctttttgtagagatggaagttttaccatgttgcccaggccggtctcaaactcccaggctcaagtgatcctcccaccttggcctcccaaaggtctgggattatgggcgcgaatcacagtgtccggccccaagtataactcctgactcttccagaacttagctcctaatagcctactgttgactggaagccttactgataatcaattaacacattttggatgttgtatgtattatatactgtaaggtaaggaaaagaaaatattaagaaaaaaatcatagaaaatatatttactgttcattaaatggaagtggatcatcataaaagtcttcatactcagagtcttcatgttgagtagcctaatgaggaagaagtgatgaggttggtcttgctgtctcaggctggcagaaaatctgtatataagtggactagtgcagttcaaacctgtgttgttcaagggtcagctgtaatttttttgagacggagtttcactcttgtggcccaggctggagtgcaatggcatgatcttggctcactatagtctccgcctcccaggttcaaacagttctcctgcctcagcctccgagtagctgagattacaggcatgcgccatcccacctggctaatttttgtattcttagtagagacagggtttctacatgttggtcaggctggtctcgaactcccgacctcgggtgatctgcctgcctcggcctcacaaagtactgagattacaggcctgaaccagcgtgcccagccgggtcagctgtggaccttggtaagatccaggtaaaagctacattcctgtggacctacttttatattgtacatttgctcattttgtgctttttcttcttctccttatagttctggacatggcaagacatgtgccactctatcgggcactgctggaattgcttcgggccattgcttcttgtgctgccatggtgcccctattgttgcccctttctacagagaacggtgaagaggaagaagaacagtcagaatgtcaaacttctgttggtacattgttagccaaaatgaagacctgtgttgatacctataccaaccgtttaaggtactatatacaatgttcatttctcttgagtttgcctctaacaatgtttttaaaataactccatgggtgtttttgtttttcagtgatatgtgctttttaaaagcatatacaccctcggctgggtgcggtggctcacacctgtaatcccagcactgtgggaggccgaggtggatggatcacgaggtcaggagatcaagaccatcctggctaacatggtgaaaccccgtctctactaaaaataccaaaaaattagccaggcatggtggcgggcacctgtagtcccagctgctcgggaggctgaggcaggagaatggcgtgaacccgggaggcagaggttgcagtgagccgagatcacgccactgcactccagcctgggtgacagagcgagactccgtctcaaaaaaaaaaaaagaaagaaacatgcacaccctcacacacaagcaataaataaacatacaaagaaaaagtatccacccaaattatacacttagaaacatttattcacaattgcttattcagtatctccctgtgtgatctcatagctataggtatgaagtttttcccaaatggtgtcccattgtacctgttagacaaatagatgctagtttctcacataatgttgatgtcagagacatctttcagtgtcaataaataccactgacattgttctaaatacttcaaattcacctttgtatttaggtgctatattttatttaactatttattagtagattttaggttattttcagttcataataacctcatacatacatcttttggtgcttgcagaaatctctgcagatagaatcttagaagtataattcttaggtttatggattacttctgttttattttagaagtcaaaggattcagtatttgatggaattaaaataagtcttaatgcttatctttaaggaaaactgaattgttatttttagtttgtttacaccttagtagattcagaggatgagttctgtcaaaactcttttttaaataacctaggagaccttttcctttcccttggcaggatctgttcagtgaccttttcctttctcatggcagaatctgttcagtggttgtcagtttattcctcaaagatggcctaattctgaattttgaagcatttatactgttaatggaagtttactcctttttcagttaccttttgagtaaattaatgtcatttaccgtatttactgtatttactttgctttttctcacttattttttaagaacctatgacttaagaaatagtgtagatcaaaagatcatagagaattggtcactggaagaataattcttgttagtctttgcctatgagggagaaatcaccttgtgaaggaattctgactttgttggcttaatgtgttgtcattatcactttattcatttattttaatagcttttggcatacaaatggtttttgattacatgggtgaattatatggtggtg

SEQ ID NO: 1880306 - DNA, 4001 bp, Homo sapiens
ctcttcaaagaaccaatttttggctttgttgattttctctattttttgctttattccattaatttctgctcttatttttattatttcctttcatctttagttttattgttcttttctagcttcttgagtggaagcttagagcagtaattttatttttctttttccttttttttttttttttttgagatggaatcacactctgttgtccaggctggagtgcaggtgggatgatctctgctcactgcaaccttcgcctcccaggttcaagcaattctcctgcctcagcctccttagtagctgggattacagacacctgccaccacacccaactcattttttgtatctctagtagagacggggttttcaccattttgacccggctggtctcaaactcctgagctcaggtgatctgcccacctaggcctcccaaaatgctgggattacaggtctgagtcatttcacctggcctaattttcaatccttcttctaaagctatcaaatttcctctaagcagtgttttagttgcactgtacagcatttgatatgtcttatttttcactgttcttgtcaacatattttaatcttccactgtgattattgacccattgattatttagaagtgtgacatgtaatttccaagcatttgcagattttccagtaatttttctgttattgacttttaattcagagaggacacactgtaagatttcaatccgttgagatttgctgagacttgtataaggtccatgatatggtctatttcgataaacatcctatgtgcacatgggaagaataagtattttatagtgttgtacacacgtgaattaggccaagttggttaatcctattgttcaaactgtgtgaggttgattcaaggataaagaaataaaccagtgggatagagttccgagacacacacacacacacacacacactcttcagctgatttatgttgagatgttggggactcctccaattcggtggaaaaaaaatgatgcttttcaataaatgatgccaggtcaattggatatctacacgaaaaaaaatgagctctagccccgtaccacaccattcacaataattaatatgtaatcaatcatagatctaaatatgagccctaaaacaagcttctaaaaggaaatacaggaggatatcccaataaaaaggtactaaccataaagaaaatattgataaattggacatcactaagagtaactcctgttcatccaaagcaaaagtaaaccacaaaatagaggaagatatttgcaataacttcaataaatgcgaatccaataatccatctacaatacaaagggcatgcgtccggaccaagaacacgtctccagactctggaaagaacctctacgaacgaagaagacaacccaattttcaaatggaccccggggaacacccaggcggctggggctggctctaggtccccactgctctgccttgcgggggccgctccggcctggtcgccttctccgggcgcatccagggaactcgctcggtcctccttaagcggggaagctcggaaagcgtctccccgactccgcccccagggttgcctttcccttagaaggccaagccccaagcccagcctctcgccagctgggagtcgcgcgctgcccacctcgctgcccaggcccccgacgccgcggcaggagccccccaagagcgcgggaagccccgtggacctggcgctcccggctcgggcgtggacggggcgggcgccggggcggggcgcgcgtcctcgcgggtctgaatggaagggtcgaggtcgtcgtcggcggcgagcagatcctgaagccagaactccaccccggcgcccgcgccatgcggcgggagaggtgagcgcggcgggcgtggcgtccgtgccggggtgcccggggtgccacgggaacggcgaggccggggacacgcgcgcaggacgccagcggcggaggtgggcggccccgggccggggcggggagggccgggtcctggcagtcgccgtgggggacgcgctgggctgtgccctccgcccccgccgcccacgcactcgtcttcgagggcgggcccggcggccccggagcaaaccgccgtctccccgcggccccaccggtccctggcagcctcggggaatgtctgtagctgaattcgggctctgaaagaaggtggcgctgggtttttaaagatttggggcacaaaaaacgagagcggacccggcgccggctacggcccttcccgagggccacgcccagcccggcgccccgcgcgccccgttccccgcgccgcctccctccacccggctgagcgcttgtgcccgcaggtgcggcgccccccacccgcgtcgccgccatggaggtgctgcggcgctcctcggtcttcgccgccgagatcatggacgcctttgaccgctcgcccacagacaaggagctggtggcccaggccaaggcgctgggccgggagtacgtgcacgcgcggctgctgcgcgccggcctctcctggagcgcgcccgagcgtgccgcgccggtcccgggacgcctggctgaggtgtgcgcggtgctgctgcgcctgggtgagtgcgccctggtgggatccccagctgcgcctcctcccctgctgggccgcagcctccctccgaggccgagatgggggtccggcccaggggcgcccaccccctgcctgggacggccaggcgctcgggacagggccacccaggcgggtgctcccggatctgccctctcaggcctcccacgccacaggcccccccatcagctgcctgctcagcccagatttcagtcatgctggccataaacaatagaaagctccagaaagaataatctattagtgggtggctaagcttccacagtgacccttgttctcagctgggcacagaaaccctttgtaggagcacgtgtcccgatgtttattttggaaaacagattcttgctgttactggccgagatcccgcccgctgccctctggattccgaggcctccgaggcccccccattggaaactgcgcccaccgggctgggtagccaaaacctcagtattcgttggtgctgtgaggacatctgggggtgctcggttctggggtcacacacggtccactggctgcccccaccgtctccaaggtctggacccaagagggagggaccagccccactgtgactgtccagtcccctcaccacagctgggctgtggccgtcacctgggaatgtttatgtgatgcccgaagagggcacatggggcgcctgtggctgagcccgggaaggggaggtgacagcataggtgaaactgaatcggtggctctccaggcagggggttggagtcggagggcacgaccccgtgaggggacacgctgcctcctctcaggctggcgctggcatgggctctaggtggcccctgcccttacgtggtgggctgggcccagagagcaaagctgtgtagacctggcctgcccaggagtgtgtgtggggtgcagacagaatccatggggaccagcacagagcctccaggaggaggtggagtcccatctgagaagttcagaaggagggagaggtctctgggtgggagctagggggttggtggggctccatgagatccgccgcctgctgctgcctctagtcgggctctgagaatgaccctaggggatccttttagtggccttctgaaaagatgatgccagacccctggaatggctgggaagaagtcccagatgtctagggggaccccagagggacacagctcagacctgcatctgccctcacggctgctcagggtcagtcccttgaggccagcgctgtctccctgcccttgggcagtgcagacaggaagaagcccgggttgtgtccccaccttcagtctggggccagcctgcagcagccccggagatctgtgtttgggagctgccgggtcagtcctgggaatttccatgtcgtcccccgcccccagccagcctctcatgggctctgctctgcttccagatcttaattaatgagatacagagcagcc

SEQ ID NO: 1880307 - DNA, 4001 bp, Homo sapiens
tggggtttcgccaatgttggccaggctgttctcgaacttctgaccttgggtgatcagtgcgcctcggcctcccaaagtctttggattacaggtgtgaaccaccttgcctggccaaaagtaccattttaaataaagaaaaggaggaattctgccaatacaaatctgtgagcttgccatgggtcacttggttacaagtgacaaacccattaaactgccttcagtgctcatttccagcattgctggtttccagctgtacaaagtcaaacatttgtctccttttatctgttttcttctttatcttgcttcatttccaaagtagttctccctgcatggttgcaaagatggttgccagcaactccagcctttctaccagcttagcaacatagaggaaaaagatcaatgtctgggaacaacagacactggggaatacaagactggggaaggaggaagggggcaagggttgaaactacctattgggtactatgctcattacctgaaggacggattcgttcatactccaaacctcagcaccatgcaatatacctctgtaacaagcctgcatatatacccccgattctaaaatagaagttgcaaaaggaagtccctctaccaattctcattggtctggctcagaccatggggccgaccctaaaccagtctctgattagccagacttgggtcctgtttccattcctaaagctggggataggtgcgcctcatctaaaccatgctgtctgaatagcaagggaatggttcaccattactaccctgcttgagaaaaaatttttttgacagtttaaattgcatcattgacagcaatgaagaaaacttagcaaatcatctctaaacattttaaaagaatgaagcagaaaatgtaagacaggctagtaattgatccaaaggagaaattctgaaggccagaacataggagtcagttaatactgtaataaataaattagacaatatccatatataacaactataggtccaatccatccaagtgcaacgctgaagggacgtattgattgcataggccagaatgttggcaaaaagctggtaaatcctgcagggtgccaccagaccgcgtgctgcaaacaaataacagctagagagaggagaggcttggttgaatttcggccttgactggtctgaagactccagaggcgggacgaatttgcggacagttctaccccatcccacatggcgtcagcttcccttccattctcatgactccatggtccatggctccaacctgggcctctgttaggctgtgtcctgtggcaccttaaactcaggcaaattaagaactgttcgtggactctgctcagcccccacctaaccctccatccaagtcattgtccaagccagaaactggagtcatctcagataccttcccactcacacctccacatgcagtcgctcgattccattcacctcccaagtgtctcagttcattcttccatccctcccgccactggtttagttaggcccctccattctcacctggaccatcgcggtagcctcggagcttctgactgtgtctctggttgcagcccctacacgctctcttccttacaggagcggagcgatctttctcaagcgcgaatcaaatccttccacgagtccccgcacctggagcgaaggccaaactcctcagcttagaagctagactgccagagtagggagtgggaatggaaaagtacatcaggagcacgaggggtattcggatgagggaaggccagtatagggcgccgagaccttggagtgtttctgagctgaggaggaatgagactttcacgcgggcaaggggaccctatccatgaaacaggccctggggagactgaaggagagcggcgcgagcgaaggcagagggcggggccccgaggtcggcaggcgctgcagtgtcgggggtggcgagtcagccagggccaggggatggcggggtggggccggagccaggcgaccggaggcctccggggcggggccgggaggctgacggcctccgggcggcagggggcggcctctcccacggcggcggctctcggtcccccgctccgcgtctttcgggcatacagtgacctcgggcggcgggtcacgtcggccgggcatggctgcatggagcccggccgcggcagcgcctctcctccgcgggatccgcggggtgagcgtgggcagggtcggggctgctctccccgggacgggagctgcggagggaccgcggggccggcggctgtcggggcttgaggactggctcccggagggcgcgcgcggcactggcaatggggggctcctcttcctttctctcattcattctttcattcattcattcactcagcgacaacggcattcgaaatttcaagctctggcgcgctctaggggagctcccgagctgggtggaggttggaggtcaggcggacagacacatgaacagtcataatactgcgggcacaggaaaaaaaaaggattggtttaccgagcagaagacaggagtcatagcccagagtcaaggcgtgggtgcgagggactgcagcggggccggggccttgggaaggtcgactgggcctctgaccttgatcctcctccaaatcccacactaccggagcagaacccaagcagggggcacttcccacgcgctctcctaatctctccccctttctgaaccatcctttgcttcagctcataccattctttctcttaactttcattttccttctcccctggttctgaacctgcctgccctgtgcatgaagagaagttcttccactgcggtgactttcagcgtggacagtgatcatctggggatgtcagttgattgttccactaaaggccgctgcccacagatccgctaagatgaaaggcttctcccaaggattctgcaacgctcacctctctcaccccttagtagctgccgattctgtctgccatctggttactctctgcctttaccctcaagattctgcccccagaagcagctccaccccaccctcactcctggcaatcctgtccagcctctcaacatcgagtttctgtccctccacacagcaggcagacaatcacactctggacctttctcctgtcttgcatttctgtccctaattgactagttcttcccctgctcattcattcatccagcaccaagtgcctctgagggcctgccctggggtcagctctgggatgctgccggactcattcctggcctataagaccagtggtgagagagccagtgcacagctcattttaaaggaggtgctctgagattctgtgacacaggaccctgctctgagctatcaggaaggactgaggggtagaggggtgggaccttcagcaccagcacccatgaacggccctagtgtcctccaacctgtcatccacgtctagtcagggaccagtgcccggtgcttccatcattgtaatgcctcttacttgggcatctctcctgactcgctccagaaggcactgtttcctgcaggttactttggtcccatgagcctgggttctatcacctggagtcccatctcctgtcccatacagtccacaatctttagcctggcattcaaggcctgccacactccattcccagtctgccttttcagcatgcactcagcccagccaagtgactgccgacctgcttttctgctccttcactactaactgttgagacgtgttccatcagaaacatgggctcccctggccgggcgtggtggctcatgcctgtaatcctagaattttgggaggttgaggtgggtggatcacctgaggtcaggggtttgagaccagcctggccaacatggtgaaacctcatctctactaaaaatacaaaaatttgccgagcgtggtggtgggtgcctggaatcccagctactcaggaggctggggcaggagaatcgcttgaacccgggaggtggaagttgcagtgagctgagattgtgccactgcactccagcctgggtaacagagcaaaactctgtctcaaaaaaaaaaaaaaaggaaacacaaacaca

SEQ ID NO: 1880308 - DNA, 4001 bp, Homo sapiens
ctcttctctaactcccacctttctaatctcagtggaaatttggtaacacagcttataaatattttaaggtaaggttaaattggttacatgaagaccctagacctattttctgagtagaatacaggtggtttggtgcagcaatttggtgacttattttgattgtcccaaagcctttttgtttagttccacgttctctattaccctttggaaaagcaacatttcaggacgaatgaggtgttactgtagcatacctgatcatttttataacacaaagtagcattacaactgaaaagatattcatcaaaagactgaactgcagtaattggagtggtaggattttcttggaatatctgaatttattactaattttacagtgaacatacattacttttgtaatcagaaaagctaccttaatttaaaaaaaagaaaaatcagaaggatctgtctactcaatcttactgacctaactcaacaattttcatttggcatattttctatcataatttgatcatcgttttcagaggttgtaaatactgtgtttatgtttttattttgattcatacttggcttgctgaaaaatacgctgtaaatataaaatactgcagtaatgccgacaatcaacatggtgaaaggtgacagtctttttgatttctgctcaactcattattttatacaataagctcagacgaataatacccaatttggataatgttacgcttgacaaaacactttacttcatttagtcctcacaacaaccctgtgaggtaggcacattctcggaggtaaaatgacgtgggcaaagttccctggctcgtttggggaaaggctcagcagccgggccaagaaaggtctttgggggcgcaagtctttggagggcaggtctttggggagcgctttgagtaatattagagctttcactaaaccctggcctattacgtcccctcccctgagatttacctttatatactcaagttctttcatgccaggaaggtaggctgaaggcttcgaaaacctgcagctcatacccaaagctagcactgtctatccctggagacccagcgcccaaaagctccactgggcgcatagcgcacggcacgcctcctcccccgagccgcagactgagtaactggccccggactaacctgaccaggtcggtcatgcaggagcccaccactaccaccgccgccacctcctcttgccactgcctctggggttccccagacgccgccatcgctcaaaggtgctgctgtccaacctggacggtgacctctgccctttgcccgaccccgtaaccagagacgccactcctgccctccctaacgacgcgggcctttcagacgcctacgcgggtcgcccacctgactgcccgaaatcaccccgcccaccaagtgtcccctcttcttcctggaatagtctcggtgcacagcctcacgtaacagggccctcctgatatggcgagactccgcgctcctcgtcactcacggggcaggcgctgaggaaggaactgtcaggcaccgcggggacgcctttccgagcgcccggctcggcgcggcgcgggggcgcgcacgccgcccagcttcggggccgcagagggggcggggcgggacgtccggggagtgcgcacgcatcctgcccgcggcgcgcgcgcaggtcggtgcgtctgtcgggggcgcgctcgggtacctgtaccccacgtagtcgccggttaccgatcggactaagttccaggtacctggactggggctggtgcggggaggttggatcccgagtcgcacaggtggcgtggagaactgtggtttaaatatggccaggggactcgcctcctcttcctatggagaaggcccccgttccaaagatgcccttctcatccccatcacgctgattccctcaagaacgagcccccaaggccagaggcgtctctttctccatatctggcccatcccctggttcctgtaaaccccgagtattagttccttgttgcctgatgaggggaatcatacagtttggaagaggggagagtgtccctttttaagacgtcccctagagtggggtggtcattcttcgggtctgagctaacttgtttttctcgaatgttgccccttgggggaaattgcttccccagtgtaacttccctcgtgcgctgtatgacgtcgacgtgacgcagcaggatgccacccctttccgttccatgacgtcagcagggcacatgtttccgtgtttgtcatctcattttaattgcaagaacctggatggtgctttagacgtctttgtaatccccaggcctctcatcaaaggaccttttgtaactttattttggggtagcagacccttgcaaaaattgtaattttgcattttccttttgcaatacgtcaaaatcaggaaatacaaattgcagtagtagtattcaggggactctgaccaccgtaaatatttgtatatctggggtgtattatagtgctgccatgcgtaagagttactaccggtggtgactccctgtccatgtacccggttcactgcaccaaaggaccagtgtttttggctaagtgacttctgattttggagtcattgtgttccactccccaccccccgccctttttttttagagaagtcacacctcctcatggttgaaatagattttaatactgcgtgaaaccttgcactgttaaaacatagtattatggctgccctggaaatagaattcattccctcaggtgtcatcctaaagtcacgaccgttgctgaattagaatgtattgttgtcacttagtatggtttggcttctagagcaaggctgttccctttaacatttgactagtgaatcactcagaccaggttcagcagtaggtcagcaatagtccagtttgtttttagtggtaaagcaatcatttgtttaaatttttactttttgtctgttcacattttataagatatacgctttacaaaatcaccttgatgcttttctctttggtgatagaagttatcaatgtttatttgagagaaagatgggtatagtggacttggagaatccggatttggattctgatcctccagcttccaacattcaacaagttattttattttgctgagctttaattttctatttgtcaagtttctttagcttccacttgtcaaatgggaacaattattgttctcagggaacagagttggggaaatgtaaatgaaattacagatagagatgagtaatataatgcctgataatgggtagataggtgtctagaatgtgttggttctgtttccttcttttgtagaagcaagagataaagtaataatgggtactgtggggaaaaacacagaagaacaattcggtaatataggtgagacccttttgcttttttataagataggtatatttgtacttagcatatgactttgataagcatcccttcaagaattgtgacatagacatgaaggtggaaatgttggcgaatagaaaaaaataggcttcaaaattatgatgtggattagtatactgttcagaatcaaattataataattacccatattatctgcaaactgggaattaaaattccttactacctcaggcttgtgaagatcaactgcagtaatatatatggacgctccttgtaagtgataaaatgtttaaaaaagtacatgatttttatgattggtagtacagtgttagatgtttagtcttactttgaaatgagagactagtcggggggcggtcatctgttaagcggtcagaagaagagcttgttttatatttacaaaaaggatgattttagaactgaagtatgaatataaaggtgttaatctcgaagatacttctggttgtcatcactatatagggtcaaagtgttcttattttttgagctatcaaattagcaaataaatttattacttactatctgaaataataaactgaaacaggttttaattttcaacatttattttagcaaggacttgtaagttttcatgtggtataatgtatgaaaactagaaccagagcatcatttactg

SEQ ID NO: 1880309 - DNA, 4001 bp, Homo sapiens; identical to SEQ ID NO: 2651

SEQ ID NO: 1880310 - DNA, 4001 bp, Homo sapiens
acacctggctaatttttttgtttctttttttttttcagtagagatggggtttcaccgtgttagccaagatggtctcgatctgacctcgtgatccgcccgcctcggcctcccaaagtgctgggattacaggcgtgagccactgcgcccagccaaggtgggggaatttatttttttaaaaaagcaaaacaggtttatttggctcaaaattctggtggaaatttcaagattgggcagctgcacctggtgagggcctcatgctacttcaactcaaggcagcaagtagaaggggagaggcatgcacaaagagattacgtggccatatggcgagagaggaagcaagagacaaccgcaggaaggctgactctctaaccagctctcatgggaactcacccctccacaaaggacactaacctatccatgagggatccacccctattacccaaactcctcctactaggcaccacctcctaacactgcctcattgaggctcaaatttcaataccattttgggcaggggcagaccacatgcaaatcacagcatggggtaatagtgggggcaggttgacacagggctgctgcctacccagcaccagctgtctcttggccccttccagatcctggcaatctggctacaggcatgggcccagccttggacacagatgtggccacaggaagctgttagctctccagatctgatcagcctgggagagcggcacaacaaaggctcccaaaggagagtcgggatcctcagctagcctcagctctgctacccacccatatgtgcccagaacaggaaagatacgtgtttcttactcctccgggactcctaggtgaagctgagaccaggctcttcttgagtcctctcagctatggtgcaaccaccagcctagcaaggaatcagaaacatcttccggaagagtcagcaccatagagggtgctgaatgggcaatgaagcatcccggagatgaaacatctgggcagtgaggcatcccacaggtgttgggctatgcagtcactccctttctcagaccgaggcaagtacataagcactctgggcccctaatcaggggcctggggccaggtgggatgaaaacagcagtgtcctgccacctgaacaactgctactcacgcaggccccacctggcctctcagagggaggaacctgggactcctgaaccagattcagtttctccttcaacagccgggacttttcgctcctgactgcagaaaaacagcttcaatgtgaccatccttgatagtccgaggctgagtaaaatggcctgaggaggcaaaatctgaaaagctctattaggtggcaaactgctgtcactagaagagttgaggcccccttctcctcccctgcctgaccgccttcattcctgggaatggaacaggttcttggggcaagggtgaatcctcgagcaggtcccaggatcactatcctcacctccccgcggcactgaatggctatagctgtaaatgtgcgtccacggggtcactgtccagccaccaggaccaggtgcctggccatctggggaatcggaaaacgctcagcgggatgctctggccacctcccctgcccccagttaagatgtagagcgttcaacctaaaatgcctagaaacaaagcccaggcccgggaaggtcgaacgagtgcgacgccgctccctcaagctcttccctcggagccgtctcatttcccaaaactcccaaacacatcacagagagaggtgttgagccaggtggtcactcccttttccagaaccacagcaagaagttgagcctgctgggctcctaacgaaggccctggggcccggtgggatgaaaagccctattaggtagcaaacagctgtcactagaggggttgaggcccccttctcccctgcctgacgacgacggcggcaggaactcgaccggcgccggacagctcgcaacttgccttaccaagcgtaaatctcggttcctcccaactacccgcggccacggcctccgcagcagagcgccggaagcagagacgcgtttcgggaggaaggtgcatgctgggagcggcggcgcatgctgggagctgtagtctgcgacgcaactcggccgaggtggctccctggtccctgaagctcccagagcccgcgtgttcaggcggtcccgacaccccggcccgagcctcaccggctggaggactgaacgcctgccggccctccgggtatgagcggaggccgggatagccctgggctccgccgcccccggaaggaaaaaatacagtgcggtccgccgcccgaccacgaaagagcggagctcgggagccccgccccctgggcctccgacgtccgtggcgctttccgtcgcgcgagtgcgattgggccgcctgtcacgtgacccgagaccccacgcccggttggctgccgcctggttaccaatgggagactagcgggccggcgtactggcctggtccagcacctgcggggccctcgggcttggagggctgggccgggcggggaacgggcggggcgggccggaggcggcggcggctgactcgccttctctccggggctgcgaccccgaggcaaccggctgcagatgggagcccgcggagccgaggatgcgggcgggccggggcgcgacgccggcgagggagctgttccgggacgccgccttccccgccgcggactcctcgctcttctgcgacttgtctacgccgctggcccagttccgcgaggacatcacgtggaggcggccccaggtggggccgtgtggggtgcggtgggcgccgtttctggtttctgagatctccgctcctcgcagggagcggggcggggtgggcggccagggtagctccgaacgcagggtccgccgttgttctcctcagaagtgggcgcccggccccctcttttcgtacctccttcatacccccgcccagaacgagcaggactcggcgctaccctaaggacgctaaactaggtcgtggcctccgcctgcgagagctccaatccaggaggctcagagcgctgcgagaggcgttttaacagagccccaaaccccgccccacctgtttgctttcgccctgaagagcgtttgtgtctgctcctcccgcagagagggccgctcgtgcccctctgaagtggctaggccgagcccacaaagcaaagcgtgatagaatttcagttttggattttgtgcacctgcctttccagttgtaacacctagaaatggcacctccaagggatgccctggccgagtgctgtgttcatatttttagaaatggtttatctgctgaataagactgcccagggagcaaccttgccctaagtggatgcggtcttagcggagacaactgatggccgccagtcttcgaacagagctggaacttctgggctctcgtgactgagatggctttgacaggccacctggtttccttggacaacactgaagggcctgggaggaggcaagggtcagaccatgtagagccttgtcattggaatttgggttttattttgttaaaagattgattttaggtgcagctggaggccactagagggttttggtagaggagtggttctcttggatgtgtgtttttacaagctcactcttgctgctgggtgggaagtgggttgtcggggcaagaatgcaagggtccattgtagtggtcctggagaaagatgaaggggctcagattagcttgacgactgttaggatgtgggtttggagtagattggtttgagacgtaccttgcaggggggatcgagaggccatagtgactgattgaaatagagggtgaggatagtggagggatcaacatgccttctgggtttctggcctgaacaggtgggtggatggtggtcctgggacagagcctgggggtgacctagagttgggctttgctctcacgtcttcaggtggagctgtcctggaggcaggtggatctgtcctggaggcaggtggatacggagcagggataggctagaggcattcttctgggaggcggagcatattagatggtttacagtc

SEQ ID NO: 1880311 - DNA, 4001 bp, Homo sapiens; identical to SEQ ID NO: 2698

SEQ ID NO: 1880312 - DNA, 4001 bp, Homo sapiens
ctcccaggttcaagtgattcccttgcttcagcctcccaagtagccgggactacaggtgcctgccaccacgcctggctaatttttgtatttttagtagaaacaggctttcaccatgttggccaggctggtctcaaacacctgacctgaagtgatctgcccatcttggcctcctaaagtgctgggataacaggcgtgagccactacaagtgtgagccactgcgacaggcctctttctctttttgagacagtctcgctctgttacccagactggagtacagggatgcaatcttggctcactacaacctccacctcccaggttcaagtgattctcatgccacagccaccaaaatagctgggattacaggcgcccaccaccacgtctggctagttttttgtatttttagtagagacggcgtttcactatgttggccaggctggtctcaaactcctgacctcaagtgatccacccatctcagcctcccaaagtgctaggattacaggcgtgagccaccgtgcctggccaagaggctccatgattttcgagtgctgtacctctaaagatcctttttgttttttttaaacagggggcctaatacttgccaagccctgtgcgttatttggagatccagaaatgaacaccacccaggaacttaataaacaagagagggaggcagaagtaaagaggcccgggacaggtctctcaaggggcactgtcatgtaggagtctgcttaggctgccataacaaaacaccacaggctgggtggcttcaagagaaatatatttgctggaaggcaggaagtccaagatcatggtgccatcagggttggtttctggtgagggctgtcttcctagcttgcagacaagtgccttctcaatgtgtcctcacatggcctttcttccgtgcatgagtgaagagaaagctctctggcatcacccttttctcataagggcactaatcctatctgattcgggccccacccttatgactgcatgtaaacgtaatgacctccccaaagcccctacctccaaataccaccacactgggggttagagagacaattcagtccatagcaggcggtctgggaagattctcactctcacatgttgtgttgcactccaggcacctggccaagagaatacaggtgggctccccagggtgctgcatcatcaccaagatgcccatcttgagggaagagggtgagtgaagcccaggccttgtgcaggcagggagagttaaggggagtggggaaacctgggccttccaggatgcagggggctggacccagtgtgctgtaaacgggacaggagcctggaatcagctggagaacatctgccctccagcccctgaccccaagcaataagaggaggatctttcctactggaagtcccttcctgcaactctgcccatgtgggcagaatcctggggtttcacctgagccttctgtttgggtgttctcgggatctcgctgtgtatccaaggaaggttccggggtagggacgcccagccttccttgttccccacctagatgagattgagccacgcccagtgtttgagaagaagcccctggtatgggaggaggatatggagctctattcgaagttcctggaccggaaggtgaggggaggctccaccagcctggggttcccattcccccatgggccttaaattcattactgatctctgcacctgattgaaatgcacacccgtaggggctagaaggctccagcgccccttagctctccttggagcgagcggctgggggctcctggggcgcgggggtcccgtccggctgaggctcgggctctgtcccctgccaggaggagctccggctcggccacgccagctatctgcggcagcaccccgaagcccacgcgctcatctccgacttcctgctcttcctgctgctgcgccagccggaggacgtggtcaccttcgccgccgagttcttcggccccttcgacccgtggcgtccgtcgtcaccggccttgggctcctcccaccggcccaaccctttccgctccctggagccggagggagacgcccgctcgggggcggcctaagcggggcccaggcccggacagggcaggaaaccaggggtcgggctgggacgcgggcgggacgcgccggggcgggtgcgctttccgggctgcggttttgggggaataaatggggccctcccgcttctctgcagcgcccgtcgacagcgtccctggctagcgtctagtgtctcgggctagaaataggaaccgttaccgtcgtacctcgagtagatttcagcctttcctcctagatgctgttttcatcattatccccattctacagataagaacacagaggcacagaaagtttaacttttggagttggcaggtggggaggcagaatttgaacctcaacgttggacttgaaagcccacactcggccgggcgcggtggcttaaacctgtattgtcggcactttgggaggccgaggcgggcggatcaccaggtcaggagatcgagaccagcctggccaacacggtgaaaccccatctttactaaaaatacaaaaaatagccgggcatggtggcgcgcgcctgtaatcccagttaggaggctgaggcaggaggatcgcttgaaccccggaggcggaggttgcagtgagccgagatggcgccattgcactccagcctgggcgacagagcgagactccgtctcaaaaaaaaaaaaaagaaaagaaaagaaaaaaaagaaaaagcccacactcttactaggttagcacggaggggcgggcgccttggcactcagatcttacggtcgcagagcataattgcccaaccaaccgcccaaagaaaaataacaagcggcggggggttggggagggaggagggccgacgtggaccacctctggcttagctcaaaccccctgaaatctcgcaaacgcagctagcactcaggctcgagctcctcccggttcccactgacacagagggacccccagactccggaggtggggggtccgagagtaaaaataatgggcagatgatcgtcgcatcctctgggctcctcgtggaacgtcagtgctggccagtggcttctgtccggatgctcagtagcaaactttaggcaagctcccctgagggagtggtggcggtgcaggctctctccttcccttgttcgttcgtcagacctgctgctgcagactccagagacgctttgctctctagtggacggtatgaccagacacctacaaggctgggttggatgcggggctggggggaggacctgagaatcacagacaaaaggcttcatggaggaccatcacttgagttgaaccttgaaggattttttaaaaatatttcttattgtccctctcccttatttcaaaagaaatacatgttcataagataaaacttgggaaagggagataaaccaaaagaagaaaacgaaatcattttactctctctacctagaagcagctgctcaacgttttggcaaatatcctctctactctcctatgcataaaagcagctggtgtttgttgagtgttcactctgtcaagcccttttctagattgtttgatctggtctttataactccagggaactttatttatttatttttgactggttcttgttctgtcacccagactgaagtaccatggcacaatcactgctcactgcagccttgacttcctgagcccaagcgatccttccaccccagcctgagtggctgggactgcaggcatgcaccaccacactgggctaaattttttttttctttttttaagagatgagggtctcactatgttgcccaggctggtctcaaactcctggcctcaactgacccttccaccttggtcccccaaagttctgggatcacaggcatgtgccactgcatccagcctcaatttcctttttcttttttttttcagagaccagtctccctgtgttgcccaggctgcttttgaactcctgtgctcaagcaatccacctccctcagcctcccaaagtgctgaggttac

SEQ ID NO: 1880313 - DNA, 4001 bp, Homo sapiens
tctaaaaaaaaaaaaaaaagcgcctcaccaggaataagtccagtcaaagagtttgctatgttgtcattgttgttatcattattgttacatgtattagaactgtaacttgcagagatattcatgtagcagctaattggatagtgtgcatttgagactctgtctgactttcgttcatatcttctaaggtcatttttttttttttgagacagattacaggcatgtgccaccactccctggtaatttttgtatttttagtagagatgggtttcaccatgttggccaggctggatctcaaactcctggcctcaagtgatccacctgcctgggactcccaaagtgctgggattacaggtgtgagccaccacacctggcctcttctaaggtcattctaatgacccatttcttcactctgcctcttaagaatatcaaatgtgggccaggcgcggtggctcacacctgtaatcccagcactctgggaggctgaggcaggaggatcacgagctcaggaattcaagaccagcctggccaatatggtgaaaccccatctctactaaaaatacaaaaattagctgggcgcggtggtgtgcgcctgtagtcccagctactcgggaggctgagacctcaagaagaattgcttgaacccgggaggcagaggttgcagtgagatgagaatgcgccactgcactccagcctgggtgacagagcgagattgcgtctcaaaaaagaaaaaaatatatatcaaatgctccctctgctggacaacacctcaagcttgtgctgagccccaaacctgcagtgtcagttccctccaaggtctgggtgtagtaaagtgggttgatggccctttaagaggcactgtccagctctggttgccatggagacagctggacacagaccgggtagaggcaggcccacagcatgtcctccaaggtttactccacaggtgggaagaggactgctggggctggaggcggggatcctcttctttcttcccaatccaccctcggggtagtcttagaggattctgttcttgggtgctggggccaggactgaggtaccctgccttgcctccctgacccctgcccttctccccagggtctgccatcttagcctctcatccctctgtaggctccagagctaaggaccaccagccctcgggtccggagtgtctgccactcccagaggccaatgctgaagccatcgacttcctcagctccctccgtgagctcagacagtgtcggggttgggggtgcgggaggggtgcaagtctggagaggagggaagaaagtccagtctctctctctctctctctctctctctctcttccttgattctcctgggactcagaaaaggcctgaggcctgtttgttgacattcttcaagggaaggccccccggggacatggggacatggggcaggagtcttcacctgtccgtgccagtgaggaaggctgtgggatgaggaggcaggtggggactgtggggacactggtggtcatggggtcagaggattggattggggcccaggagcaggggctttatctgttcccacgggcccctcaccccagacaaggaggagctacagatgctgttcttctctgagacgctggccatggtctcagacaccggggagcctcagggagagctgaccattgaggtgcagagagggaaataccaggaaaaactcggcatgctgacatactgcctcttcgtgcatgcctctagccgaggcttcttggacaaaatgctctgcggaaattccctcctgggtagcgttcctactgcctgatgcccgtcactctccccttcctccaaccctcccctccaccaattcctagaatcttttttcaggaccaagcccttggctttgccttggaccaggacaaggcacggggtgggagagggatgagcgagttcctcatggactcgggatgagggcacatcttacccatcctgtagtttttctgggaccgtattacacctagtcctccagctgcgccaccaccttcccttccttcagcctctgacccacatctcctgtgacgtcaatgcctgtgtccctgcaccccaggctatctctcagagaagctggagctcatggaacagcacagccaagacttcatcaaggtacttcccagggccccagccttgacccaatccaggggagagaagacagattttgacttaaaaaacagcagcaacaacaaaccaaaaaacctattacatacacagtgaagctgaagaatagcaatcgtgttatgatgcaatgtaaagctcaaaagcaacgcacttcagaaaactgattttaaaacacgggggtgggctgggcacagtggttcacacctgtaatcccagcactttgggaggcagaggtgggcggatcaccctgaggtcaggagttcgagaccagcctggccaacatagcgaaacctcatctgtacaaaaattagccaggcatggtggtgcacgcctgtagtcccagctactcagaaggctgaggcaggagaatcgcttgaacccaggaggcagagattgccgtgagccgagatcgcgccactgcactccagcctgggtgacagagcaagactccgtctcaagaaaaaaattaaaaaacaatgagggtgggccaggcacaatggctcaagcctataatcccagcactttgggaggccaaagtgggaggatcccttgagcccaggagtttgagcctgggcaacatggcaaaacccaccaaaaatgtttataaattttgtacaaaaaatacaaaaagtagctgggtgtggtaatgtgtgtctgtagtcccagctacttgggaggctgaggtggaaggttcagcggagcccaggaggtcaagactgcagtgagcaatgtgcgtgccactgtactccagcctgggtgacagaatgagaccctgtctcaaaaaaaaaaaaaaaagaaaaaagaagaaaaaagatgtaggttgggcacggtggctcacgcctgtaatcccagcaatttgggaggctgaggcaggcggatcacctgaggtcgggagttgaagaccagcctgaccaacatggagaaaccctgtctctactaaaaacacaaaattagccgggcgcagtggctcacacctgtaatcccaacactttgggatgccgaggcaggtggatcatgaggtcaggagttcaagaccagcctggccaagatggtgaaaccctacctctactaaaaatacaaaaagaaaattatccaggcatggtggtgggcacctgtaatcccagctacacgggaggctgagacaggagaattgcttgaacccaggaggcgaaggtcgcagtaagccaggatcacaccactgcactccagcctgggcaacagagcgagactctgtctcaaaaaaaaaaaaaaaaaaaaaaatgttggggatggtttctggtttctgtgggaaggtttttagacttgagtagtttccagtgtgtaaacaggtcatgttcacattccacaagttaattaagtggctggggctgggtgtgaggggcacagagctgggagacttggaggccaggtgaaacaggcccccagggaaggctaggctctgggaaaggccagcccaccaggcctccagggaggcactgggctctcaggctggaggagggctggtgtgggctgggttcagagtttgggtatcaggagaacttatcagtggcaacctgctgtccctgcacctggcccacccccatcttttaaaaccagtgttctgaagtgcactgtttttgaactttatattgcatcataacacgactgctattcttcagcttcactgtgtatgaaaggtgttttttggtttttgttgctgctgcttttttttttttattttattattattattatttttgagacagagtcttgctcttatcacccaggctggaatgcagtggtgcaatctagctcactgcaaccttcaccttccgggttcaagcaattctcctgtctcagcctcccaagtagctgggaattaca

SEQ ID NO: 1880314 - DNA, 4001 bp, Homo sapiens
tctcttttgttccctgctgtatccccagcagctagcatgaacccgaatgctgccaacaaccagtaaatgcttttggaaaaaataatgggtgtacaacggaagtttggatggaggaaaacctgcaaagcctttcacagactaaccccagccatggcagcagtgctcaagtgttccctgtggatagagggtctgagggccacagagccaaacaacacggtccactcaccatcccggaagcttgcttgagcctgacgtagactgtgaggaactaggattccaaaccagttcagggggtcctgaggggcctcagaggactccggttctggggtcttagtggggcccttgcgcctccgcagacctgaggaaagaaaggttggaggaggctgggatcttactccctgacctttatcatcttggtgacaatgttgagcttgatctgagctcatgattctataaaacactgttggttggaaaattccaactttggggttccaggaaacagcttaccacaaaacacagcctttccccttgtgattcagatgagactgtttgtccactctttcccgtgactcctgtaagacccactgatgaccctgtttgcctgtgacactgatcttacccattgtacctgaacatgccaacagaccagacatagacgttccaactccccattctttgtctcaggatgattaactgggattagaagtttgtccctctgaaactagctagacacacagataaatattttctgttcagctgactgaaatgtatgtgattgtaaatctattcccagtgtaaagcaactcaccaacaatttctctacttcctataaaagtctaaggcaaaaccaccctacaaaaacattctgttcttctgctctgggatgctctctcttatcgcaaaaacctaatttaaatcatctccataatttgcattttgtctttgacactgggaaggggttctgcagaaggaagagggggctcacctgcttcgcgaggccccacctcctctggggcgtggacaccagctctcaccaccttgaacttctggagtccctcctgggcctcgctgaaggacgagaagggaggatggagctttggcagcccgggcctagaacgcgcccgcccgcccacccagcccagcatggaagcttcctcacctggcgtggaggcagacctggggctccatgtgggaagcatactgcaggggccctaccgacttggcgcccatcgcgtagcgagccttggcgagcgagagccagccctgcagggagaggaaagcggtgagactcagtttacgcccgtgtaccctcctgcccgccccaggcgcctacctcctccacccgggcgttcaacaccgttcgtttcccctccagctcctccaggtccccaagcagctgcaggaccagcgaatccagctccgctcgcaggtcaagcgccgccatggacacacctccagatctggagccaccttcttccttgtcaccctccgcagtttggcaggacagccaataggcacacgagatcctccatcaaggggcgttcccatctggggatccccacgccggcagcaccaaggcctctgggtcagcttctttaagggcaagcgcccttagagaagcagcacggaagcaaccaatcaactggtttctccaattagcccccaagtggatcagcctgctgaactgtcggctagggttataggtggttctgagtccttccggaagctgccgaatcttagaagtcgcgccactgttgtggcgatggaagaaggcgaagctctacagaaaccattttggttgagggaagagtggttttaaagttaatttggaaaggagccggcaagcaaccttcagtcggtgtgcggtttttacagttgaactgtttccagccgctaattatgattgttttagcggttcgtcatctgaaaactgcattctgcacggcggtggtggggggaggacgaggatggagaagcctgggcggacatatttattagctgcggtcctaagtcacgtgtgacattctgtatccagtctatcggttatcccaaggagaacgccctgccggaatggccaatcgccttgagatgtccccgccctattcgccatcttaacatagggcattccccacagctgcaggcaccagtgaagcgtctaagggaccatcttggttgagggcggaagtgaggactgtgtcgcgctggaggagcccacagattctcccggacccacgtggaagcggcactcaagatggtaggagaatgagctcctgtttcggaggtccggggcgcgtgaagtgctggggatgtggctctggggacttggaggctcagcggctccggggctccggggttccggggctcgggagcgagtagtgagtgactgggcctgctgttcccacagctgcgccgcgaggcccgcctgcgccgcgagtacctgtaccgcaaggcccgggaggaggcgcagcgctcagcccaggagaggaaggagcggctgcggcgcgcgctggaaggtaaggcatcggccccgcgggcgtctgcgtggtaaaccaccccggcacgcatttgtgttcgaatatccgagcgtctttccaaatgcttgccggccgttttccttgcccattgggttctcctgttggttttgagagtgtttcttccgtgtgatggtattaattacttgtcactgacgttgcagtacccgggttttgcagcttgcccgctgtgtgcagtgtgtcaagttcgtcccaagttttaaagactttatcttgtcctgtagaaattctctttagagcggtggctcactgctgtaatcccagcactttgggaggccgaggcgggcggatcatgaggtcaggagttcgagcctgaccaacatggtgaaatctcgtctctactaaacatacaaaaattagccggccgtggtggcacgcgcctgtaatcccagctactcaggaggctgaggcaggagaatcgcttgaacccgggaggcggaggttgcagtgagccgagatcctgccactgcactccagcctgggcaaaaaagcaagactccgtctcaaaaaaaaaaaaaaaaagaaattctctctaaagactatctggatagcgctggtgctgcagactgcgctgcccatcctccctgcaggagttcctctgagctccgtggggaacagtgctggccccgagtgcgcacctggagcgctgtgctctgcggtaggcagcctgtggtccagggcccgctgaagccatgccttcgaagcgctgtgggcatcgtgaccaacggttttgctgtctgagagcttaaaggtctctggtccaccatcatacgtacagaacagtctatatttcttttcaaaagtaatttttaaggccgagcgctgtggctcacgcctgtaatcccagcactttgggaggccgaagcgggtggatcacgaggtcaggagatcgagaccatcctggctaacacggtgaaaccccgtctctactaaaaatataaaaaattagccgggcgccgtggcgggctcctgtagtcccagctactcgccagcctgaggcaggagaatggcgtgaacccaggaagcggagcttgcagtgagccgagatggcaccactgcactgctctgcctgggtgacagagcgagactccgtctcaaaaaaaaaaaaaatcgatgtttagatttctacctgattataaaagcaatacagtacattaagatattttagaaagtcctcaagtcatgagactaaagaaaatgaagtcctagtaaccactgtttatgggggttggcctgtagaaagttttgtcacctctatccatgctttatccaagctcagaaagggctgaggtatttttatttcaagcatgtgcaggctaataagctgtggtgtattggatgagctgaggtctccatgcttgtgactcactcagcccctctctcttccctctgcagaaaaccgcctgattcccactgagttacgccgagaggctctggccttacaggggt

SEQ ID NO: 1880315 - DNA, 4001 bp, Homo sapiens
attaaccccgtattgtcccctagctaccaggctgtatctctgctcctcttctcaagcaaacatttttaaagagttgccaatagccattaaatgtctcttttcatcttccagttactgtcactcatttgatttagctttgccctcaactcctctgacactgcttttagcaaggtcaccaatgaactgtgtgctggcaaatctgatgaccacttctcaattttcatcttattgacttcatgacaacatttgattcagttgacaactaccccatccagagcatgcttttctcttggcctctatgataccagcctgcttcacctcttgcttctctggtcattcctcaattccttttctgactcctccatctctatccatctccagatgttgaagtgctccaggattagaccctttaactctatctttttaattgtattatccaaggggacatccttcaatgctgtactttagttttagctttaaattatgtcttttaagtgttttttaatctacaggcttccccctccatccattttccctgtttgcattttatttattgaagaaacaaagaaatttatatgcagaattccctatgctggattttgttgactttatctttttggtgtactaatagtttaatgtattcctctctcctttgttctttgtgtttgccataaattggtagttgacccagaggctttatcagacataagactcaggtcgttctcttcttttcttttttccaaggctactttattgtggtggtgtgttcccccagcaggatatgcatgttatcggatggaacttctttttgcaatttttgctgccactaattctcaatgcctaagtccattaattacttacagattgcatggtagagatatattcaaattcaatcactctttcctttgttactggaaaaattacataaagaaaaaaattttcctcttctggtatttgatagtataagaggagtaggctaagtgtttgagttttttttttaacctaacagttttacaaataatgaatttattctttgacatcctgcaaaggtgatcaattttgttgtatctttatgaagttatgaatttaaatgtatttgatcatttactctattaaagtgttatccttattgatgctccatttattccccctttgcctaatggaaaccttttcagtttggcttatgaattctattcagatagcctaatagacttggtaacttccttgctattccagttatctattgctatgcagtaaaacttagtggttcaaacttcatttttaaaaattatttctcatgtttctatgagtcgactgggctctactgggtagttctcacttggggcctatattaatttcctatcactgctgtaacaaattaccacaaatttaatggtttaaacaatgtaaatctatcttatagttttggaaggtcaaaaatcagaatttaatctcattgggctaaaatcacagtgttgacagggctgtattcctttctcagggctctaggagataatcggtttctttgccttctccagcttctagaagctgcctatagtccttagctcatgctgtctttcttttatcttcaaagctagcagtggcaggcctaatccttctgacatcccagcactccacactcctcttttgcctccctcttccactgctcagaactcttgtgatcacattaagcccactctgataattcagaataatctccctattttaaggtcaggtgattagcgatcagaataccctttgccatgtaacataacattcacagattatggagattaggaaattgacatctttgggagacattttctgcctaccacggggtatattataaatttgtagtcaattgctagttgaggacgtagtcatccaaaagctcaacttggctgaatgaccaagaggactcacttacctgactggcagttgatgctggttgttggctggcagctcatttgaggttgtcaatgggaccgaccacctacacatgacttctcaagatggcttggcttttcatagaatggtagctgggttccaagatagaattttccaagagcaaacattctaagaggtataaaatgcaagctgctagaccagttaagatctactgctggaactgggatagggtcttttcctccatactcttttcatcaaagcagtcatagaactctcccagattaaaaaaggctgagaaaaagtccacttattgatggcaaggtcacattggaaaaaagtatgtgaaataggaaatatttttgcagccactttttgaaatctgtcatgtttgttatcgggcataacaagatgttttaagctcattttgaatatttcttgctctgacctggaactaaccttttctctgagaagctttggttctttttattggaaaatcgtatttcaaaaccaaaatttggagacaaagaatacacattgctactaggttgatcttctattctagaccttttcaatgagcatggttagaaaatacacacacacacacacacacacacacacacactcccatacatatgcatatacatacacatatacatatacatgtacagacatatatacaaaacaggccaagtgcagtggctcacacctgtaatcccagcactttgggaggccaaggcaggtggatcgcttgaggctagaagttcaagaccagcatggccaacatggtgaaaccctgtctctactaaaaatatgaaaattaataaggtgtggtcgagagcgcctgtaattccagctattcagtaggctgaggcacaagaatcacttgaacccaggaggcagagggtgcagtgagacgaaatcgtgccactgcactccagcctaggtgagagaacaagactccgcctcaaaaacaaacaaaaaaaacccaacaaatccagacatacgcttatattatctaaagataaaatttttttttatttattctgttacttcaaattccataggattttcacttgatatcttgtatgttacttttgtattttcttttttccttactgacaattctggtgcccaattacacacggatgttagaatatgacataattactcatttacattatccacacaaaagtcttagaataaaataccaatataataaaaacaaaaataataaaatttggggttattatgccttttctattctttttctttttgttatctatattgcgagggactgtgtagacattatacacactctcttttatccatgattgaatcttattctattagtaaatatatatttaccaatactgccagtttttaatgtcaatttctctcttgtcatttaggttgtctgaagcctgttttccagaagattatttaggaattagtcatggaagcaatattttctgggtccttgaatgttaataacaggttgatggtcgtctttatagttgaaaataaatttttcctgggtctaagatactttatttacattttcttttcttagcataaaatgtcaaagggctggctataacatggttttctttccctaagaatcacttgatctttttgcctaattagagtttttttcacttcctttataatatagcagttttactggactttgtgtttgtcattctgggttaatatacttagtaaattatattccctttcacaatataaattcaattttatttcaggaattttgtaaaattataatttttagtgtttgttatgtttccttttttccccaggactgttattatgctattatgctatgttggatcttctttgtctgtagtctttatttgtcactttgttttgaattcttttaatctctttcttcatttttaaaaactttttttatttggaaataactttatagaatagccgcaagaataaaattgttgtaactttaccccagattctcccattgttaacattttattcaacttttaaattgcttttgtgttcttctttaatttgattcatttctacagcctttgttgtctttcaagacattgactttt

SEQ ID NO: 1880316 - DNA, 4001 bp, Homo sapiens; identical to SEQ ID NO: 2719

SEQ ID NO: 1880317 - DNA, 4001 bp, Homo sapiens
aacacatctggtctcaagcatttcagatacgtgatactcaacctgtattactttgggagacggtactattgtaaatggcatttttaaattataaattccaattgttcattgctggtgtataggaaaactgacttttgtattcaaccttatatcctaaaattttacagaagaagttttatgtcttccttcccaatatgtatatacttttaatttacttttcttgttagctagaacacccagtaccacgttgaaaagactggtgagaggggacatgcttgccttgtgtcagactttaggtggaaagaatgtagtttctcacaacagaaacaatctattgttagctgcagaatttttgtagatgctctttatcaagttgaggaagttctcctttattcccagtttgctgagtttttatcatgaatggatgttgaggatgggcacttcttttatttgtgtgtgtgtgtgacaggatctcactctgtcacccaggctggggtgcaacctcacctctcaggttgaagcgatactcccaaggagctaggactacagacgccaccacatccagctaattttttaaaaaacttttgtagaggtggggtctcattatgttgcccaggctggtctagaacactttggcctcccaaagtgctgggattacagccgggaaacactgcacctggccaagggtttgcacttttaaaatgttgctttaaatcaatctattccagaaattgtaagcaacataaaacgtaaagcaagggaagtgagtatgaaatagcaactgttacaaaaactgcctactataatcaatattcttgtgcaatgcagtatgctgagcgtgggagccccataacaatcacttgcctccatggtctttggcaaatagatattactttattttttattttcgagacaaggtcttgcactatcgcccaagctggggtgcagcagcgagatctagctcaccgcagcctccacctcctgggctcaagccatcctcccacttcagcctcgggagtagctgggactacaggcgcgccaccaaacctggctaatttttgtatttttggtagagacggggtatcgccatgttgcccttgccctcgaactcctgacctcaagtgatcggcccactggacctccccaagtgctgagattacaggcgtgagccaccgtgcccggcctccaaatagttaagactttaaacttagaaaccctattcacaacacaaactccgagtgaagctcagtggcattttcttacaggaagaaatacaggagttaatcaacaggtatgtgggatgttcccacatcaaatcctaaagataaaattttaactcagttcctcctgcactatctgattctccccaaccttgtctcgcagaaaccacagcgcagcctgaaaacacgccccgtctagattcaacacctcatttagaaattcaatttctcgttgctagttggatagcgtttgccaagtaatttgaaaaaataaaaataaaccaagtggtctgggatttaaacaagataatgtagggtgaaaaaagcactcaggtgcggacagccatggagcgtgacttcctgtgcactctttccccgccagctcaacgccagagccgcgcgctaggcggagactgttggtggcggaggccggagtcgcacgcctacgagactgcgcggacccgcccaaaaggaaaatggaagtagtggcgtgaggctgcgacagtgaaggttatttttctctttttaaagggccgctagacctcccgtctaaaggaagcgcccgacgggcctccgaagtacacgcccaggcccccacagcgcagccgcccgaccgcctctcttcacaccggccagagtccaccctctcccactttcccctcccctcccctccccgccccttccctccccaccccttcgccccgccaaccctagacccggcatgcgctgcgccgaccttttccttccgagccgacctctccaccttcggcgcctcccaatgacaagcggcgcggagcattgtggtcccgtgcgcaagagcgaggccgagggcagaaaaagaaagcaaaagactagggcgagtcggtagagcgggccccgcgcatgcgcaagggcggaggcggtggtgaaaaagggtggtgcgtggtctacggcgagcggagtggggcggggtcgcgcgccttggcggggagtccgcgagccaggaggggcggggggtgaatgaaggagcgggcggaggaggaagtgtcatggcgtcgggccgtggagcttcttctcgctggttctttactcgggaacagctggagaacacgccgagccgccgctgcggagtggaggcggataaagagctctcgtgccgccagcaggcggccaacctcatccaggagatgggacagcgtctcaatgtgtatccttttctgttcgccgccgctcacgccctgtttcccttgcccggtcgccgggcctggtgccccgcgaacatggcgccgccggcctcggccttcgctgggcctcggcgccgcggtcagggaagtaatgttccggctcgggcagtcgcgaggggtcagcagaggaagggaggaggagataggaccccaggaatgcgggccaggagcctgcgttgtgtaatctgtttggggcagcgcgtggtggtggcggcgggggttgggagtgtggctcaggcgaaagaggaattttagggattattgcagaaaaggggcggctccctggacttgtccctgaccccgaagggtttgagaggtaggagggttagcgatgctgaaaggcctaagtgtttgccgcagcctttcccggctctcgtcgccggcttgatggcggctctcttctaccttgggagcgtactggagttctttatgttcttggcgtggttttgtatgggtgtgtgcgcgcgcgtttcaactgtttcattttgagtttagttagtcgtagccattgataaatagttccagggccctcagcgctgttagagtgaaaagatcagcagttcttattcccatttatttggcgtcaagcctattctcttcctgccgccccaccccccgcgggcatttatttctttatttccagtttggggtttggatttgaatgggaggtattggaaaagaacctgggaattttccatcaaaattgttctgggaatgagatcttgcttttgtcagatatttcctaaatattacgttccagctctcagcttacaataaacactgcgattgtttatatgcacaggttttatatgcaccattctttcaccaaattcaacaaaaatgtaagtactagttgtctgtttttactgtccgcaaatttgagggtaaatcgatacgcagaaaaaaagttggtcattgcgttgttggatttagtgttctgaattaacggtaaacgtatatcacgtgataaatattttgcttcagatgcggtgtttttgtgtttttaaaatttatgatgaattaaactgcaaggcactgttaagctctgccaggccttttaagctaaaaaagaaaaacatttatttctttacagagttattacataggttttcttcatttaaattctatacttaacatttgaataatttcagtagtgatgtacagtggaattgggcaagcctggtcgttctgtgatacatcttaattatgttggactcattgtttaaaagactgtcaattgagattaaattaattatgacattcttttgaaagagctatttagtagaaataattcatttcttcatttgctaacctagtaatttcttaagatgtcaacgtttctgtttatcacgttagcatcagttgtctcctaaaattttgggtgattcaaacgtccactcttgcttcagatatagtacgtcaggagtatgtttatgtattattagtaaaatttacacctgaatattaaggtatataacctgtaaaccttgacaaatagagtaatggcattttgttgaaatgttaatttcatttatgaaagatacgagtttggtgtatg

SEQ ID NO: 1880318 - DNA, 4001 bp, Homo sapiens; identical to SEQ ID NO: 2722

SEQ ID NO: 1880319 - DNA, 4001 bp, Homo sapiens; identical to SEQ ID NO: 2727

SEQ ID NO: 1880320 - DNA, 4001 bp, Homo sapiens
tgagggtgggtgtaatcaaataaccttccttttgtaggattattctgctgatatcttaccaggtggccctccccaccaccccccaaattccctcattttaataatgtgatcaccctggggaccaaaagattaaaactttattattcttatttaaaagaaatgaagcaaagaaatttacaaagtaattcatatataactaagaggcagttgagtggtgggaagggacagttgttttgctccattcactacaatgctgtacatgactgacagaaagtaagtcatgctcagtacagatgcctctcttggggttattttttttttattttatttttggagacacggtctcgctctgtcgcccaggctggagtgcagtggcgcgatcttggctcactgtaacctccgcctgccggattcaagcaattctcttgcctcagcctccccagtagctgggagctgggactcccgccaccaggcccagcaaattttttgtattttagtagagacggatttcaccctgttgcccagggtggtccccaactcctgagctcaggcaatccacaggcctcggcctcccaaagtgctaggattacaggcgtgggccaccgcgcctggcctatttttatttttttgagactgggtcttgctgtctcccaggcaggagtgcagtggtgcgatcctggctcactgcaacctccgtctcccgggttcaagtgattctcctgcctcagcctcccgagtagctgggattataggcgtgtgccaccacgtctggctaattttttgtatgtttagtagagatgaggtttcaccatgttggccaggctaacttccgacctcaagtgatcctcccgcctcggcctcccaaagtgctggtattacaggcgtgtgccgccacgcccggcctcttggggttatttttaatgttcaaggaatgaacaaagaccgcctgcagccagttccattattcaaggaatcgaagtaaaattttgttttaagagagggtggtgctaagaaataaagtccatctgtaggccagggttaaaagaaaagaaaataaagtgcgaataatactgtacggctgccttggtgtatagtggtgagcatagctgcctccaaataacaccgtacaacaaagtatttacctttttaaaaatacatatacgttttgcactgaggctctcggcttcaggaggctgataaaacttcaagttcctttgctacagaccaccagggatacacctgtccacccacaaagaagtgaggtttactagctgcggcaagggagacacggcagaccagcgcctgccttctcggcacagggaaaggcatcattccgggaagtttaggtgaagtttaacacgaagccgcctctgacagattcggcgcagggctgtgtgtcatgcagttaacatcacacggggctgagacgctgactcggggacacaagctcaagccaaatgtgcaatgctgggtcggaagccccttatcccgggatgcgctccagggaatcggggcggcctcccagcttagcgtctgcaggctacgcggtttcaagcagcaacgtctctcccagcctagctgtgcagaggacgacttttcaacagaggccgagagctggccgcctccgctcccccggctcccggctcctgccgcggtcccacccagctcccgcttcccccggttccctggtgccctcggctgccctcagctctcccctagcccgcggaacgctaggcccgggcctgcaggcgacacgcgcgggcacgcacggagcacggcccggccgccagaccacggccgcctagcgacccggaaacactcgcctccagtgaattaaggcagtgacacctgactatcctccacatgcccccagaactgtgacgaggccccacgcagaagaccgccccactctcgtcgcactagggaccccgaaatccgaccgcccatgggaagccactcgccagagtcttacctgaggtgcgttcaagggggactgcgcatgcgcaacggttggcgacgctccaccccttccgttgtcggctccgcccccacattcgtaattactattaattgtactctgaccgcgacccgaacctgactgccctctatgtacattattttacggaatgttcgcaataacacatgcaacaggtgctgagtgtatctcattttacggagaaagcaagaggcttacactgcccacaatcgcagttagtaaaatcagaattcacatttaaacccaggaaactgactacgtgtagcctgttctgggtcgtttttctaacaccctgaaacttaaagtgtgatagtctcagaggactaccaacataagcatcacctgaaaacttgttagaaatgaagaactaggccgggcgcggtggctcacgcctataatcccagcactttgggaggcctagatgggaggatcacgacatcaggagaccgagaccatcctggctaacacggtgagaccccgtctctactaaaaatacgtttaaaaaaaaatagctggtcgtagtggcatgcgcctgtagtcccagctaccggggaggctgaggcaggagaatcgcttgaacccgggaggcggaggttgcagtgagctgagatcgcaccactgcactccagcctgggcgacagagtgagactttgtctcaaaaaaaaaaaaatgcagaactactgaatctgaaactgcattttagccagatccctaaagaattcgtttgcaaagtaacacttgagaaagcgcgaaggggacatggaaacagagaagagaaaaagaatataaaagtatattgaagtaccgtgtgcaagacaaagcctggaacacccaaaacaggcacagatctaccttcatcgaagttctagtctagttaggggtatttaccacaaataactgatggaaagtacacaatgataagggccttgcttctaatccgaggaatctgtaaaggttttagagaaggggtgatagctggagctaactctgtccacgccaagtaaaggaagtgcctctgcaaggtgctctgtgattgccccaattttcctaacacccgccccacccctagtccagcccatgtggttcatctgtgtaactaaagcatcataaattgtgaaaaacatatgaatttagggagaacaaaaactttcagaccatatagcaaggctccactacattggtttgaaataccagaatatcagtgttaaaagtaccaggatgacaaagcaagatgaaaaagctattggggcttggtgcggtggctcacacctgtaatcccagcactttgggaggccaaggtgggcagataacctgaggtcaggagttcaagaccagcctagccaacaaggagaaaccccatctctactaaaaatatgaaaattagctgggtgaggtggagcatgcctgtaatcccagctattcggaaatctaaggcaggagagttgcttgaacccaggaggcagaggttaaagtgagccaagatcgtgccactgcactccagcctgggcgacagagtaagactgtgtctcaaaaatggaaggaaggaaggaaggaaggaaggaaggaaggaaggaaggaaggaaggaaggaaggaaggaaagaaggaaggaaggaagggagggagggagggagggagggagggaggaaggaaggagaaagaagaaaaggtcattggaatggttcagattgaaaaaaagaaaagaggagaaaaaaagcttaaagaaatgataacaagctttaccaacttgggcctagcagaatggctcctgcaaagaacagtggcaagaagaaaatggaccattctgccatcaacgaggtgatgacccaagaatacaccaacattcacaagcacatccacagagtgggcttcaagaagcatgtccctcaggcactcaaagagatccggaaattttgcaatgaaggagatgggaactccagatgtgtgcattgataccaggctcaataaagttgtctttgccaaaggaataaggaatgtcccgtaccg

SEQ ID NO: 1880321 - DNA, 4001 bp, Homo sapiens; identical to SEQ ID NO: 2742

SEQ ID NO: 1880322 - DNA, 4001 bp, Homo sapiens
tataattagcaacaaaagctgcaaattagggctttcttatttatttatttattcatttatgatgagccagttggcaaacactccccagcacagtaaagatttgaccccagaccggagtgattccaaaacttacacgtactcattctggttcattacacagattccagtgtttgcatttgtttctgaagatgtgggctgccaagatttctactgcatttcaaattctccattggcttttttttttaatctacctccgttaatttttcttacagatctagtttttcctcctgtagttttcatctctatcttccctctttttggcgtcatattgtatagtcctttcaactatattggaagcttttcttggggaagacccccaataaatcaaatacatcaataactgaactcaatttttcaagttcactgtatcagtctaattcacaaagggcacatctccttcctcagtctaaccctgggaacttgcaagggcaaacataacccagaacacaggttcaaaaagaaccagtacaagcaattcagtcattcaatacattgcagactgaagaatggaagcgatctaggtagtaacgctagttttttagggatctgggttttaagaatgggctgaaagactcatagggaaaaagtcccaggggtgggtagtaggtgagggatgaaatgctacaaagcgagtttattttctgtaacttgagttataggaaataaaagagcagttcccagccctcctctttttgagtcatagctgttaatttgattcatcaggactgaactcttggctctggccaaagttcctgacccagagtgctagttactgtctggcaagccatcaagcaatcctatgttagatttcagactaattggagctatgtcaccaaagatgagttcaaaagggtccctagagtttttaagagcaaagagtattgtttttctctcagctgagggtactagatggtacatagaactgagccctgatgtactacacttctagtgctgccatttcttagttgtatcacttagaagtcatttctgaggagttataaaatagtttgcactatgctaaccagtagtttacactatgctacatgtaccaaattgtttacccacagagccagaacactaatgaaagcagtaaaatgcacatcaacattaagtcaataaatgtattgagcaccaatcgttcgagacattatgttaggctttgtgaggagtatgaggaagtcaggggcaaagctgctgcattgaagggggtctcaatacagttagggaggtaggccacaggcagaagttattagctctaaagatttttttttttttttaagacagagtctcactctgttgcccaggctggagtgcagtggcacgggatctcagctcactgcaacctctgcctcccaggttcaagtgattctcgtgcctcagcctcctgagtagctggaattacaggtgcatgccaccacacccagctaatttttttgtatttttagtagagatggggtttcaccatattggccaggctggtcttgaactcctggcctcaagtgatccacctgcctcggcctcccaaagtgctaggattacaggcataagccactgcacacggccagcaaaaggcttttaaaaataaaaataaaatctatagatataagacattggtatcatcgttatatcaaatatgttgtgagaatagtaattgccagaaaagttcagaggagagagaggttgtgttatagtagtcaggcagacatcagcaggccaggagagggctgcacgcccaaccaggaatgtcagacgaccatcaagtgatggtcaggtggttgttacactgttacaatcattatttctctaaaacaataattagtcacagccagcacgagggaaaggcaatctcccgacagacagaaaaaacctgaaactggttatcagcagcgtcccaataagatctcaggtgttaggtaagtgggctcaagcatgcgcactatgaggcaaaatgggggagtttaactggtatatgaccttcctctaggaacgttagattggtaatagaagaacgtctcaagtgagcatgcgtataactcccgtaaacacactgcgcatgcagcccttcccaagcactggtagggcactgggcatgcagacagcccaccagaagggaagaatcaggagaaaagggatgcaagatcccagaggtatgccaatatataaaaccctaaggcaaaggtcaagccagccacttgatccctcaagtggccagcttggccctcctcgaagtgtactttacttcctttcgttcctgccctaaaaccttttagtaaactttcactcttgctctaaaacttgcctcagtctctcagtctgccttatttttcctcggtcaaattcttccctgcctcccccctcctccagagtagctgggactacaggcgcccgccatcacacctggctaattttttgtatttttagtagagacggggtttcaccatgttgttcaggctggtctcgaatgcctgacctcaagtgatccacctgcctcaaccttccaaagttctgggattacaggcgtgagccaccacacccggccccaaattctttcttctaaggagctaagaattgagttcgctgcggacccataaggattcgctgctcgtaacagctgcttctgggatcaggtaagaaaaggtttcaagcagaaagctaggaagaatgaatagtatttgaatgagtcaagtggaaagaggaaaggcatttgagacaaagggcatagcgtgaagcagtgaggcagcctccaccccacttcctaccacctgttctcccccttagtggcctgaccttgaccttccactccatcctcatccctccccatgggcactgtctcagaatgtgccatgcctgtgacagctccaggactctggccatactgcttacactgccacagagacctctttcctcttcttcttcatgtcgctaactcttacttggccttgaagactaatttgtgttagaagttagtcttcccagaaagccttagcctttgggaatttggtgctcttccttgagaagaaaaggtacaaccatttaactccatcagaacacttatcacacggccttccccactggactcaatggaagcatcttgagggcaaaggccttaccttttatagctgatccttatcagccacagtgtccactacacagcaggtgcccaataaattcctgtagaatgaatatgcatttacagaaagaggagctgtgagaagatgcctcagtttttggaaaggaaaaatgggttgatttttacattttgaatttaagctgatgagagtcctttcatgtggacatgtctaacaaaaattggaagtagaagactgaaactggaggctgttgtgattttcattttttttaatttttttcagataaactgaagcacaagagggtaaaaactttgtccttggtcttacagccagaaagtggtgatgcaaagaacttagtccaagctttgatctgttctgcactgcctgccaaagcagaaccttgagaaatacccatgtttgggggatgagaagaagaagataaatcagcaaagaaaatagtgataagaaaggtaagtgataagaaaaaaaaaatgatgtaaatagtaacgatgacagccaggcttggtggtttatacctgtaattcaagcacattgggaggccaaggcaggagaaatgcttgagcccaggagttcaaggctgcagtgagctatgatggtgccacttgcactccagccagagtgacagagtaagatcctacctcaaaaaaaaaaaaaaaaagatgatgatattgatgactttttcttcttcctttttctttttccattcctttcccttctcttcctgaactgttcagtccctaaacctcaaataggacagagcagagcagatatctctgctaggtgagggaatcactgtggcccggagtggaatgatgggagccaaattgggca

SEQ ID NO: 1880323 - DNA, 4001 bp, Homo sapiens; identical to SEQ ID NO: 2744

SEQ ID NO: 1880324 - DNA, 4001 bp, Homo sapiens
tttaaaatattctgtagagacagggtctcactatgttgcccaggctggtctcaaacttctgggctgaagcaatcctcccacttcagcctcctgagtggctgggactacaggcacatgctatcatgtctggctaactttgttttttatagagacagggtcttttgctgtatttcccagggcggtcttgaactcctggcttcaagtgatcttcctgccttggcctcccaaagcactgggattatggccatgagccaccacgtaatctttgttttatgcgtatttataagctttgcttccccaacaagattataagctctttgattgaagtacatcatatatttgatatgtattctcttgtccaagtgtttctgtaggcaataaggggaactttgtaaaacaagagttttccggtcaagtaaatttgagaagcgctgcctaatctcttccccctcagagatttgcaatgcatattgacctattaaaggctctgagaattcttcctgcgaagaaacctattttagccttgtccaccttgcatttcccaaacacgtttgacctcagaactccctttttcactaagaatgttttgcccatcttatgttttacccatgtgctctatagcagttaacactgggcttattaaaggtactcaatatgtgattgtaaattaactggtgaagcattccctcattcttgtttattttatacatttatttaatgaagcccttttcatagaaattgtcaagataaatgtatcctcatttagatcaaaacaaattctaaattaatgaagtcatgacattttactgtattttggtttttttggtttatctgtgaagtcctcaaacctgtgagtagtgctgaccctagccttgaatgaacagccctgtactaactgcaaggccagaagaacccctgcccttcccctccccacccccccacatcatttccagaagttctaaagaacagttgaaatttacggagatcagactgggttgagtgtgggatttccagggtgggttctagaaggagaagtgggtcttctgtagtttgttgaaattttattttccaaacccagcccccaagtttttcttcctctatttatgtgcaaggacaaaacagttactgtcctacctacataggatatggactctgtctgctctgagcccattttagtttagaatatagagacctccctccaggtcctaagagagagattccatgagagatgtgcaacaccataaggttggtgatttgtactttgaaatggctgcctttatttcctttaaagtcaatatcttatatttgaataaacacagtttgcaaagcatctttacagaaatctcattggatcctcacggtcaccttttttctgagacagagtctcactctttcacccaggctggagtgcagtggagcgatcttggctcctccacttcctgggctcgagtgatcctccttccttagcctcccaagtagctgggaccacagatgcgtgccaccatgcccagccaatttttgtatttttggtagagatggggtttcgccatgttgcccaggctggtctcaaactctgcagctcaagcaatccacccgccttggcctcccaaagtgctgggattacaggtatgagccactgtaccctgccctcacagtcaccttttgaagaacctcctgctcaagagatcctcctgcctcagcctcctgagtagctgtgatgactacaggcttgtactaccatgcctggctagtttttttattttttgtagagacggggttccctgtgatgcccagggtggtctcaaactcctgagctcaagccatcctcccacctcagcctcccaaagtgctgggattgtaggtgtgagccactgcacctggccaagcattagttttaatcttgttttatagatgaataaactggggctgactcaaactgactcaaagtcacactgtcattacctttttgatcctgtacgttagactgggctgtatgcatgttcttgctggcgcaataaagttgcaagtgccagctaacagcccttcccactccacctcaccacctcatagaggaaaattgtgacgttaatgggaaatgtcagcggtaatgtcttcaggctgggcctgtggagtgactcccttgccacaggatatttaagcaatgctgtgtcttgtctgaggctcagacctgctattcttattggcacttgggacctgcatggtttttggcttcacctccagctttagccatttttcttctgttcttttaggtaaggattttctgccccagacctcagattcccatttccttcctagcttctctgctgttatagctcagtctcttccaagaccatgcaagattcagaccctagtaggaggagatggaggaactaggacttaaacccacatcttgtgattccaaggctggttcctcttttgccctgcaccacacagctgtctgctcacagtcatgtgacaggggcttccccagccagaacctccagggagcacaaataaaggaaagagctggaaggcacagtacagcatttgttctgtccaagccttacatatcagcatgggcagggagaatgtggtgaagttttctttcaaggactttgtttgataaggaaggacatttatcagtgaagagaggttttgagggaagtgaaccaatcttgagataagtacacaaaagagctttgagtctggtgtttccctgtttgcttctgccccctggaggagcaaatactccatgattagagacgtgtgagtcctttggaatagaatagcagtgatggaactggagtcctagtccaggttctctccttgttcagcctggattcagcactgggtatcgaaacaagcctgcaccctcagaggagatggctaggggacagtgcgtccaggcctcttctaccacacagagttttcttttttttataaagggtatacacatttaaaatttaatgatactcccaaattgctcttcaaaaaggctgtgcaaaattacagtcctgataacagctacccagagatcctgtaacggcatttgccctcatcattattattattattattattattattattattatttgaatttgagacggagttctgctctgttgcccaggctggagtgcagtggcgcaatcttggctcactgcaacctctgcctcccgggttcaagcaattctcctgtctcagcctccctagtagctgggattacaggtgagcaccaccacgcctggctaatttttgtatttttagtagagacggggtttcaccatattggccagactggtctcgaactcctgacctcaggtgatctgcccgtctcggcctcccaaagtgctaggattacagatgtgagccactggggctggttgccctcactatttaatgggttatttgcaacctgtgaatcatgtctcctatttccttgttaatgatgcttattgattatagacttaggaatatcagcacctcctttgtagctcttcattcttacatgatataataattaatttttttttttgagacagagtctcactctgttgcccaggctggagtgcagtgtcacaatgttggctcactgcaacctccacctcctgggttcaagcgattctcctgcctcagcctcctgagtagctgggactacaggtgcgtgccactacacctgactaatttttgtatttttagtagagacagggtttcgccatgttggctaggctggtcttgaactcctgacctcaggtaatctgcccgcctcagcctcccaaagtgctgggattacaggtgagccactgcgcccagccaataattcattgtttaatccttagttgtgggccaagcaaaggagaaaagtaagaagccttttccttttaccgataggaaaggtcaaaggacttacctggtgaattatttacctaaaaatgtatacaaatcactccaaaatttagtggctaaaaacaacagtactaatttaattatatcttcacagt

SEQ ID NO: 1880325 - DNA, 4001 bp, Homo sapiens; identical to SEQ ID NO: 2757

SEQ ID NO: 1880326 - DNA, 4001 bp, Homo sapiens; identical to SEQ ID NO: 2758

SEQ ID NO: 1880327 - DNA, 4001 bp, Homo sapiens; identical to SEQ ID NO: 2764

SEQ ID NO: 1880328 - DNA, 4001 bp, Homo sapiens
ttgctggtgggactgtatgtggtaaacacaaaatgtctgaaatgaatcctacaaatagaataccatgggctaaatcttctacaaaacagaagtaaacacattccatgcatggctagactcaatcttacagtccagatagaccgtatcaaatgaaagcatttaaaaaatgcatcatatttacgaaagcaaaataagctggaaccaggatggttctccaacataaaaacgcagaccaactagactccagcaggttcaagtctctgctttcctccccagttgctcaatgccccgcaccacgtgatcctgtgctgtttagacgactcactttaaattgtgcacaagattcacaaacaacaaacgtcaaagtgaaagtgaagtacaatttaagtgctggcggatgttcctgaggaaggtgtttactgaaacctttcaaaggcgcccgttttatacgatgatggtgctacaatatgaacgcagtctagtatctcagaacatacagcaagttattgtcccataggaacatcatcctctgatacgtatcaaaacactgtctcagcacagagctgaaaaccagagtctggatgacgtgaacagcctgacatctaattcaaagctctaccatcataagcagtgaatgggatccttaaggatgcgggctcagctccagcgctcctttcaacttcccctcccaggtgcggatggttcagaattaagggatctcaggtagccaaggactgcaaggacagccatttggtttagctttgaagacccactggccaaaggtttctcgacaatttaatgcgcaaggggagtcaagtgagaaatgggaagaggccgcgttggaaagccactgcgcgtgcggggactctcggggcagccgcggctggcggtcgtggcccagagcccagctccgccgccgggtcccgcacaccccgcgcccctcaacctaaagttgggccgtccgtcagcggccgccacgaggagtccccatccccgccgggtgggccgctccgccccgagaaggcctccccgcggccagcgacaccggtgcccacgggaggcggccgcggggcttccacagcccccagcgcctctgcgcgaccctcccggggccactgacctccccgcgggcccccagggccgcccaccccggccccaaccccgccgccggccagcccgcggcccgggggggccccgcgcgcccccggcccacctgcctcctccgggtcctctcggagcggccggctggggacgcgggggcgcggaggaaaggccgagaggcgcgctcccgccggcgctgtctcccgtggccgcccacggagcctcccgccgcgccgctccacacctctccgggcccctcccgctgcctcccacgcggggtgggcgcgcgcgcagtgcaggcggccgggcggcgcgcaggcctcggccacggccccgcgcacgcgctggggactcggtggggacggaggaggcagcgcgcgcctgcgctggctcgcctggctcccgcgcccccgcactccccagcagtcagatgatcgggcgcacgcggggccgcgaccccggctgacagcgtctgcggggtgtcgcagtgttacctcccccgccgcgaagccaggcggccccggcacgccgtgcgtgcccaccgccttcacagccctcagcctcgcggcctcacgtctctaacctgcggcgcccccaccagctgctggggccggggacctagtcttacccgtcttgggctccccagagtccagccgagcgtggtcaagagtacatccaccagttccctgctggcagcgcttgctgtaaaaggcctaatccgtgctacacccacgttgagcaattagttcatatctcctgcggctttgctgcctcttcacccacgttttctcctgaccccttctccgtctcccaaggaccagacagggtgaaactgtgcacctaaagtcgtgaactctgacagcctgactctctgtcatctggtaacaagaaagcgttactggacacatagtgagtccccttaatgaggagacctagtaagaccatgaccgaagtttgaaacatggagacaacagtgttacatctatcagctgtctctgaggcctacagcggctgcttcatagaggctgtacttctgtgttcagcgcgcacagtgcctggcaggaacagatgttgaatgaacgtctgtcagtgtctctgcaagagcagaggtaagcgctcaccgcaccccggagcatcttttcctgttagaatcattgatttcagggactggaaaaagcccccttcccacttgcctgaatcctccttacagtgtcttcccaccaagcagtggttgaacacctccactaacaaggaactcattaccttttaaggcagccatttaatctttgatcagccttttggaaattttctaccttaggagctaaaatccagctccctgcatctctccctcactggattttgtttctgccctggggactcttaagtctgactccaattcatccaagacacacattacctgtcccttaggctactcctgatatgacctggtcacaatcccactcaccagcatgttgagggattctcttggatgcattccagcttgtccagagctctcttaaatgtgattatcaggaatgagtgggtggcctgccaagtgcggagaggaaagagactgccacctcttcttaggtcctatgcttaacaacattcaccatatcaaaatagttgctaggagcagtcacatcacattgttgaatcgggtggagcacacttgactaaaacccacaatatttgaatacatgaccatccctgaccctggtcagctgccagtttctctgtctctgcaggctcagcatctgcgagtgctctcagagataatgtgacacggatacttcctcctccctctgaagagtccacctccctttccctgctttcatcataccctcttcttgtctgacccacccatctctttagctggttaaaagaaggaaggcaatctgcccttggttggcttcaagcacctataaatgaggccaattgtcattgaaccacagaaagtcataaagatctgtgtgtaacagagtagctattggtgaagtttccaaacgtatacagttcacttttattgctgatttaaattatccatctgaaataccactattagtaggtgacaaggcatggctagctcagttgttcttagttataataaagatctctgttagaaccagccaggccactggctttatctgctacacccaaacactgtatgatacataggcaaattcccaggataccaagccaccagagtctcccactcacttagttgcctttgttcaaaaatctgacgttacttctttataccatcatcaagaatgcaagtgctcgttggagtcatgcttcctagaatacctcgtgacatacaagctttagaaccaggtattgcccagttaaccagagtgagactggacaatgatatgtggccagaacttggaacttgaactattcattggggtgggaaggcacatggggatgtggaccaactgtagctgctgagattcaattctatctggagacacaaagttcctgaaaagtatagcaataatccacagcgtcaggaggtgatcaacttactggtcaacatcacagtgtggagaaagggcattactcactgaccactgtaaggcacttgacctatggaaatcttgtcttcactttacaaatgaagaagcagactctgggaggctgcgtgacttgctccatgtagccaggggcagaaataagattcaaacctaagtctgtctgatctgaaggcctatgttgattcactactttgctaacctacacaggctgtctttgggggcattaaagacccagaatggctgcatagagcagcattcaggaattcagacactcggcagcaggaagatctgtcagcagctctcaggaccccgaccatgataaaagggttagaggaaatagcaaaagaagacaaggtcact

SEQ ID NO: 1880329 - DNA, 4001 bp, Homo sapiens; identical to SEQ ID NO: 2778

SEQ ID NO: 1880330 - DNA, 4001 bp, Homo sapiens
cccctaaactcatgcattttctttttcaccccaagatccttgaatggtgatcatcagcaaataaaattacttcccagctgacattattttccctcactcccggcagcccctttactccctctgtactgctgttgggatgcttttacagcaagcatcgcgtggcttggtgtaggtctatgttccacgtcaggttggaagatccttgcaaacaagaatcttaaaagagttgcctggcatacaggacaccttccctacctgatttgtgaacggaaataaacaaaccacccaggcaagaaccggctctacagaccagcctcttggtccagttctctggtctgaagggttcagatgccacgctgggagctggaagcggacagaactcttacctcctccaaaacggcccgggcggcttcccggtccgggaagaccacggaactgggcaagtctggcaccaccgggtgcagcgggggctccgggacgggcacgacctgtgcgcagcccacctgcagccgcctgccgtcttgcacctcccagaggcgctgccacagctggccgcgcgggtcggcctcgaactcgcccaagtgcgggcgtggtgcctcctgacaggcgcccagcagctcgagcagcgcttgccgggtgtcagggtcatccagggggtcgcgcagcaggaagccttgctgtgcgccgccggcctggccgcccgggcagtagcagagcagcctgagcagctggcaccgctggaaggggccgcggcgcagctggtgcagcaggcgctggtgcagccgcgccgcccggacccgggccccgcagccggcgtccggggtcacgggcacgcacagcgagtagctgcgctccgggggccccagcagcgccgccaggcgggggtcgggggcgtctgcgtcgccgggggcgtcggcgcctagggcgaagtgagccagggtgcagtcgggaagctccaggacgaagcggcgcggcggagccatggccccagcgcagaccccgcgccgcccgagcagcggccccgacagtggcccgcgcaggagccggcgggcgaaggccatgggcgcctcagcgacgccgccctcggccccgcctcggaaacgaaacctggcgggagccaggcgccggcgggaaacgaaacccggagggagccaggcgccagcgggaaacgaaagcgaagcgttgcggggaaacgaaagccggaggcccaggcggggcaggagccctggggctggggcgcccttccggcctctcctcctcgccgcgagatgtgcgcgataaacggccggcgctcgggagcagacgcttggccccggggccccaggtgcgcggctccgcgggcctgcgcggtccccaggcgccggctcccggggctgacaccgaatgaggccccgcgccgtcggccccaaggtagctccgtgtgcgttctgcgggtggctggcggccccgaccctggtttgagttcctcctctgcggcttatgccgggtgcatggaggggggcgggggtgcacgcgcgagggacagagaagtcccttcccggtgtaacgggctcttcaacgcccacttgcaggcgcactactgcccttggatgactgaccaggccctgcagaccatgggctccctccccgacctcaactcctagctctgaccacgcgtccccgcccctctaatcctgcagagctgctttcctgcgggaacagggcgcagttctggctcttccctctcctgtatcttatctcacctgtgcactcactcacctgtgcacacactcacctttgcacacactcacctgtgcacaagcttttccctcttcttggaattgccctctcccttttgctgactctccaactgggaagtgtcgcccagattggcacctcgaaatcgcctttcttccaccaaattgaagtttcctgcactaaggtgaagtgtgtcaggatagcaccctctgcctgccacagtccagcatcagcactgttgctgcctaacagtgtaactgcctaacagtgtaacagtgtttgcgcagttatttggatattttattctgtgtttactcattaactgatgccttttaaaaatgatgtcaagcaaaccaaaaacaaacaaaaagataatattctccagggaaactctctcaaaaaaatagaattgagacgaagattgaaaacattagatgagctgaaagcagttttttttttatgtcttaatagtattggacttaaacttgggattatatttaattctgaaaaaaaaagtcttaacaaacgtgaaatatagataggtggttggagtgtgggttaataggctaagaagaaagaagaattaggagtttaaaattttttagctctttgagaatagaatagtttttattctttctcaggaatttcacttttggacatttagcatgtaccggtggtttcacgtgtatgtagtatatggaagtaagagtcttctagttactcccttttcttctctaagacagtactgcatcctcaagcctgcttgaccttttccctatgccatccacctctctggatgtattagtctatcctggctgccataacaaaataccacggactgggccgcctaaacaatagaaaatttgttttctcaaagttcaggtggccagagaagctggagatcaagttgccagcagggtttgctttttctgaggcctctctttctagcgtgcagaccgcctccttctctctgtgttctcacgggacctttcctttgtgcttgcatccttggcgtctccttgaagttccaaatttcctcttctgggaaggacaccagtcagattgggttagggcccatcataatgttctcattttaatgtaatcacctattgaaagccttattttgaaatacagtcatactgtgaggcactgggggctaggcctgagcatgaattttgggggacatgatatagcctataaccccccacatatctgggttagtagcctctcctgtgtcccccaccaaggctatttgtatcctcggaccttgacactccacagtcacgtgccagtctatttcccaccactgagcaccttgagggtaagtaggaagaccagcttcttcctaacttttctctgagcctccaactgaaagaaaacctgacacacagtttgctaaatgaagcatcttaccttttttaatttaagttttcctctctatttttcacctaccttcgccctacgaagagatgtaaagttaataacactgcagtatttgggcttagtcaatattatataagtgttgaagatgttgaagatatatcttcattcataaataaaaatttctgttagattttcaagccccttcaaatttgtaggacagagactctgagagccacagctggatgtttatattgactaaacatgcctgtagccacccatcgttgcaggtggaaaggagagaagctgcaggctgggaagatacttcaaagaggtgtctttaaatgaatgaacagcacagctatatcataggaaaagccataatcttcaacacttacagtattaaacaagagaaaatgaaacttttctagccattctgctcctaagaaaaaaagaaacagaatgggagaattaaaaatataaatagcaattaataaataataaaatgaaaaaataacactttgaaaaagagcttagtttttgaaaacatgtttaaacagatatgtttctaggtagtttaattcaattggaaaaagaaagaaaatgcaaatcagaataggaataaatgagatgatagaaccacaagttcaaaaggatacccaaaagagaatattacaaacaattccacattcataaaagtgaatattataaaataaatgatgagctcagaaaataagaattaataaaatgagcccaggatagaatgttgagtctataactctgtaacccaaatcctaggctagaagttaatgaaagggctaaaaagcactgagcaagtttcagagatcacttagttatcaaggaacagataagctctctcccgc

SEQ ID NO: 1880331 - DNA, 4001 bp, Homo sapiens; identical to SEQ ID NO: 2795

SEQ ID NO: 1880332 - DNA, 4001 bp, Homo sapiens
tataaaagcaaataaaaattgtgagtctgaaaatgaatctttaaatatttaactatcatatctacatatctaaaatcataatatataatacatatctaaaatcataaagtaacctttattacaacaagtagcatttttattttcaggggaaaagaggaaaaattttcttgggccctcacaatatgtcagatgtcatttatacttatataaattaagcttcacaaaaaaactagaagcagagattaagagaaagaacatgaatctggagaaatgaaagaggtgatgtacgtctgattctacagtggggaggactgcgcaccaatctctggctccatagtctgctccttccaatgcacaagggtggaaccagaaaacccacgtctagcattctatattttttctcttaatttacttctcttttcccaagtgagagccccactgcctgtcttctcaaggatctctatgaaaagtacaaagggagtgcggtacattggcagcagagatagatgttgaggcaggagaattttggagttctctgaacgcacaccaaataaatcgctagctcctaggcctacagctaaagacagccattctaacacagaagcagttgagatcttcaaagtaaaccataaataaatacaaatgaaaaagaacaactaatcttctcagcctctctccaaactcgcaatatgtaagtcagctataggtcattaatagggagctcttgttactgttggagcagtacgtaccttgatgactaagcctccctggatattgaggggccgagaaaaagcagaggactcagacccagactaatggtgagtataattaaaatagggcaaggaaactcaaggccttacatacttaacattcattccatcagctgtcgtattctttcaacttcagacccctatgtgccacaaaatgatggagacaggtagctttagtggccatctattcttgttatttatctaataccgctaaataacaatcattatcaaattgctatgcgtgcatcaatgacacttcaaaaagaaaggaattaaaccataaagtgacactcagataatgagttcagggtttaggtttgctaacgccgtggatcatctgtgagttccacttcaggtttactttagcttttgctatataatagacacttcaacctccctggatcaaaaacaaatttatacagtagagatgattttaagtgtaagtttttgaaatttttgaaatgatataaagctttacataaagagttttaaatgtagatcattatgaacaatagaaaatatccctatttacaaatatatttatgccagaaaatggagattgaaaatgtcaaattgtcggcaaataaatgcaacagaatgtggaagtcagaaaaatattataaatgatctgtaacagtgtgttgttttaatcctccaaggacctttttcactatcaatatacccttatttatgcttagttagaatctcaacctgccttctggttgtaacgaaaactattcaattaaaacattgaatttgtccaaaaatcagaacgtatgtcaagtggaaatttaaatcacaataacatctgctattttccaccccaggtcttttccactgctgtgactggcatactataagtttctagcacccccatgtggcttaattggagtggtttcataggcatttgaaatcagttgcctgaaactgagaacagtagaacagactataattttacacagaagttctgctggcatcataaaccaagaaagggaaacttaagtcagcaaaattataagataaatgtataggttcaattcctaaattatttgctgtctactgttcattttatgtgatcactagaaaggatgatttacaagcaactatagctggtttcatctttgtcagatagaattcctcagttttcaaaaccaagcatttgacatgggcaataattaaatagatgaaaaagaacctaatttttctcaaaaagaaaagcaagtgttttattacctagtttgtacacatattgatcaggcaaatacagtaacccaagtatatgttgcaattgctaaatagttgagcaatccaggttttgagattttccactgtcctcaaagatattttaagtgattaaagtatctacattttgtcaaatcatttgagaacaatttttatacaaacaaaatttttccttctctaaacacatccctagtttgcaggtaagacgtctttccaatagtagtgtatttcagagtgctttcagagggaagaagttcaagaggactatattgtctttcttaatctgctaataaatgctcctcttattgaagatagatgtttaaaactgatccatgctttcatcagcctaaggtgccccagcagtttcccatgaaaaatttaaaagtagattttaaggactacattatcaaaatattctcaacataaaatgaagtttaaaaataattggccatgatggagataaaaatgtaaattagtcagaggtgaagagtctgttaagagaaacctgaatgtggcttaattgtatgctgaactgaatgtcccaatttaaaaacagtagagcgcaaaaggaatgcattttctcctcaatatacagcaatgtatagattgatattaaaaggggaaaacagacttcagaatgtagaggaaaatttatagaaaacaaatattcatttaattgattaataaaatttaaatctagataatacttcataattaaataatacacgttcatcaatgtataccaattttgtgcattcaaaagaccttattactatgtctgatgacaagggtgggaatagaagatgattaaaaagattaatggatacatttctaaaggtaaacatctaaaaaaaaaaaaacctgccatttgtcttctggctacgggtactattttccaacaatggcactatctacctcattgaatcacaatgtagaccaaatgcttaagagtaggaagaagactctttaaaaattgcactgaaggtgtctggcatgaatgagagcagcactgccttacctgttgaggcctttcagtgtcttttccatgtttaaaatatcacgcatcttatacaaaaaccacttgtcaatgtatgtgagcttctcaatctcatcaagggacatgttgtcatcaatggcctgccaagaggagaagagatactttctttggcaaacatttttctaaatgtcttatttggtttaaaatacatagcagtcatgcctctgtgtgttatttagagagcccgagactgtagactgagttacaaaacatgaaactgacatcactgacattccttccaataaacataaagatggtgccaactatatccacaaatggcatacagagtaggtgcttgccttgagtggtgtgttctcagaaaaatctcctaacaggttttgactcgctcctctttatttgattgtgttacccattataccctaaatttggtacatctctttggaattaaagaaagtctcttgaaactacagttaagccaaattggtaagaaaatctagaattaatataatgatctcttaacttgtagtgttgatagttatcttgtaggagatagcatatttttatcacctcactccacattcacacaaacatacaatagtcagtgagaatttatgggtcggatctggcttggctttattcctccagaatatttcctcacagaggacttcaaataaaaaattgttttgaatcagtcactatgatttttgtgctaaggcaggcattttttaaaatcctaatatattccaaaacaatgtagtaataacttctgttctgataggcagctcagcctcttcctcaagcttactttatcaatttctcaaaagtaaaactacaactatgggtcattaagctgagtagaaaatttaactgaaaaaagagataaactctcaaaaccaaaatctttatacaaaaagatgtctactcttattcttgtatgtgtgtatgtgtacgtgtatataccctgtgaaaaa

SEQ ID NO: 1880333 - DNA, 4001 bp, Homo sapiens
ttagacatttaagtgtacagtttagtggcattaagtactcagacattattgtacaactatcactactgtttatctttacaactttttcaacatcccaaacataaactctgtgcccattaaaccatcactccccatactcccctcccctcagtccctggtaatcactgttctgctttctgtctctgtgaatttgttcactctcagtacctcatgtaagtggaatcataaactatttatctgtttatgtctggcttatttcacttagcatgaagttttcaaggttcgtccgtgttgtaacaagtatgagtacttcattcctctttcaggctgaaggatacttcgttatgtacatatcacattttgcttagccatgcattcattgatgaacattgtacacatcacatcttgtttagccattcattcattcattcattgatgaacatttgggttgtttctgccttttgggtcttatgaataagcagctatgaatattggtgtacaaatatgtgttcaagtccctgctttcacttcttgtgggtcaattactacaagtggaattgcaggatcatgtggtaattctatgtctgatgttttgaggaaagatgccatactgtcttccgcagtggccacaacattttacattcccgctcacgatgcccgagaattccactttctctgcacctttgtggacaccttctattttatgattttctttcttctgacattaaccatcctaatgagtatgcagagctgtctcactggagtgtagattttcacttcttagaacatagagtgccatgagctcaagggcaggagggacagagctccagcaagtgatgtagtaattatggcaaggggtgaggtaccagggcaggctttctaaatcatgcaagggaaactagtaagaacgtggcctcctctgcttcctgcgaccacagtgggggctgcactgacactgagaccaagaagagctagtggacatgaggcttggaatgtgactgtgaagagaagggaggaaccccacgggactgcacttaggcaagaggtcttagagagtagtggaagtgtgccctgaagaagagccaacaaaggaaggcctgctgtctttgggcagggagtccttgctgatcaagccgtgtatggctataatcttgagaagtccatggcaaaacttctggccaatgaaggcgtagatgaggggattgaggtagctgtgaaggatgcccagaatctcagtggcatccagggcctggttgatgtcgttgcggcgctcacaggtctcattggtcatctgggttcccatgagggtgtctgccagcaggaccaggttgtagggcagccagcagagcaggaaaatgaggacaacagcaaagatgacccacatggtccagtgcttctgccccatatgggccttaaacagcgtatgcagggtgaatctgtagcagaacagcatgatcgcagcggcacgatgaagccaaaggactggggcaggatccgtaacagcatccaccagtttgctgtattgttgcccatgtcctcatagcagactgggctaacattggatgggtagaaggtccttcggaaaagcaagatgcgtagggacagtaacaggaacaggttccacaaacccagacatatgaacttgaccaagtggcgctgctgggtcagtgtgcgtgtggcatggacaatggccaggtaacagtccatgctgcggcaggccagtagtagaataccaccgtagaagttgacttccttcaggagctagaccacctggcacagattgtgccaaaaatccagccattcatcttggaggcagccaagatgggcaatgtcagggaaaagaacaggtcggccaaggccagggtcagcaggtagacatcggtgacagtggctgactcagctgaataagatgaccagcatcggcagggagtttcacatcacgttcagtagaaacatcagggcatagatgatgatcaaaacataattgatttctagggattctggccaacatggggcagaatctagtagaaaaggggtagggtcatagctgaaactgtaattactaaaatctccactgaagatgtcttcccacatgtaattttcccagccaaaattttccatttttgaggtaaacttaaatcctggcctatagaagagagaagaggattattgcacaataaaccttacccagattcttgcctatccatccaagaaactgggataggattctttgtgttggcttgtatattacatggaagtaattttcacctctaatttgtatatggcaggtagtctaaagttttgaggcaatgttagtgataaatgccacaatttatcaaaagacttccatactgattcccttccatgctggacacatattcttgcatttcccatgacatcacagtctcccaaaactttgtagaatgttccctgtggataataactacaggacactcaatcctacttggatccctcagtggtgagcaccttcagctgtcaaggctgggtttaatgttcagaaacatgagatgccactcagttcttaatcaggggactaagcagccactccaatggggttgtaccctcaaaacagatcaaggtttgactataaaagtgagggatgaatctctttgtgcacccttctgaaagttattttgaaagaaatgttctggaaaacagtttgaacagtagcatggagttttggaaggctcgagatagaagaatcttcagttaattagtaaggcccagcatttctcttttgggtagaaggaggcctgctctgggaatgtgtgtgtactttggaaaagtatattaaaaatgataagtgggccaggctcagtggctcacgcctgtaatcccagcacttcgggaggccgaggtgggcggatcacaaggtcaggagatcaaaaccatcctggctaacatggtgaaaccccgtctctactaaaaatattttaaaaaaaaaattagccgggcatggtggcgggcacctgtagtcccagctactcaggaggttgagacaggagaatggcgtgaacccaggaggcggagcttgtagtgagccgagattgcaccactgcactccagcttgggagacagagcgagactccgtctcaaaaaaaaaaaaaaaaatgataagtggccgggcatggtggctcatgcctgtaatcccagcactctgggagacagaggcaggcggattgcctgagcaggagttcgtgaccagcctgggcaacacggtgaaaccccatctctactaaactacaaaaaattagctgggcccagtggcatgcacctgtagtcctagctacctgggaggctgaggcaggagaattgcttgaacccgggaggcaggggttgcagtgagccgagatggcactgctgtgctccagcctgggcgacagagcaagactctgtctcaaaaaaataaaataacataacataaaataaaaataaataaataataataagcaagtgggctccctgattctccccatgggtagaaacgtaacaggttatttggggagctctgagcagccatgtgctgccatgcaggatgagcagacacagccagcctgcaccccaataagagggaacggcggcaggaagcagagaaaacaggggctgcactacccttgcttggtggctctccagccttgctggggaccctccctgtcctgcatgtgtgtgcctccatccagccctgactcccctgttcttctcattcagtccatctctgctggctctgcccttgctacagggacaggagagatcccgctctggggaagcctgggtgtagagggtgggctgaagccattcaaaaatgttatcccagtttctcaaagaagaagtcaactaaagcaatccagctccctaattagcttttttccgaaccacaaaatagatcaccctctggccattgccttagagtctaagggatgaccatcctaccatcaaccaggtccaagtccataacctacccccaaaatggaacccagtga

SEQ ID NO: 1880334 - DNA, 4001 bp, Homo sapiens
agaatggcaatcattaaaaagtcaggaaacaacaggtgctggagaggatgtggagaaataggaacacttttacactgttggtgggactgtaaactagttcaaccattgtgcaagtcagtgtggcgattcctaagggatctagaactagaaataccatttgacccagccatttgacccattactgggtatatagccaaagattataagtcatgctgctttaaagacacatgcacacgtatgtttatagtggcactattcacaatagcaaagacttagaaccaacctaaatgtccaacaatgatagactggattaagaaaatgtggcacatatacaccatggaatactatgcagccctaaaaaataatgagttcatgtcctttgtagggacatggatgaaactggaaaccatcattctcagcaaactattgcaaggacagaaaaccgaacaccccatgttctcactcataggtgggaattgaacaatgagaacacatggacacaggaaggggaacatcacacaccggggactgttgtggggtgtggggaggggggagggatagcattaggatatatacctaatgctaagtgacgagttaatgggtacagcacaccaacatggcacatgtgtatatatgtaacaaacctgcatgttgtgcacatgtaccctaaaacttaaagtataataattaaaaaaaaaaaaagacaggacgataatacacatttggtgatacaattaagaaacatgatattggaaagttgctgaccaagtgccacctagcattccttctcttgtactagccacatgcccactcctcatggctactgctagcctcatctaagaactggggacccagcctggcaggataagtgtggctccatgctttaagccagagaatttaggagactatgatctgttgctgtgtcaatctgaaagctgagggatctgaagggtacgtggtacccattctctgactctcactcccaaaagtccttttctccctgggtcaacatacggttggtgcccaaggcccttcctaggaattggaagccaacagtgacacaaagcacttaggaggcacacaaccacaaatgtgtgaggtttgccttcccatattttctggacccatgttcaagcctggaactctctagttcataaagggttttactcttgcaggagtcagcaaactatggcctgtgggtggagggccagatggggccatgctcattcatttacatactgtctaatggttgctcaaaaatcacagagttgagtaactaagacagactggaaggcccacacaggcaaaaaatgtactatccggacatccacataaacagtttgcaggccactgatttagagtaagaccagttctcctgggggcaatggattgtctttctttgctttcagcctgaccaatgcccgtgggtagggatggagagggagcccatctctctagttgattctgatgagaagaaccagggtgacccacctggaatgtgagcctctgatcttccaggcatctggcatgcccatttcttccacagagcaggatagaagctcctcccagcagggggtcttgactatttgagaccactgtaaaagaaaagtaagaacaagtgattcacgtttgtgtttcctgtaaaaagaacatggttgtcagtgctattaacctggttaccactgactttgacgcagatacagccggttcatgtttcagaacttcatgaaacaggcctgtgccttcaatcagaggcagcccaaaagacaaaattgccaacactttctatttgcagtggcccaggaattatcaaataaccttagttcctattaaactcctgcctatttaccattgcctaaacctggaggcaaaatctaaatccaaaccatcacaggtaatctccaatctcacatacttttccaaaagattcatgtgttaggaaaggatgattgatggctcaaaagtcaccagtgccgattcttgtgttagcaaccatagttgaagtcaatgcttagaactggcgtgggaagatgttctcaaaactgcagctttgtgcctttgtggttatgtaacagcctcctccatacagaggattactacgaatgggtgcttcctgctgttgtctcatgttgatgaggcattttatattcttgaggaatattctggagggaggaggttggtgaagactggtaaagtagagaagagagacattttaacaaaatattcatatttatctggtctctaacatgaaagctgcatattttgtggtatattaattaagtcatttttataagttataaatgatactagtacagtaagtcctcacttaatgtcatcgataggttcttggaatctgtaactttaagcaaaacaacatgcagcaggttcataaataatgtcacttcctttaacgttttgttataacgttgatgagaaaaaaacgcttttgttacatgtcattttgcttaaagctatagtttccaagaaactgtcgatgacattaagtgagaacttactgtataataacattatgttagagtttagtgggctcccaaaagatcttctcttaccaggtagacagttctctcttttagagataaaagaattgagcctcacagaggccgtatgagcagtcagagtcccactatgttcccacctaccattcaccactaaatccttagtctggctgcagaaaacagaaaagatttatttcctcaaaagtcaacttctttagactacattgaccctaatagaattcagaaagcaactcttagactcaaatttttctgcttattgccaccaccacactcccccagtcatatgacaagagtcgtttgcggtaggaagcaaaaccagaaatgcacttgagcagtctttctatgtccttccttgcctcacccccattgggggcctgcatgatggtgagtggccacataaacagtccctacgtctccaggagttcccttggccatggctgctggaatgactcatccttctccatctgtagcctaggctttccccttctccttaatttccatgagggagcagtcttagatcagagcctccccaaggggacaggaccacagccctccctaaaaggtcctggatctggtataaatctaaccatgggagaaaacagaattcagttacagacaacatcaagggcaaacttgaaggggagcaaaaatcacaatatgggtgtgggaactggaccacagagttacagtggtcatttcctccccaccacatcttgtgaactttaccttgcccactgccccaaggggcaaccatgtggctcatggccctggccaccaataactgaattgggagtagacccactttaaacatgacccactttaaccaatcagacatctttatctagaacttggagttgggacacagaaagcctgagggtgtttttttatctgtgagtgctagactcacaagattctgtgggctcaaggactgagttagacagtcatttaaggtcatgtggtaacagagtatgcttgacgaagggggaggatggagcagagacaaagataactgagagaaagggaggaggaagggcagctccagactctagcccttcagtgatccaggtgcaattcttcaaactgggtttcacagtattccgttatcactgtgcaagtaatccccatttacttaagttactctgagtgggtttctggccctagcaactgagtgctcccccaccataagatgaaatggctaggctggagctgggaggcagaggcagtgagtgaggaagctagacggatttttccagagaaagtaagtcctagagtccaagcatatgcacgctatccacacgttccaaattttaggagacagccctgtttcaaatgtgccagcttgcccaaatttctgtttaggcaattgtggtatatctgtttatatatataattttagcattgggaaggccctcctaagtaagacacaaacctggaaaccacaaagaaaagaaaagattgacagat

SEQ ID NO: 1880335 - DNA, 4001 bp, Homo sapiens
gaggctttcgggagaatgggaggagggaaaggaagggcagaatggagtgatgtagggtccatccatcatatccctggatggagagacccctgttcccacagtagtcccacaccgggaccaccaccagcactcatgaatatgccagcctccatttatatgtcctcgtctgacaactccttcccattttcatcctggaggcaagactctgaacacactagctctgaggacacctgtgtgtaacctgagacagtccctgaagacctttcatccaagcaggatccctccctcaccatctccagacctgccccacaagctccctccctggtctcctggctcttgttcactccttccaggcaggcttctacagtcatctcgaaaacatagctgactgtcactcctttatccagcatcttccatggctccccagagccctccagatcaagttcaagtaccttgatcagacacttgatctcaagctccattctacctcctgaattaagatcccggagaagccaccttgctcagcacaagcgcatcaatgaagtccgaagccttgaatgtggccttggccttgaggaagtcatcaacaccctggctagtgagggtgcggtgctgctgcaagatgatggtgtctgaagttgtgcaccaagtcacaggccctgcagaagcattgcccctcaggaatgggtagtacaggaagtcccagcacaggcagatctgctgacgccgttacactatgagggtactgagctccaagatgtcagcaataagttcactggcattcctgcagggtgaggctagggagaggaagcagctccgtaacacatatgaaactctggaagcccttcccagccaaaatctctggaccacattacacccagaaatgggtgccctctcagcacacttctctctgcctccctctctgagctgcctcctggccccacatgccccagcctggaccagggcttggagcccagcaggtgttcagttcatggtgttgactgcttcctggcacaggagagcctttggtagctctgtgactcctcctgtggaacccctgcctctgcctcaggacctccctattcccatgggaagaccccaaggattgccccacctgcccagggatcctccaaccccataggccttacttgatgccttatccctcccagaacatgacatgtttctcacaaggtgacttatttccaaggccatctgtggatgtttgctggggacctcttgctcttctcctttatgatctgtagggcagggccaagaggagaaaccagcccaacctcagaacaaacaaaggctcactgccacaaatggcaaccaccaaacagtcagcagtgcttctgggaggaaaggaggtttcattccgcacaaagctccttgtttggtttctttctgaatccggggaggggtaggtaccaagcccagcttacctgtggtgtctacattaccatctgtgcctaggatgtgcaaagggcccctgctcccaccgaagggttgacgttccctccagctggagacctgggctcctgacaccgcctggcctgtttgtcctgctctggatgagcatggaaaggctgtacctggtatttccctaggtccttggtttctaccacctagacatccagcaggagtgaccatgtctagcaccacacctgaaaggggactcccttgtacagcagcccagacatctacagatggaagagtgctcagtgagacaggccacaggggtccccagggaggatcagggggtggaggattctggaggtttccagccttgggctctgtggttcctcaaagaggttaggtctacctagtaccaggcctcccctcccacgattcaaagactgaatgagtgtccagcatcaggaactctgttctggacctgttttttcatttaggtcaccaagggacaacccctaacccctgagctagggatggtccaagctctggcatgagattttcctccagcaatgtgatgcttacagggacaggtagaaaagctggtgaccaggcctgctgtcctctgggtaaggagtgtgccacccaccctctgagatgcaggtggtgccaggccacagcactgggtgcctgtacccctggctctgcagacaccggtcatggaggtccctccctccacattaccttcttgctgctcctagatttcttctagtcattaagcactttgagtcacttttctgtgcatccaattttacatttttgctctcagatgaaacagaataaagtatgctgagctgccaggattcctggaggggaccttggatgctgagtcttgggatccagggccctgatgggactgaaccagaaggagccagggaaggacaaagattggggctgagcccctatgatttggggctcagcccccaatggccattggtgggctggccttatggtcccaagacaccttgtcctcaggccagaggcaccatgggctttggtcgggtcccagcctcccagtagtgtcctggcactagcaggagctgacccctgagccacaactgcagttctgggtttggggtttggtaaaaccacctcaaggacagagtcttgggatcgggtttgccaggaaccatggtgcctcccagagatggtgtgtcactcccactcgccacgaaatgtgcacacaggctgtccccatgtccatcccatcccgctggacaggatggaggaagtcagggaacaggcatggtggacagctggggtgcagggagaggcaggtgcatgctgggaggtcaggccctgcgagggctgtggaggcatcaggtggagcgggctccaggtgcaccttcagtgtactgggcacgtctgaggccaggctcactggaccctggatgtgtgatgtggtcaatcactgggggaatgttgtcaggtcccagacacccaccctgggcagcactgtctcatctcaggactggactttctgagtcctaagacaagacagtgctgcccaggcctgacagcctgggaggacctgttacgtcctccatccctagactagcctcccaacagcagggacagtctcttatcttcaccttcagggaactgactgatccatctcactctaagccaatcgaggcagagctgaggacctgcaccagtctgggagccagtcccctccccaaatgggcctgagggaagcaccatccctgtcccaatctgccacaagtttcagcccaggagacacatggggaagggaggacggggcatccctgctggctgacactggaaaagtgggacctgggagaatggggagcacaaggctggcaggggatgctccaggcccatggagagctcaggctgcaccatggggttgcccctcctgggtggaggctgtgccctctacaggatctgaggaagtccagtcctgagatgggacagcgctgcccagggtaggtagccgggacctgagagcagtcccccagggagtgaccacatcacctggctggggtccagggagcttggggtgagacccacccagtgcactgagggtgcacctggagcccaacccacctgacaccctcacagccttcacagggtctgacgtcccaccatgcacctacctctccctgcaccgcactgcccaccctgcctgttccctggctttctccatcctgtgcagcccatagactgtgaccatctctccagacactctgaccctttcttcacctttgtcctgtcagaatctctgagcaacatctcccaggtccatccaaacaactgctttgtccacttttgaccaggccgttgggcatcactgggccatcccagctgtccagagggccctcgataacgtgcaatgcacctggcttctccaagcagcactcagcagtccccactgaccaggttcctgctgaccagaccccacacatcaggtcttccctgaccacaccctcactgattagatccccatcaccaggacccactaacaagacccctgcttccaggccaacaatgaccatgactccactgac

SEQ ID NO: 1880336 - DNA, 4001 bp, Homo sapiens
gaacacactagctctgaggacacctgtgtgtaacctgagacagtccctgaagacctttcatccaagcaggatccctccctcgccatctccagacctgccccacaagctccctccctggtctcctggctcttgttcactccttccaggcaggcttctacagtcatctcgaaaacatagctgactgtcactcctttatccagcatcttccatggctccccagagccctccagatcaagttcaagtaccttgatcagacacttgatctcaagctccattctacctcctgaattaagatcccggagaagccaccttgctcagcacaagcgcatcaatgaagtccgaagccttgaatgtggccttggccttgaggaagtcatcaacaccctggctagtgagggtgcggtgctgctgcaagatgatggtgtctgaagttgtgcaccaagtcacaggccctgcagaagcatcgcccctcaggaatgggtagtacaggaagtcccagcacaggcagatctgctgacgccgttacactatgagggtactgagctccaagatgtcagcaataagttcactggcattcctgcagggtgaggctagggagaggaagcagctccgtaacacatatgaaactctggaagcccttcccagccaaaatctctggaccacattacacccagaaatgggtgccctctcagcacacttctctctgcctccctctctgagctgcctcctggccccacatgccccagcctggaccagggcttggagcccagcaggtgttcagttcatggtgttgactgcttcctggcacaggagagcctttggtagctctgtgactcctcctgtggaacccctgcctctgcctcaggacctccctattcccatgggaagactccaaggattgccccacctgcccagggatcctccaaccccataggccttacttgatgccttatccctcccagaacatgacatgcttctcacaaggtgacttatttccaaggccatctgtggatgtttgctggggacctcttgctcttctcctttatgatctgtagggcagggccaagaggagaaaccagcccaacctcagaacaaacaaaggctcactgccacaaatggcaaccaccaaacagtcagcagtgcttctgggaggaaaggaggtttcattccgcacaaagctccttgtttggtttctttctgaatccggggaggggtaggtaccaagcccagcttacctgcggtgtctacattaccatctgtgcctaggatgtgcaaagggcccctgctcccaccgaagggttgacgttccctccagctggagacctgggctcctgacaccgcctggcctgtttgtcctgctctggatgagcatggaaaggctgtacctggtatttccctaggtccttggtttctaccacctagacatccagcaggagtgaccatgtctagcaccacacctgaaaggggactcccttgtacagcagcccagacatctacagatggaagagtgctcagtgagacaggccacaggggtccccagggaggatcagggggtggaggattctggaggtttccagccttgggctctgtggttcctcaaagaggttaggtctacctagtaccaggcctcccctcccacgattcaaagactgaatgagtgtccagcatcaggaactctgttctggacctgttttttcatttaggtcaccaagggacaacccctaacccctgagctagggatggtccaagctctggcatgagattttcctccagcaatgtgatgcttacagggacaggtagaaaagctggtgaccaggcctgctgtcctctgggtaaggagtgtgccacccaccctctgagatgcaggtggtgccaggccacagcactgggtgcctgtacccctggctctgcagacaccggtcatggaggtccctccctccacattaccttcttgctgctcctagatttcttctagtcattaagcactttgagtcacttttctgtgcatccaattttacatttttgctctcagatgaaacagaataaagtatgctgagctgccaggattcctggaggggaccttggatgctgagtcttgggatccagggccctgatgggactgaaccagaaagagccagggaaggacaaagattggggctgagcccctatgatttggggctcagcccccaatggccattggtgggctggccttatggtcccaagacaccttgtcctcaggccagaggcaccatgggctttggtcgggtcccagcctcccagtagtgtcctggcactagcaggagctgacccctgagccacaactgcagttctgggtttggggtttggtaaaaccacctcaaggacagagtcttgggatcgggtttgccaggaaccatggtgcctcccagagatggtgtgtcactcccactcgccacgaaatgtgcacacaggctgtccccatgtccatcccatcccgctggacaggatggaggaagtcagggaacaggcatggtggacagctggggtgcagggagaggcaggtgcatgctgggaggtcaggccctgcgagggctgtggaggcatcaggtggagcgggctccaggtgcaccttcagtgtactgggcacgtctgaggccaggctcactggaccctggatgtgtgatgtggtcaatcactgggggaatgttgtcaggtcccagacacccaccctgggcagcactgtctcatctcaggactggactttctgagtcctaagacaagacagtgctgcccaggcctgacagcctgggaggacctgttacgtcctccatccctagactagcctcccaacagcagggacagtctcttatcttcaccttcagggaactgactgatccatctcactctaagccaatcgaggcagagctgaggacctgcaccagtctgggagccagtcccctccccaaatgggcctgagggaagcaccatccctgtcccaatctgccacaagtttcagcccaggagacacatggggaagggaggacggggcatccctgctggctgacactggaaaagtgggacctgggagaatggggagcacaaggctggcaggggatgctccaggcccatggagagctcaggctgcaccatggggttgcccctcctgggtggaggctgtgccctctacaggatctgaggaagtccagtcctgagatgggacagcgctgcccagggtaggtagccgggacctgagagcagtcccccagggagtgaccacatcacctggctggggtccagggagcttggggtgagacccacccagtgcactgagggtgcacctggagcccaacccacctgacaccctcacagccttcacagggtctgacgtcccaccatgcacctacctctccctgcaccgcactgcccaccctgcctgttccctggctttctccatcctgtgcagcccatagactgtgaccatctctccagacactctgaccctttcttcacctttgtcctgtcagaatctctgagcaacatctcccaggtccatccaaacaactgctttgtccacttttgaccaggccgttgggcatcactgggccatcccagctgtccagagggcccttgataacgtgcaatgcacctggcttctccaagcagcactcagcagtccccactgaccaggttcctgctgaccagaccccacacatcaggtcttccctgaccacaccctcactgattagatccccatcaccaggacccactaacaagacccctgcttccaggccaacaatgaccatgactccactgaccaggaccttactgacaaggcctcatggacaaggcctcactgaacaggaccttactgaccaggcctccctgacaaggcctcactgaccaggtccttactgaccaggcctcactgacaaggcctcactgacaaagtccttactaacaaggcctcactgaccaggaccttattgacaaggcctcatggatgagctccttactgacaagtc

SEQ ID NO: 1880337 - DNA, 4001 bp, Homo sapiens; identical to SEQ ID NO: 2845

SEQ ID NO: 1880338 - DNA, 4001 bp, Homo sapiens
ccagaaacaagaatatatatttacagtcttattccaggactaaataagaatacttttatcaaggcaacggggccaaagtaagaaagaagtacatggacaggcctcatggacagatggaaaggtaagatcgctaccctagcaaagggataatagatgggatttgtattcagatttctgataaccagtccatacattaggactatacctgattgaggcaatccaagttttaaaaaaaattccaagatgaagcaacttcacagacccccttctgtattcgaatcccatgagtataatgggatgccttttttaacggaatgtgatactgatcatgaatattcagtgttgctccccaaggaatgagtaaattctcctgcccccatgaactcaggaatgacgatgtgacttgttctcgccaataaactaggagaatgtgaaatgtgtcacttccaggcagccattttaagagctaaattctcttcctgactctgtaataatggaagcatgtatcaagatggcgcatctatcagcctaggtacctgtgtaatattaagaacaggaactaggacttatctttttattgccagcacctgatagaatgcctggcacaaagtagatgtttgtaaataatctttgatcaattaaatagggaataaaatttcataccacctgcaattagaaggaaagctacaggcaagcaaggaccatggctgtcttctcactactccatgggggagcctccagagagagcctttcacttgcgctgggatctatgtgcaccccttaacactttgtgccagactaagacactaccaagtcagttgaaacgacggagtgcaaactctggcaggggaaacagtattaaaccaaatctccaaattattttcaatttcgattcaaaactcatgaatgatagcttttttaaaaaatcagttttttaaaaaagcctaacttggggatattcgcccattgggcaaccaacactatgcactgtccctaacactgcaacagatccaggcaatcaatgcaattgtatgcgtttcttgttgtcgttgccactgtatttacacctcacttacacagggactggtaacccatgctgccttggcaagccaactgcactcctctgtcccaacaagcagggcaatggattgcgaagaggcctcctccgtccccaagcagctacgtcgcccaggggaagagagaaggcgggaaagtccaagagaggagaaaccaaggcccgcgcttaggtgggtgttttagtgacgagtctgcggttacagccgagcggagttgaaagggctgttagaagaatggagcagaagtcgcagttgggacgaagctgaagagagctggcattcgcccaggtctacagccagccacctggtaacccctgcccccgcccccagagccaatccagcgaaactaccgcgaattcccgggaattccctccaactccgggaaaactcccggaggggcggggcaagagtgggaggagaccctgcgcgcggccgccagcgctccgggatctcgagatagccgcagctctcgcgatctttctggagccgcacctccacgcggagtccgagcgcgtgtgctgagaccccagggtcgggagggcggagactgggagggagggagaagcccctttggcctgccttacggaagcctgcgagggagggtggtgtccactgcccagttccgtgtcccgatgcccagcgccagcgccagccgcaagagtcaggagaagccgcgggagatcatggacgcggcggaagtgggtttcctcctttcctgggcctgggaggacagacccctgggccgggctgcgccgagggagggaggagggggagtggggccctacaggtccttgtcggcacgttctccgcaggctgcgggcgtggggtccgggcgcctagagcccttgccccagcagtggggccagaccctctccggaccgcgtttcttgcgggggtcacctgggagtttggcctactagaagcgtgtccccggggtggggaggacgggaagaaccagccgccccggaagtaggagcgcggcgtcacacttgagtctctctgggttaggcacgtcctgcacgtaatgcacaatccctgggaaaattttaataagcactagtaatcgatatgtactcagccctcgtgttcctaatgctttagcaagtaatgacagtacttagcaaaaccatctgccaatatgtttaatgaccatttcccatgtgacagctttaaagaacacatgtcatttttatttactttctccctctcagtgacccggtaaggtaggtaataggagttaccgagaatgcatttgaggtgaagtgaccccaaatcacgtggataattcataacacccagtgatccttcggtgcttttcagaaatcaaagtttgaaaccatcctacaagttatgtgtgctgtagtactgttaagccttaatttccgtctggctccctaatttttctataaggagttctgagtttgtggtaagcaacatgagaagtaaggtcatcttagaatactaaatgaggaagagtcactgaaatattaatagtactaattatgaatgcaacttttttgtccttcacacaatttaatctccttctgttgccctcaggcttcattgtgtgactgtatctctctactctggccagggttatctttttctttaaattgttcagtaagcgccttaaacatgtctggttttattttggtgtaaacacaaaatccagcaccctcctgctctaaaggagaggattccaacaggtagctgtaaagtgacagaaacttaattgtttcatacagatcttaagttaccttgtaaaaactagggcaattatttttgtgtactcttaatctgcttaattacataaactatcagtgtacccttacagatagtataggtctagatacaaggtagacattgtggcagagttatgccattttatagctagaagaatcttagatcattttagaggtaaagtaagattgaaataaaggccacttatctatttaataagtatattttgttaacagattggaccctaggtcttctgtttcctgttcctaactctaatctgtaacaagaaatttgatattattatattgtcagtgtcaaactcctgtaacctggtatcctgaatctggtttttagaaacaggaagctggtgaattttttgatgatgttttacaaaaggaaagttgtagttagcttatacccagcatctccagtttctaaaaactgtggacatctggtgctcagaaagcttacccaaaacgttggttctctttgaacatttcttcctgtaataggaagttaataaaactgtggtacttcatcctactcccttcacagaggaaatttatgtccctgctttgaagtagtttcatctttttgaagaaggtagttaagatgtgttgtacatatgtgtaaattttatctgagaatgttattaagtatggtaaatccatctaggagtggtgatcttcaaaacaaactaaccagaaacagtacttttctgttttctgtagagtacatatgtaaatgaatgagagatttccacattatgaaactactgactttctgaattaataaaatgatcctgaaagttaaattcatttttatattctattattagtatttatgtgtttactgtgctcttagtgtttacataaaaagtcacgatgcaaaaaactttttttgtaggattatgctaaagagagatatggaatatcttcaatgatacaatcacaagaaaaaccaggttagtagctatgtgacagtaaataaagcttttttgctttctaattccaggaaagctctaaatgaaattttaagtaaggttggcataaatctgaaggtataattctgaaaagcttaaatgacattaataatccaagtagatgtcataaccctgtgtaaacattgtcagtttagggttccaactctagaaaaggaaaaaaaatgttattaggtattgtaggt

SEQ ID NO: 1880339 - DNA, 4001 bp, Homo sapiens; identical to SEQ ID NO: 2852

SEQ ID NO: 1880340 - DNA, 4001 bp, Homo sapiens
taggcttcattcttaagtaatgtactttgtctatattaactccctgcaaatatgtatatgtgaacagaatatcttgaagatacatggtgaggtttggttgcctttgttctctgaagtcttttttttttttttttttttggagatggagtctcactttgtcgcccaggctggaggccagtggcatgatctcggcttactgcaacctctgccttctggcttcaagcgattctcctgccccagcctcccaagtagctgggagtacaggcacgtgccaccaggcccagctaattttttttttttgcatttttagtagagacggggtttcaccatgttagccaggatggtctcaatctcctgacctcgtgatccatccaccttggcctcccaaagtgctaggattacaggcataagccaccacgcccggtctgttctctgaagtctttacggttgttgtttctattattgttcccagcaagaactggaactgacctgatgtcatgatctatgaatataatttttaattaaggaagaagtaccaggaaatctcatgtcactatagacctgcttcgctgaataccatttagcagtctatactccagccaccaggcatattggttgtgcaatgatgcctccacgataactaacagtgaggagtagaagttgggcttagacactctggctcttgcataggtcgaggggtatgttgtgttcttgtaacaaatcccacatatacatacatatgcatattgttccacaaacatccccaagcagaaaccagagttaggggcagaataacctcaagaaaattttggttgctaggccatagatgcgtctttctgaggctggtattttgacactatgtgctccattgtttctcatctgctgtattgtgctgcatcaattgtttcaccacattatcactaaaaacttggtctccctaaaaacattaacttcttagggcctgtgtgccaatggggccttttggacttgacttcagctttttggaggacagagtccctttccccttatagtgctgggttattagtgaatcaaccctgaagaggtaaagggttggagcctcagcctcccaagaggctgtcactggagaatggtctcactgacctcagcccttgggcatttccatagcacattttccccctaacccctctactcctgccaaatgcctacctaactcttataataggaaagctgggaactccactcaaaaccatacaaaaaaccagtttgtacatttggacacctcccgagcactcacagtcactgtgtttctcttttccagcagcagacagtcactctcatgcagtttaagtgatttattgatgtctcagctaaacttgctttggtttcaggacatttcagccatcaaggtttttaaggaagagcattctgtaccagaggagccatgctgctttccttgtgtttgctaatgtgtccttagccagcctcattcttcttcagcttttctactttggcaacatagatcctcatggtgtccatcttagacatccctttgttcacattccatgcctcctacttggccttggctttcacatctgaggctgaaggggcagggatgttgcagtcgctctgggtgggctgtttgcagaagctgtacaccagcagttttctcctgatcgcacacagtacccttcagctgcttgagggcagtgtgggccagctcaaactccacttggcacattgtgggaggggaggccaggcccctctgtcctttctaggtgacacctggtgctagaaggctcatcaggtttcttcatcgatagagtagggatgatgatgatgatgtatcttcctcactgagtttcattgagaatccctatgtaggtacagggctatgtgtgttgtagcactgatcaaactctcagtagagagtggtataattataactccttaacaaacatttcaagatactaagaagaaagtataataccaagttttggttacacagccttttaatgaagcaaaaacttttagacattagcattccaagcaaagtttattctagcaataagacacaatgtgacagctaatataaattactgtggaaattacctcagatctgagaaatctggaaaatagttgaaaaagctcatgggtctattcctaaaggacaacctgtgaacctgtcagtgctaggacagatactacctagctgttcctgcctataccactcttcttactttagagctatggtagccccttcataatcctttcaggttctagcagaggaggaatatcaatttaattaatattctcagatttacaacatctgggaaataacagcatttataaatcatggacattatcaaagatcattcataatatattcttactatctaaacttggttttctgtacatttaacttttctagaggtatgtgaagtggggaaaatgggtactttaagaactatgatttgtttaattttcacctacataactggcaaacattttcattattattatcattatgtagaaaaacatagatgtatcaatatccatattttatctttagtatctcacaggaaaggtattttgggttaatgactatttacccggaaaatctggagaaaattctgcaatcttgacaaaaccctatttttttaaatacaattttttctctaaaaattagttaacttttgattatctgtgtgataaagaaggttgggaataggagaatgaaaatttgctggtaactcagtttggcttacatgttatgcattattaaaattttttcagagcaataacaaaatgaaaaatctaatttgagtttcacctttttttgtcataccctctggtagaggtacagataaatgggaagtagaaagaaaaatttgaagtataaaagccttcagtctgattaactttgaactctaagatttaattatataatgtaattattgtctaatattaaacaatgttgattattattatagatgtctataattttttttttttttttttttgcaacggagtcttactttgtcacccaggctggagcgtaatggtgcgacctcagctcactgcagcctccgccctccgggttcacgccattctcctgcttcagcctcccaagtagttgggactacaggtgcacgccaccacgcccggctaattttttttttttttgtatttttagtagagacggggtttcaccatgttgtctaggatggtctccatctcctgacctcgtgattcgcccgccttggcctcccaaagtgctgggattacaggcgtgagccaccgtgcctggcctatagatgtctataattgtgaaatatcagttatctgctaaagaatgggtgtcaataactgtgaagggtatgagattttaccctacttactagctaacaagttaccacactatagtttcatggatgctgttagaagacatgagactcctgagtcagagacaaatgatagtaaccagggtatcggcatttttttcttttcttcatggattctctgagccctattcctatagagcaatgttaagagggctagatgacacctgcacactcaatgggcagtgtaaaggagaggcattctgagtttaaagaactcaaatctcatataaaagttgataagcatgcctgcccctttctccagagggaaacagtatctgtgttctaaggggcagtcagggcaaattactcatagcagtaattcgagagaaccatggagaattgtcttctaacaatggatctgggctgaaaaatttgcataataaatactgtatttgtaatgtaaattaataatgtaaacaagagcagaagaggactttctttctttcttttctttctttttttttttttttttttttggagacagggtcactctctgttgcccaggttagagtgcagtggcgcgatcacagctcactgtagccttgaactcctgggctcaagcaattcttctgcctcagcttcacaagcatgtaccaccatgcctggctaatttttaaa

SEQ ID NO: 1880341 - DNA, 4001 bp, Homo sapiens; identical to SEQ ID NO: 2853

SEQ ID NO: 1880342 - DNA, 4001 bp, Homo sapiens; identical to SEQ ID NO: 2857

SEQ ID NO: 1880343 - DNA, 4001 bp, Homo sapiens
gtttagggctgagctaaggattaggtcagtggggatagagaggacaggatgaatctgagagagactggagaaacagaattaaccagacataatgactaaattggttgttgagaacaagagagggagttgttgcggatgactcagttttctattttgagtggatggtggtgccaatagcaaagagagaatatagaagaagaacttttttttgtttgtttgtttttggtgggggagataccaagtgtgttttgggtcatattgaacttgagggctctgtggcagttagcagacagtgagatatgagtctgaagttcagaagagtttctgtctaggggcagtaagtatgagtggtagttgaagttgtgggaatggttgaggtctcccagccacgcttacagaaggctgaaaataatgacagaggagatgagaaggattgacgtgcaagggtaggagagaatgttgcccaggaagctaggaaaggagaaaattccaggaaaaggattgacaatctcagttgctacagggagatcaagttaggatgagcttgggaaatgcaccttgaggttgtgtaggacattggggtcaccagggctcttttaaagtgtgagcagcttcagtggagtggtagggatggagccagatagcaatggatcgagaagtagatgggaagtgaagatagagaatgtgtactcactttgagtagttcagcagagaaaggaagaatacagaatggtggcagcttgtggaagaggtagcagggacttgtttttcctagaatggaagtcttgtttatgggttttctgatgccatgtaagatccagtagacagggtgcaatgaagacacaagagaaaagacgattgctaaatcaagtcctcagaggagaggggaaggggtgggccctgaaaagaaggggataccattttctttaaagaggaatgttggaagaaaggaaggaatttaggaagaaagagataatgacatatgcatgcagatatatctaaattttcaaagaaattcttacctaatagggccagttttctttttcagcaaggttatctgctgagaggtgggaatgctggtgttggcttgggtgggagtaaggacttgaaaatgtaaaggaagcttgaaataactgttaagaggaaagaggaagacagtggaactgaaataagctccaagagtgttgagtaccctctgaactgaaatcctacactataagcctccccttcatctttctcataataataatggctgacatttattgagtgctttatacaaggcactgttctaagtgcttttcaggcattctcatgtgatttttacaacaatcctgttagaaagttattgttattatccctttcttccagaagaggaaattgaggcatagaggattagtagcgcttgtatttgatgaatctcttacgtctgcagaaatggattccttttcctgaggcatcagagaagacagaaatttaatcccaactcccggtttctgaaccttgagagcctagagtctagggttgctaaggagggaatcttaccatgccagtttgtgggcatgatggtggcatggagggggcaggacagtgggatcactgttgctgtcagcttttgacaactacatagggaaactcggatattcttgagtgatttttccagcatcctgactagaaagacaagtgaccgatagtgatttgtcaggtattgtgggctgagattgtgtcatctgagaggtgaataagaagagagaccttgtccctgttcctatcacctagaaaaggagaattttttcttggcagagagacaggcagatctaaaaccttatataataacataatgattattaactcaccttatgtgttttctcagtttgtgtgacagatacaatttgtaggtaagctgtatacctgacttgagtgaaaggagagagtgatgggatggcgtggatggaagagaaacggacttaccttttcctgctgcagccactgaagcatcatctctgtgtccttccttttgaggttgccatggatacgcctttgcatggtggtttgaggagattgatttccattatgatcagatgatgacgtgggtttaaaaagagaaaggatggaatgctctgcttttggggagtggccggcgagctgcccaaaaggcagagcccagtacagccgatagggctgtggctttgttggctgctttggcttttgctgaagttgtgaaatggtgcatctctctctttagagcgcaggctcagggttccctgtctacagggtcctagtgccaggaacttgctggttgattcagggggaggaatcagcaggaacttcgaacagcctaagtaggacttctgataccactgagaggattgaggttcttgagtgcagggctgagtgcctcttgccttcttgcagaagttcctatattgaagataagtgaagcatatagcatagcttttcttcttgacttttagaggtctgggcccttggaggtgggcctggaagtcactggatatttctggggaaaggggacattttgagatggagtagagctgcattcagagtgggagtgggtttgtagacgtttttttagggtaatgaggagctggagaagggaaggaagtccgttgagtgtgtaggccttatctatgaaatccgcaaggcagatactgagtaggacctaggaacaaaaagctctgtgtacgttgtcttctggggtcctgtgaatatctggaatccagctttccaagcttccagtctcccagcctccatttaccactcagtaagcagaccttttcctttctgactcctgaaggacttaggtccacgtttatctcttccttactagtgctttcagagatgtatagttttgccttgctgtcagactgcctgggtttcagacaagctcctctaggagtgggaaagcagggaaagcagacagttgggttagcccaggatcaaggtttgataaggtgagacaagaggagatcaaggtatcaaaggatgctggggtgccagtaaaaacaaggtagaaatggttcagacaggggagaaatggtagaggtggaaaagaggcttttcctcctcactttctcctttttcattctccaaaatcttattttcctataatttcctgaaatttctctaagactattggcagacacagagattattatttatcagacacagagatttttcccctcctctcttctcatttttctagatattttagtggtatttaatatcattggagaggaaaatggattagaaatccaagaggtgtctgtctcctccctggctggggtaacattaacccaggattgtcctatgggatatgggcctgggcccggtaatgctgtggaaggagcacctacctgtagagatattcagatgtgcccctctgccattttttggctatgagacttgggcaagtcatttgacttctgagacatagttctgtcatctgtggaatggagagaatggaatctgttttggctacatcacaggttcatttttgaaggagatagtgaagtacatgtattcgtgtatgcaattaagttttccccagagaaggccctaagaacaggacgcattttctctctcctaacatgttgtttctcctcccatttttttcagttctgttaatgtttcaattattacatttctcatgcttgaaaactcctgagtgtatttattcatttacttattcatgcattcattgacccatctatttatccttgcagcatttgagttcctactgtgcgcaagtcatcgtggatattcccttaaaataatgaatgaagatgatatctaccatttgttgagcacacagacattgtgctaaacgctttacttaaatcttatttaatcttcaaaatgtccctgtgaggtaacattatttcttcctttttgcagttgaggtaaccgggactcaggaagttaaatatcttgctcagaggagaaccaaaggtatattcaggtctgtctccagagcccatgtaggc

SEQ ID NO: 1880344 - DNA, 4001 bp, Homo sapiens
tattatagaaagggcagtagcagatgggtctgctccgtctcgcttctaagaaggtgggcaggacaaatggcagcctcctgcagaggcctagtgagaagcctggccctcggccacacaggatggaagacagattgggttccacagaggggagctgccctgggaagatctcacggatggccaggacccaccatttctttgggattcccgttttctccaacgggcactaatgcctgtgcctgggtcctggcaacactctggactccacactctcctgggtttcacctttgtagcaggatccctgcagaccaggcccatgacaaacaccgtctccagcgggcagagcaaaggaagggcacagcgccaggcagtggtgcagctgcctgtcaggatgaggcctacttctagtgaaactgggcagacaaaaggcagtgagaaatgtgatctcggggtggtggaggctctagggaaaggaaaaggcaggagtgaacttccacacagcagcaatggcagaaccaaaggtggctttgacctccacgagggctcagatccaggccaacagcttgtccaggacagggtgccgggtgtatcactggtccaggagcactatgctggcagaatccctttggtgcctgatggccctgccttcgtgggaacagaggctaaggctttgagttacagctgcctccccaacagtgcatccccttctccctcctcagcctcaggtaggagacagggcaggcaaccccctttcctcttctccccttctccagcccctgtctgtccacccagctggaggcagccaggcttgcctatggactggttgacagccttcatgcagaggttctccaccagagcctttcttgggggcccctggcctgggctctgagctgggagtgaaggggatgacccatgcggactgtttgctgcttgtagctttccctgggaaagactctgccaggccttggagccagaccaggaggctttataaggccaccgcaagcagcagggctccagatgacatcacagggaagatcaagagggtgtggaggggcatcgaagcctctccaggagacaggagacgctggtccagtagagccctaggggcgacgccactcccactcactgtctactctcctctcacctctgcaacactggggacactcacaagagtgtgatccaagtcggccgtcgtcttctgcagctctggagacctgatgctagggaagggcatgcctggcatcaccacacacctggggggagacaggagcctggggccggtgggcccacacatcaccagctgctccgttctaccatttcttcagccctcttggctgtgcctgcagctctgcccctcccctctctgcacctaccacccagagagggcttgttgagctcagagatcccacctaggccaatccactgggttctgcggcagcgatggcctgcctgatcttccacctgctctcccagggccaaagccagacctgctgagcccctccctccagccggctggtctgagcagtcacagcccggctttgggctccgatggcagcagacggcaggtaggggtccagctgctggagcgagggccggccacctatcacagccaaggagatgagcacaagcactacttactggcctaggttgtcagagaagttgatgctctcactcatctttcctccaatctttcccctatgcctggttgtggtattaagttacatgcagacaacaggggccagaagatgaacaatggcccatcccactctaggcatggctcctctccacaggaaaactccactccagtgctcagcttgcaccctggcacaggccagcagttgctggaagtcagacacctgcagatcaagaccacagcatcaagaccctgtgacctctcaaaggaccggtggaaaggacacgggaagtctgggctaagagacagcaaatacacatgaacagaaagaagaggtcaaagaaaaggctgacggcaagttaacaaaaagaaaaatggtgaatgatacccggtgctggcaatctcgtttaaactacatgcaggaacagcaaaggaaatccggcaatttgcgcagtcattctcaacaccggccatgcagcaaaatcatcagtggaaatttaaaaaaatacacatggccaggccccagcccaaatcactaataagaatctccagggcttcacctgttagactggcaaaaatccaaaagtaaacactttgtggagaaacaggcattcctagacattgccggtgggatacagaacagtacaattctgatggtaatcagttaacaaattaaacatatttattttatacttttaaacccaggaatcccatatttaggagtctactgagaccaaacagcatatgctccgggtgtttccctataatccgccactactgttggagcaagagggcccggcagtgtccccagctgccagcaggcgggcgtgctgccactacaccttgagcaagaggaccctgcaatgtccctagctgccagcaggcggcgtgccaccactatacagtaagcaagagggccctgcagtgccccggcgccagcagggggcgctggcgaccactgtaagcaagagagccctgcgcctctctgcgccggcgccggcgcggcgcgcctctctgcgccggcgcggcgcggggtgcctttgcgacggcggagttgcgttctcctcagcacagacccggagagcaccgcgagggcggacctgcgttgtcctctgcacagatttcagtggtactgcgaaggcggagcagagttctcctcaggtcagacccgggcgggcgggcgggctgaggataccgcgagggcggagctgcgttctgctcagcacagacctgggggtcaccgtaaaggtggagcagcattcccctaagcacagaggttggggccactgcctggctttgtgacaactcggggcgcatcaacggtgaataaaatctttcccggttgcagccgtgaataatcaaggttagagaccagttagagcggttcagtgcggaaaacgggaaagaaaaagcccctctgaatcctgggcagcgagattctcccaaagcaaggcgaggggctgcattgcagggtgagggtgagggttagggtttgggttgggtttggggttggggttggggtaggggtggggttggggttggggttggggttaggggtaggggtaggggtaggggtagggtcagggtcagggtcagggttagggttttagggttaggattttagggttagggtaagggttaagggttggggttggggttagggttaggggttagggttggggttggggttggggttggggttggggttggggttagggttagctaaacctaaccctaacccctaaccccaaccccaaccccaaccctacccctacccctacccctaaccccaacccccacccttaacccttaacccttaccctaaccctaacccaaaccctaaccctaccctaaccctaacccaaccctaaccctaaccctaccctaaccctaacaccctaaaaccgtgaccctgaccttgaccctgacccttaacccttaaccctaaccataaccctaaaccctaaccctaaaccctaaccctaaaccctaaccctaacactaccctaccctaaccccaacccctaacccctaaccctaaccctacccctaaccccaaccccagccccaacccttaccctaaccctaccctaacccttaaccctaacccctaaccctaacccctaaccctaaccctaccccaaccccaaacccaaccctaacccaaccctaacccctaaccctaacccctaccctaacccctagccctagccctagccctaaccctaaccctcgccctaaccctcaccctaaccctcaccctcaccctaacccaacgtctgtgctgagaagaatgctgctccgcctttaaggtgccccccaggtctgtgctgaacagaacgcagctccgccgtcgcagtgccctcagccc

SEQ ID NO: 1880345 - DNA, 4001 bp, Homo sapiens
atggccaggccccagcccaaatcactaataagaatctccagggcttcacctgttagactggcaaaaatccaaaagtaaacactttgtggagaaacaggcattcctagacattgccggtgggatacagaacagtacaattctgatggtaatcagttaacaaattaaacatatttattttatacttttaaacccaggaatcccatatttaggagtctactgagaccaaacagcatatgctccgggtgtttccctataatccgccactactgttggagcaagagggcccggcagtgtccccagctgccagcaggcgggcgtgctgccactacaccttgagcaagaggaccctgcaatgtccctagctgccagcaggcggcgtgccaccactatacagtaagcaagagggccctgcagtgccccggcgccagcagggggcgctggcgaccactgtaagcaagagagccctgcgcctctctgcgccggcgccggcgcggcgcgcctctctgcgccggcgcggcgcggggtgcctttgcgacggcggagttgcgttctcctcagcacagacccggagagcaccgcgagggcggacctgcgttgtcctctgcacagatttcagtggtactgcgaaggcggagcagagttctcctcaggtcagacccgggcgggcgggcgggctgaggataccgcgagggcggagctgcgttctgctcagcacagacctgggggtcaccgtaaaggtggagcagcattcccctaagcacagaggttggggccactgcctggctttgtgacaactcggggcgcatcaacggtgaataaaatctttcccggttgcagccgtgaataatcaaggttagagaccagttagagcggttcagtgcggaaaacgggaaagaaaaagcccctctgaatcctgggcagcgagattctcccaaagcaaggcgaggggctgcattgcagggtgagggtgagggttagggtttgggttgggtttggggttggggttggggtaggggtggggttggggttggggttggggttaggggtaggggtaggggtaggggtagggtcagggtcagggtcagggttagggttttagggttaggattttagggttagggtaagggttaagggttggggttggggttagggttaggggttagggttggggttggggttggggttggggttggggttggggttagggttagctaaacctaaccctaacccctaaccccaaccccaaccccaaccctacccctacccctacccctaaccccaacccccacccttaacccttaacccttaccctaaccctaacccaaaccctaaccctaccctaaccctaacccaaccctaaccctaaccctaccctaaccctaacaccctaaaaccgtgaccctgaccttgaccctgacccttaacccttaaccctaaccataaccctaaaccctaaccctaaaccctaaccctaaaccctaaccctaacactaccctaccctaaccccaacccctaacccctaaccctaaccctacccctaaccccaaccccagccccaacccttaccctaaccctaccctaacccttaaccctaacccctaaccctaacccctaaccctaaccctaccccaaccccaaacccaaccctaacccaaccctaacccctaaccctaacccctaccctaacccctagccctagccctagccctaaccctaaccctcgccctaaccctcaccctaaccctcaccctcaccctaacccaacgtctgtgctgagaagaatgctgctccgcctttaaggtgccccccaggtctgtgctgaacagaacgcagctccgccgtcgcagtgccctcagcccgcccgcccgggtctgacctgagaagaactctgctccgccttcgcaatagccccgaagtctgtgcagaggagaacgcagctccgccctcgcgatgctctccggctgtgtgctaaagagaacgcaactccgccctcgcaaaggcggcgcgccggcggaggcgcggagaggcgcaggcgcgccgaggcgcaggcgcggagaggcgcaggcgcgccgaggcgcaggcgcggagaggcgcggcgctcttggggagacgcggcgcagggcatagacgtacgccggcgcctccccggaggggaggggtcgctgggcgggcgggagtgaggcgcggcgccggcgcagagacgcacgtcgctgggctgagggtggcggggagtgttgcagtcgtacattcgcgcgccgccgggcggggagcgcgggggtggcgcggtgcaggcgcagagacacacgtacccggcggcgcagagacgagtggaacctgagtaatctgaaaagcccgtttcgggcgcccgctgcttgcagccgggcactacaggaccagcttgcccacggtgctctgccattgcgccccctactggcgactaggacaactacagggccctcttgcttacagtgctgtccagcgccccctgctggcgccggggcacggcagggctctcttgctcgcagtatagtggtggcatgccgcctgctggcagctaggaacattgcagggccctcttcctcacattgtagtggcagcacacccgcctgctggcagctgggcacactgccgggccctcttgctcgcattgtcgtggctgcacgccacatgcaggcacatggggactacgcagggccctcttgctcccggtgtgacggctggcgtcccatattggccacctcctgcaccacttaaagtcagagcgccagttattaatccccatcagttctgtaaattaaaactgaaaaggagctattactgcggagagctgatgtcccagttattaacttggaagacagcttttcaccaagaggcagtacaaagatggaagataacttcattgaaaagaaatacagtgtaaagagcttattgtacaaaaatagggaggagtaggctgatactgcatgaaaacagcctaagagtcctgtgcagggatttttattttggacttcttcacattcctacctctgtctcaagtctccgcctgttttctttggttttcctgctactgccttaggtccccgacttgccccacttagccttgtgggacctcctcacttgattgaggtacatgtgtggtgatcaatccgaatccactctggcaccagcctccttcccaccataccaggcaggctgacagcggtcacgtttgtatctactgcagctgcctcttttgaatgtctttctctgccttaatctgtacttatggtgccaggtttctcttaagaatgtcccctttgtccttcttatcagcatgtagctagcaatattctgacatttttattgcagaatgaatgatgattggggcttcttttttttttttttttttgagacggagtctcactctgtcacccaggccagactgcggactgcagtggcgcaatctcggctcactgcaagctccgcttcccgggttcacgccattctcctgcctcagcctcccgagtagctgggactacaggcgcccgccaccgcgccagctaattttttgtatttttagtagagacggggtttcaccttgttagccaggatggtctcgatctcctgacctcatgatccacccgcctcggcctcccacagtgctgggattacaggcgtgagccaccgcgcccatccgattggggcatcttaagagaagttctagggtgtttctgcgtaggtacctcttctccctcctaaccacaattgacaagtgcccatccactccagcactagagatgctactaatatgtgcatttttggtggtccctccaggtgagccttcacagactttcccttttccaggagctccccctcctgttcatgtctagctagctatctactctaacagagcccactatcctgtgtctttcccaaaaatagtgagggaatgattaattggaaaccataagaaatgatatgcatgtagatgaaaactttacaacttacacaaataatcact

SEQ ID NO: 1880346 - DNA, 4001 bp, Homo sapiens
cacctcttctactatgtttccttcaactcttattttttttcgctttagtttaaatctctgaacctgctctagtgcaaggtaagacagtcctttacactaggaatctctaatatgtgtcgccaggagggaggaatgctctggaaatgggcagtatgtgtaattgcacatacctcaaatatacacatatacattcacacactcacacacactccctgtgtgttagtgctgttaaccaaatacttctgcttatccttcctgcacatagcaggattgtacttattgcacttccctgcccccttgtaactttctttggccagtgagatgacagcaggagtgatgtgtgtcacttccagggaaaagctttaagagccagtgctagatttgccccattcttgtttcctgccttcagggttgaggagatgcatgtccagttgcagcagcctggatgcccgagtgattacgggaaacagagctcctaatgactcataatggacacgttttgtgattgagaaatacacttttgttatgtaaagccactgtgatttggggattgtctattactccagcacaatctaactgatcctgactgatacaccctgtcaaccaaggctcaggggcaccaaggcctttatccctgttgggtattccttccattatgatgggtacccttgcattctccttgcaagtaatgaagcctatttgattcaaaaaattcaaaatgcagtcacaaaactagttataaaacatgaggacatttgcggggctattgaaaaacgtagtagccgggcgcggtggctcactcatgtaatcccagcagtttgggaggtcgaggtgggtggatcatgaggtcaggagttcaagaccagtctctactaaaactacaaaaattagctgggcgcggtggcaggtgcctgtaatcccagctactcgagagtctgaggcaggagaatcatttgaacctgggcagcagaggttacagtgagcccagatcgcgccactgcacttcagcctgggtgacaagagtgagactccatctcaaagaaaaaaaaaaaaccaaaacccaaaaccaaaacaaaacaaaaaacccaaaaacgcatagcatagatatcctacacgtgtcacactcaccaatgcaggtccacaagcaacccactaatgaacctccctttccctgagagcaaaatgccagcttctgcctggtatcagctctagcattcgtgggctaatttcagaggtcctggattgtaggtcctggattctgacatgtagtagtgaatgaccttggacaaattacctcactgagcgccagttctcttatctgtaaaatggtgatgataataaaaactatgtcatagataaggaaagttaacatttgcacatttgttgtatttgccactctgtgcagacagaaggataatgtgtgtggaagtgctttgaaaagggaaagatctatgcaaatattagttgataatatttttagccaatacatgaccaaagaagtaatacatccaaaatcaaataaacctcccaataccttcagtctttaaaaccaagcccaggtatggatatcgggatgtatttacatttctgcaaaaggtccccatacgcaaatctcattcttaaataaggacaaattactcattagctgaagaggagagaggtcaagtacctgaggaggttagtcacatcaatcacctgagagttcagcagcatccaacagtgttagttccacgtgttaacttcctgaagaaccacaggcttgcacatccaattatgcttcctgtccctttcctcccccgtgcggaatcaacttcagctcatcaatggggtaggaaagcctccttatttcgcaccctccatgctccaggcatccagggaaatgcccctgccacccctatctcccttgagttcttagggcttcctcctctagcaaggagatttccctttctagtcccgggggcagcggcacagcccggctctgacctcgcgggagcagtcgcctaaaagaggctccgcccttggccgcttggggtggcgcccgccaaacccgctcctaaaaggagcctctctccctctgtctgctctaagcgccttgggggcctaatcgcagtctccacctgggtgctgaacttccttctcccccgcttgctgtagtccagtgctgctctaacttgacttcacctgacggactaattaaaacagattgctgggcccgcccccagggtttctgattcagtggggttaggatggggccgagagcttgcatttctagccagttcccaggagatggtgatgctgctggtgccggggctctcttggcggaaccactgcgtctaggctaatgcagccccaggaagggctcgccctatccctacgcccacccccgctgctctcctgccctgagcgcaatgtgaatgggaatagccgcagcagcccaggaggctggagaaccagaaggcaggacctgaggagtttaggctgttttatcttgggcgcccctgaccagtttgtgcaagtcgtaaagaaagcaggaaagaagcctatgggtcttcagtgttactggggtctgtcattcattagggtctactcacctcgtctcttcattcaacacagtggttggttgctaggtctagggttatgaggtgaaagacagcgtgctacccttccaggagtttgtagtaactgggaaagaaacatgcaaaccattccagtgcccagcgccgatgagataactgttcctaggcagggagagtcaaacttctgtggagggagagtgggtggggctctggaatcatctgagcagctggaggtttcatggaactggcacttatgacttgcaggatgagtgggaatttggcaggtacaaggggtagctgagaaggggtggggtgggaagggtttttccccaggcagaaggaatgagcaacaggactgccgaagtgtaaggttccagaggccgggaagatatgacaggcagctctctagcctggctgggttccctccaacctctctggcggcgccttctcagctcctgtccctcatgggctggtattccctggggctctgtcctggcagcctttccctctcacactccatatccaccctggatgagctcctccacaactgaggcctcgctgtctgctcactgatggggcccaaatctcaaacccaggcctcaccccctcagttgcacactcactttcacacgaatgtctccatccccaggcatccttccttctgcattttgtcacagtgaatggcaccagcattcacccagttacctaaacgagagggctttatgaaatgaccctctcatagattgctggcaaagagtaaatgacacagtaacttgctggtgccatttacccagacagaatacaagaggatggctgctgggctcctctgaaagtccacaacttactagctgagtgatcctgggcaagttatttaatctgttttcttatccataaaatgggtttgatgatagtacctacctcacaaggttgtcatatggattaaacaatattagttgttgtcattcattgagccctatattaagtcttttacttggattcccttgaagatggagtacctagtccaaggtcacactgttaccaagtggcagattcaggtttggaagccagagttctctggctcctgagccatcttcttcacctcactgtcacactttctgaaaactgtataccaaacagggaaatgcctatggtacaatgttaagttaaaagaggatggcaaattgtataatcagtgtgagtaaatccacaaataggaaaggctacaaggaaatatagcaaatggttaaatatggttgtaatttggtgatttttcccctctagtatctgtagtctccacgtcttctttatacacattttttattaataaagttgcttattaaaaatatattacattaaaaacaattacgagtctgcaacctgttcccctgtttgaaaattgcactctcttggtttttcgtctcggtt

SEQ ID NO: 1880347 - DNA, 4001 bp, Homo sapiens
tcatgggaattgcaaagctttgtcaagcagagcaatgtgtctgaggctggactgttgggagtacccatctcatggcacctgcagtctagagacccagccctggaggctcctagctggcccattactttaagtcctgaacaccagggctagtctaataggtagactggcagggtaaggagaagggcttagtgagtgcttgctgcatacaagacgctgtgcaggtgctaaggaaaattcagaaatagcaactataaatcaaactccacgatttcaggtatatgagaaatataattttcaaaaaaattatttaagtcaagttaaatccatctctgagcccccatcccacctgagacagcaaattttgtcctggtcattaatggaacccgcccatcctctctctcaccagcatcactggaaggggtgcatgcgtggtcactggccatttgtccccactggttacactgagataactgatgcaaggccacacagtacccaggagcccaggggctctgctgcttctgtgccaaacagtgccagagaaagctagtcacagacacatcacactgtcagcccactctgaggtcctgcccaccctgggcattgacagggaaaagggtgctctgcctccgggactcttccctcaaaggcactcacatctcaaagaactcaggctcccagaaaggaagaaaaaagaaaagaaagcaattcctactccctggcctgcagcagcaagtctcccaaagcagggatctcaaaggagcaggctgtttacatggggggagttgggggcagtagagacaaaaatataaggataacagaaaatgaatcgtcgtatctcagagacggcccctctaaagaggtgacttccaggggctcccaacaagacacctgcaccccctccaccttctacccctaccccatcacccgcaggcagaggaagcagcaaaccacatagtgacatttcaggactaacaaaaagccctccaggaagtaaatcaatctcccccaagcttcctgaacacctacactctccttcatctaaggcagatgtcctgaagaggtctctgctgaaagggatcagttgacttatcactgtcaccttgctgaggccagggcaacagggaagataagtgttgactgggaagcaatacttatccaagaaagaaatgggtatttaatacctactaggtaccaccaggtgatttcacaaacaacctacctgttcatcacaaccacgcaaaatgagtgcttcattccccgttattgatgaggaaacaaaggtcctgagagaggggccaaggtcacagagctgtattatgacaaagctgggaacactcagccaatatttaataataatactatcacttagggtactattatcattcccattttacagaagagactctgaggcacagcaattaaattacctgtaagggccaagaagggtgcccctgaggcctgggctgttgatcccctcatttttctgcctctgcatgagaagcaactggttggaaagtcccaccagttctgagaattcatgttctgcccggattcctgcaaatgagtagggaagcacgaccaaggattctggtagctttgcataggacttaaagactcacattattttgaaatacagttttgtaaaaaataaaaatacaaatatttagaaaccaattaaagagtattgctttggggagcaaaagacaaaaaccccccgtgcctcactgtctcctcccactcaccccccgcatcaattcaatggcctggaatccctgcctcttctgttcaataaacagagatggctctaaagagaggacccaatgtgctgagcagtcttggataaagaacaccgacagtcagagatggaaagataccttcgtcggacagatgagaaaactgaggtccgcatgacggagcgacttgcccagggtcaggcacctgcgtaggcacctggacacatatgcgtgtgcacgcacgcaaggccgcgcacgctgggctctggccggcacggccctcacgtgccctcacgcacgtatgccccgcatgggttcccccagcgagctatccctgcgcccaccccttcccctgcccgggcctccggagctgctcacacgcaggtgaagactgccccctggtgggcgggagccctcgggaggcccgcaggcccagcgtcctgcgcccgtaatccctcaaaggggcttctctggaatcacccccaggccctggggccaggatcgaggctgctctgggaactgggcttacacgggtgtgggtggggacctctgggatcttagaaccaggaaaataataaagcagaggcttgatgttgcaagtttagttcctggaagctgattgaaatggagatgagcaacaggaaagttttttggggggggtttctagagatcaacacctcttccaaggaagggacacaaccagggctgggcagagaacgtgggctgcagcacagtcacctgaaggccgggagcatggaagttaggttggccctctgggactaacaggtttagcaaacaaaaatacaggatgcccagttaaatttgaatttcagatacatgtgaaagttttttgtataaatatgttccgtgcaaggagaggagagtgtctgtgcaaaagggtgggagttggggggttgtggtgatggagactgcttacatatagagagatggaacaaaacaggtaaaacagtcacccaccacattcgtggtttctgtggattaaaccaactgtggattgaaaatattgggggaaaaatggctggttacaactgtaccaaacatgtacaggcttttttttcttgtcattatttcctaaacaatatagtatgacaattatttatgtagcatttacattgtgttttgtattacaagtaacctagaggttacaggaggatgtgtgtaggttacaggaggatgtgtgtaagttacatgcaaatactataccgttttacataaggtatttgagcatccatggattttggcatctgagggagttctggaacaaatcccccatggatactgagggacaactgtactagggataataggagccacgtttctcattactggaaatgagagtaggaaatatggaaaaaagaaaagaagaataaacccagtggaattagagatattggtgtgagctcagtttgcaatatgtagaggtataaaaatacagatataaatgcatgaaggactatatggactgtatgtttgtatgtagaactattgtggactgcatatttatatccctctcccaaattcatatatttaaaccctaacccccaacggcataatattaggaagttgagcatttggaaggcagttagatttagatgaggttatgagggtagagatccccatgattggactgtgtcttttaataagacagagagactagagcttgttgtctctactatgtggggatacagtgagaagatggtcatctgcaaaccaggaagtgggccttcaccagacatggactctgcaccctgatcttggacttcccagactccagaattgtaagaaatgcatttctgttgtttaagccacctagtctacggtatcttgttatagaagcccagactgactaagaaaatgactctagatataaagttggaatgtgtgtgtgtatagtttgcttgtatgtatgtatatctatatctacatatgtagatatatgaggatatatgtagagatacatatattctcttttttttattattattatactttaagttttagggtacatgtgcacaatgtgcgggttagttacatatgtatacatgtgccatgctggtgtgctgcacccattaactcgtcatttagcattaggtatatctcctaatgctatccctcccccactccccctaccccacaagagtccccagagtgtgatgttccccttcctgtgtccatgtgttctcattgttcaattcccacctatgagtgagaacaggcatatattctctatctctactgcgaagatgt

SEQ ID NO: 1880348 - DNA, 4001 bp, Homo sapiens; identical to SEQ ID NO: 2870

SEQ ID NO: 1880349 - DNA, 4001 bp, Homo sapiens
ggccaggctggtctcgaactcctgacctcaggtgatttgcccgccttggcctcccaaagtgctgggattacaggtgtgagccaccgtgcccagcaggcggttggatttttaaaattgtctttttcagggaattttttttctacattagatcaaagcagctaccactgtggtgacagaaagagttggaatttgaagtcaaaacaccaaaaggcgggcagatcacgaggtcaggaattcgagaccagcctgaccaacatggtgaaaccccatctctactaaaaatacgaaaattagccgggagtggtggcgcgcgcctgtaatcccagctacttacgaggctgaggcaggagaatcgcttgaacccaggaggtggaggttgcagtgagccaagatggcgccactgcactccagcctgggtgacagagtgagactccgtctcaaaaaaacaaaaacaaacaaaaaaacaccaaaaggcaatcatgtttcaatatcaagaggttggttttgcagctgaggcccacaaagtaggcagagaaccgcataaagcaatgcaggtgggtggaggtgagctccacctccaacgtttctcataagctggcgctttccatctaggggccttccttaaccaaaaaaaagctgggaactaaatccaggtagacttaaaggcgcattacctatctcattatttctctgtgtgaatgctggagttttaattacacacttgctttttatggggaagaagaccaaagatcatatttttgaaggtatcaacttgttttctatcagacagttgttttaacaagttctttcagcgacatgttatgtctttaggaaagggtgcttcagatggtgcgcactagcacaattttgtggcttttaattactattttgttcttttggggggtttcagaggctggcgcctgggcgtgattagaccgtctaccccgccccccgcaacctcgcacactgcccaccaggtggcgccacaaagcaagcgctgccgcaggaacttcggacttgggagtccagcaagtcgtgcagtccatcaccgtcgggccaaggtttccaactacaaggttatagagacagaggaagtcaccatttccgattttttaaaaaacagagggaaaagaaaaaaattgcaatgatagggtagaacagggtcctaaaatgcaaaactgtaaaacaggattaaattcaacaaaccagataaaactttttatatttgttgtaaatttacagagaagtgataaatctagtatctacttgataaatctataatctcacctattatcctatttcctttttcgcaagagcatcgaattttcaaggacaactggtgaacctttccacccgaaggaggaagtcctcgggatggctttcagggtgtcatttacttatcaaacgtatataattactcagagtctcgcgtgtcgggaaagtaccagggaaagtggtttcaaatatactattagcaataatacctttaagtttatgtagcttctctttgaagcaacaaggaaaacccgtttcaatattatatgattaattgtcctaatatccctgcggattggttaagaagcgagcattacacgtggtttgtggataattaaatcaattgattatgtcaagtgccgagtggctaacaagaataaatgccagacacttcgaggaaaagtgaagatagagctggctggactctgggcaccgatgtactttaatgtgtttgaaaactgacctcggacatgaaagtacgaatcactggaactggcacttgctcacagaatgggagaggggaccccacttcttcctctgaggcaaaacgccagtctgtctccacgccttctgtcttcctgctgcgggccaccctgactcctcgctacctcgacccctcgcctcgctgctcacattcggcggcagtctgtttgcacctggggccgctgcagccgcagccgcagccacagcgcccaccatgtgacgcccgccccttggccgggcgttcccggagctccgcggccgtttgcttctgattggctgttgctaggtgacgtcgccagcgctcacgtgacgagtgttaaatgcccacacttcaggagcccgcctggcagacaatcgtaaagccgctcggggccgctcacctgctcccgcctcccagagccccgacccggcccagccacccctgccccctccactgcccgccccccgccagagcccgcgctcgcgctgggcaaggagccgagcgggcccagaggccgaaagaggatgcgaccagaggcagctgtcccgagcagcgcacggtgatcgcctcccccggaggaggaggcgcctagacggttgcctcctttcttgtttccccaccaccacccccgtaattacattggctgctggaggggaccgggagagacagaggaggcgcctggcttcccccgcacgcccgccacctctgctctttcccgtctcgggccaggatgactggagtctttgacagtctagtggctgatatgcactcgacccagatcgccgcctccagcacgtaccaccagcaccagcagcccccgagcggcggcggcgccggcccgggtggcaacagcagcagcagcagcagcctccacaagccccaggagtcgcccacccttccggtgtccaccgccaccgacagcagctactacaccaaccagcagcacccggcgggcggcggcggcggcgggggctcgccctacgcgcacatgggttcctaccagtaccaagccagcggcctcaacaacgtcccttactccgccaagagcagctatgacctgggctacaccgccgcctacacctcctacgctccctatggaaccagttcgtccccagccaacaacgagcctggtatgcataacgctgaagtcaagagtgccgagtcggtctagttaatgggatggatgggtaaacgtgtttggggcggggggccttcgaaagctctggattttcacgctgcctgctcaccgcccgcttgtgccctttaccctccccagcctccaatctgccgcaggtcgccggttacgtccctctctcctttggtaggacctggtggcctcaagagccaagtgggcgtgctctgcctgcctcataagggcatctccttgccaccagcttctttctcttgggtgtgcacttgtctcccccttccctggagggtacagctcccggggtcggtggcggctccgatcgcacgctgcgaagttgcgcctgcccgtggcgccacagttcagtgcacccacctctttgctcaagccaagtcccccccgccgggccctctaggagggcgggaactccaggacccctgggttgcgctgttcttacgattctttatcgttgcagagaaggaggaccttgagcctgaaattcggatagtgaacgggaagccaaagaaagtccggaaaccccgcaccatctactccagtttccagctggcggctcttcagcggcgtttccaaaagactcaatacttggccttgccggagcgagccgagctggcggcctctctgggcctcacccagactcaggtggggctcgcgccctgcaggggcgaggagagcgcgggcctgagatggctgggaagcaggcgggtttaggacaatgctttttaaagttcattttaagtacttttaaggatttccaggcctgcgcctcgagcggccctaagtaagcttctaggcccaaagctggaaacccccaaggggccgccgtgggagggaaggaaagggaccgggtggacagaaatcccgtacctctcgctactgattaagcgggtgaaataactggccctcctcaccctcccgctgtcaccatcatcacagtgcacgtacaccagcagtcctggccttttggcaattacctccccagggagcaggaaccggcagagcctcgaaggccgccgcccgtgatcctcttatctccccagggcgctcgctgcccaccgctagccagcggtttttctctgccttcttttttctcctctt

SEQ ID NO: 1880350 - DNA, 4001 bp, Homo sapiens; identical to SEQ ID NO: 2877

SEQ ID NO: 1880351 - DNA, 4001 bp, Homo sapiens
taacacataaaaaagtatgagcaaatgagagcatgtggctgctgtttgctgggagactactacgtacttcctgtgcattatctcctacaatccttatcaccacctcatgcctacaacatatgccaagattaagtgtatcgggctggctccagaatccatgctcacactatacctcccaggtccatactatggaaaaagcagctaactcgtgctgatttttatttttttatattcaaagagtgggggaaaaaaaacaactttcttgctctttcgattccaaactaatttaatacacacagtagaaaatgtagctatatacaataaagtgtcaaaagcatcaatatgggccggacgctgtggctcatgcctgtaatcccaacactttgggaggcaaaggcaggagggtcacctgaggtcaggagttcgagaccagcctggccaatatggtgaaaccccgtctctactaaaaatacaaaaattatctgcgtataccggtgggtgcctgtaatcccagctactcgggtggctgaggcaggtgaattgcttgaacccgggacacaggggttgcagtgagcagagattgtgccactgcactctagcctgggcaacaagagggaaactctgtctcaaaaacaaaaacaaaaacaaaaaaaaccccatcaatatgaaaaaaatagtaatcaatttaaatctgtggcatgttttactgcttagtctcaacagcaccatacttaatcaatcataacagctgaagatttgacattttataattattcttccacaataccagttaccctattacagggccaaaggtgaactgtcgaagaaattacatgtttagtaatttgatttattaaatcatactgagaagttagcatgtggattcttttaagctttaaaactatccaaattctaaccaggacttatatttcatatttgtaaataattttagaagcttcagtgaattaagttatattatttgattatcaaaacaatccagaataaacttgtcttaaaaaaaacttaatgtttaaaaaacacattttaaaattaaaatgtggaaaatctgactttactgtgaaatgttgagcctttgctcattgccttcctgtaatgcacttcccttaagatgtttaaagttaggtgagaaaagaagcaatgctacttttgtctttgtaatatacagggaaattggcagccattttttttcagggcactataaataatcattgtcaagttctatttatcttctgtaactgaagatattcactgaaaaaaaattaccgttcctgtcagactgacttttattcaagcactgtcacattgtcagctaaagggaaggggagagcagacgtcgaggtcacgttcgaagcgaacagcggggagctgaggaaactgacgtccacagctccagcctggcttagcgttaacacctgcagtagaccaagcctttctcccacagaggagtcaacaaatccatcagagatctgtaataggagggccaagactaaacactcttgccttgactccaaatagacaactccatttaaaataaaaaacaataggaaccagattcagaatcgcttcacgccttgcccaaggccctcttccagaaccagggttccgacctccccactttcctggctttggggtctgcctctcggggatctcgagcaaggggaacaaaatattggagggggaagaggagcagcagcccggcccatggaaccgaaaaagaatccagaaaaaaaaaaaaacactcccaaacggacgagacactaccagacccgccctgaagagccaatacatttccaccactcggctgcgaaagcaacaaacgcctcccgtccgggcgtccctgaaaacaaggacgcgctcacctcgaagggtaaacccagccgccccccaacgccgccttcccgtcaggggacgaggccttagaaactcggtaactgcagtcgcgtctccagggcctgcagatgacgtcagcagccccgcgctagcatcgcgagactcccgtctccctcccccggctccccacgctcccaaccgcccgcgcctgctgccaggcagcggcggggatggcgagcagcggaggcgaggcggtgacgagagcagcggctccgccattggacgaggaggcctgagggacgggccagcggtgcacaagaagagaccgaggcgggtggccccgagagagccagggccatggaggccaacatgccgaagcggaaggagcccggcaggtctctccgcatcaaagtcatctccatgggcaacgccgaagtggggaaagtgagtacagcgagccgggaggggcgggccccagcgtggcggggcgacgtgtccattggctggaagggcggccactcaacagcctggggcccggcctcctctccgcccccgagcaggcccgggtctcagccgaggggtgcggctccgcgaacgaaactccccgacctttttgacctttccgttgccccctcgtcctccgacgtcactcttccggagatggtgtctggggtggcctctaagccttgaatgtacccccaaaagagtaagaaggcctgggtccccatgaggggccgtcggcctagataccttgcccgcgttctagggggccgtccgggaccgggagatggaggatgaaagtttagttcccccagccgggcctgggagccggcggaacgttatggggtgcgtgtgagaatttggggttcgcgaaatggtgcccggcagcccagattctgcattcccgtcacgagagagcgtaactgacgttgacgtgtttcacaggggaggtgcaagggatggccggggtccgcgctgttttgttttgcgttgtgttttatttttggtggtgtccccatatctgttagttccaccgcccttctctctgccccatctgtggttcatcagctataaactctcctttagtacgtggggagggaaggccagaggtaacctgaggccttttcccttatgaattccaagacggcctcctcttcactcaaattctttccttttgggcaagtggaatctgttggttaagaacttcccaaggtcatcaaatcagtgaccgaggaaagattagaacctaagtcttcacattcccactgcggtgctctttccgtcgttgtatgcgttcaaaatcaactccgaaagagctgttaaggcagtgcctagtccagtgcctggcacccaggagatgctcagtaaatgtttacttagtgttttttatttctgtgtagcatgatcccgtactacttttgtgtgtatgtgctagcatagtattcactgaaagtcaacatttttttgaacgtcagctgtgtacgaggtgtttttttttttctagggactgggcacgctagctcaggcctgtaatacatcagcactttgggaggacgaggcgggcggatcacttgaggtcaggagttcaagaccagcatagtgaaatcctgtctctactaaaaatgcaaaattagccaggcatggtggtgcacgcctttaatcccagctacttgggaggccgaggcgggagaatcgcttaagccggggaggcagaggctgcagtgagccgagatcacgccattgcactccagcctgggcggcagagtgagacgccgtctcaaaaaaaaaaaaaaaaaaaaaagtaattttactgtgcctaatgatacaacattagaagcagctcagaatgcccagtgtcaccacatctacttaacatttttctagttttattagccagtgcaattagacaagagtaagagaatataaaaatattagaaaagagaaggtaaaattaacattatttgctaataatacgattgtttacctggaaacccaaagagaaataactgaaaaactattagaaacattataaaaattcaataaagcaaaattattacccacaaattaataactttattgtgtccaaattatattcagttggaatgtgtaattgaaaaacaattttaatttacagttacaacaaaaataaa

SEQ ID NO: 1880352 - DNA, 4001 bp, Homo sapiens
gctacttgggaggctgaggcaggagaatgtttctttaaaaataacatcattagaaaccatacaaaacagaactgcaaatactcccttctaaggtgtaaggtattccaacatttcttgtttggacgttagaattttttcttcagtaagaaattaagttgaaaatgaagtagaacatcttacactgtaattcaagtgcaatacattaaaaaaataaaaacagtgtttaaattgggaaaatccgtttacatgtgattaagttttaatcagtgcccttaacccagatctcaacagctaaaaatgttcttagcttgacaaaataacaacccatccccaaggacaaatacttaaatcaaagaagcattttataaataaaaaaattcacgcacacatacacacacagacccccacaatacatgaaacatataataatgtttgtctttatttgtaatgaagtggattttatactgaattcagaacacagatgcaaattcaacagttgaactcaatcaaataagtaatcttatataaaaggatatctccctccagcatgtacttatcctgtgtgacagatatctctgtaataaagtaaattccttcaactcaagcagattgtccgaaatggaaacacaatgaaaggatgaatatactcaaataatcaacagaagagcaaaatataaaaatgcgaacattttctgaataatgcagatgccctccctccaaaagaattacatgtgagggaatatctatattgtcataattactggataagctgcccaatagctattacactaatgtttcattaaaaatatatatttgctttatgcttttgcaacttgcaaagttattcctagcaaaaagttatttctcctgaaacagaataaataggtctttcacaatatgcactggaatacatatttttgaaaaacaagatctccactcacctctaattctatctttctgctggtgattactgatatatttattttaaaatacatactttataggaagtatcgttacaattaatatttaggacaacattataattcgtgttttagaaactactaaggcaagaggacagctcctaccattctacaaaagtctttcagttaagaagtgactaattaatggactgagtggctcagagcagggagccagtccttagccaataaagcccaactcactgccaccccactgccccatattctctgtcctctctgctggaactgtcttgtgctgaatacatgaacacctaaatattcaactcactcctgccatttctccggtaagcaatcttccacaacctgtgcctgagacttggaggctgtttgtggtccacaggctttaggcgccctagggaaagccacgtgcactagtgcatctggatgaactgtggactttgtctatccgcggtaattcaacttcctaagagctacattgactcattgatttgtatccaggctccgggctcccaattcccacacaacgtaagctccctgcagccaggggatttggtaggtttgccgtgttgtttagtttctctcccctgcgaccctctctctgagcctcacagtgtgtttggcacgtggtaggtgctcggtaaacctactttgaatgggagagggttgtgttgaagaaaggaaaggctgggaggacttaagatttgaaggttttcctacacgtgtccaggaagaaagaaaaagaaaaaagaaatgagtatcagagtcttatcatcattacagttcttatggtttttaaccgacctttaggagttccaccgacgtgacccaagcagctggtaggagaatctgggctggattcggaaggcgcagctacaggacgcccgctgccccggatcggaaggcgcagcacctcaggccacaatctcagacacgccctcgggtcccgacaggtgttgcccgcctcccacggggctccgggaccccggtccccgggctgccccctgccttctggggcgctggagcgcgcgcagtggcggagctggagccacccagtgcttcgcacgggcgcgctccgcttctccgggttttagcggaagcctgcggggggcggggtaaccgcggaagccggcggccgtgggcgcgcgggttgggggctctcgcgccgctccgggctctccccccccccggctgcggttgccgaagagaggccggagcgcggcgcccggctgctccacctggcgcgctgagcaccgcgcggggagcccccgggggcgggcggtggggggcgcggactgcgggaagaaggcacgaggcgtcgccgcagctcggtcaggggccggggccccgccgctcgccgctgcactaacttgccgcttggtctcgcctcgccgccgcggctcgctgcgctttgggtggcggggggcggggagagcggggagtcagagggtctgcggtggccgagggagggaccctacgacggggagcccgcccggtgccgctcttcttcccctccccgcccctccgctccccccaccccgtcccttccgccgattccgggagcgacgggcgcccgtgacctgcgaacgctgccaagtgacggtccccgagtctgaagcgcccgcgaggaagcgagcgccagcgcgggccgccggcgatgacggccgcgaagcaggagccgcagcccaccccgggggccagggcgagccaggcgcagccggcggaccaggtgagagtcggcagccgcggccaggccctcccgggaggggtggctccagtgcgcgctccgcccgcctcccgcttcccaggctgggctcccgcgcctccctcttctcaccctcccccgccccgccccagttccaggctctcctgcttctccacggactctgcgggaagttagagcctctgcgtgcgctccggggcccggcgagaggatgcgcaaggtggagagccgcggggaagggggcagagaggtaaaggctgaaggtgccccggggaaccccggcgggcggcccaccgagggagggagaggcggccgggaccaaggaatggggcctcttggttccccattaacgcacgctgaagaaatctgctgcgctcctgacggccgctcaccgggttcgagccccgtcctcctatagccggggcgctcgctggccaaagcgacccgagcaggcgaatgacctttaggcggacggggttttccctctgctttcttgtttcttttgaggagacgggtgtgtgtttgtgaggtggggatgggggaagagtgtcccagacatccgtagtctgctgagcggaacggagcttggggagcggcgaggcattaacgattaagtggagccgggaaggcgctggctttggtgatgtgttgggtttggatgtgtcgcgtctgcacagatgaggtgccctgcgtgggctgagggttattcctgtctctttcccgtccgtctacacccgccaacccctttttgttttggtctttagaaatctgtagcataaccgtaccgtcgtggatccccatctcgtctctgtccctgatctggggtgatttgggacttcggtgtcgctctttttccaaagttggagggtcgggagcgccgagacaccctggcgaggaggaggaggaggaggagggaggctgcgctgagccgggtgcaggtgcgctcacgtttgcatcaattaggaactccgggcagagagagctgcacttaggtcagggattaactgtggacccgcgggacccaagcgctggggtaggaggactggggatctttgttcggagtgcgctgcgaaggctgctggaggcggacaccctcccagcttattgctagcgtgggatagagggagcgcacgcggctaggctccagcagcgactcggcttttcgcgtattctaagcactgaagagcctcttaaggggagctgtccaaatcgcccaggagtggtggcgagacacaggaggccatgccagcgatgctgttattaatattgcagacttggtcatctctcctggcttgcggtttcttttctcctcttccctcccc

SEQ ID NO: 1880353 - DNA, 4001 bp, Homo sapiens; identical to SEQ ID NO: 2904

SEQ ID NO: 1880354 - DNA, 4001 bp, Homo sapiens; identical to SEQ ID NO: 2915

SEQ ID NO: 1880355 - DNA, 4001 bp, Homo sapiens
ccaagaagaagaagaagaaggaagaagaagaaggaagaagaagaagaagaagaagaagaagaagaagaagaaggaggaggaggaggaggaggaggaggaggaggaggaggaggaggaggaggaaaagaagaagaggaggaggaagaggaagaggaggaggaagaagaggaagaagaagaagaggaggaagaggaagaggaagaagaggaagaagaagaagaagaaaaagaagaagaagaagaggaaaaagattattctgaaattaggtcattctgttctcaagcttccttttcctgtgtaggtatgagtgtttatgagtctaatacattgtttaccccaaaatcaagtgtcaaataaatattttcaaacttctgctcaaaaatttgctctttccttagcaagagttttgttttgtttgagacagagtttcgctcttattgcccaggctggagtgcaatggcgcgatctcggctcactgcaacatctgcctcccgggttcaagcaattctcctgcctcagcctcctgagtagctgcgattacaggcacccgccaccacgcccagctaagttttggtatttttagtacccaaagttgatgagtcgacctgctccacgcgtaatttcaaggtggtcacgttggggtcaccccttgcagcttgtagctgctgtgaacgccagagaatgaagtactcagacaattccagctgagtggggcaggcggcaactcctctgagagagtgccgccccaaaatccatccgccaagtatttattagaaggcttgttaaaccacaaacatccaccagatgggtttttgccgtggggtcatgaggcacatacggccttgtaaaagcactcagaccacattcctaggaggctgttttcagcgctccttatcacacattccactccttgtcctgttttcagtgtcaaggagttacattctcacgcacaaacaacgtacacacagtgcctcagtatttttccatgcctcgagctcaaatgccttgtacataagtttgaatatatcgtcgtgcaccccccacatctcccccttctttaattcttagagcttgctggttatccaacgcaaaataagcttctatccttcttccctggtcatagatgcttcgggtggcagcacagagccatttacagaagcctagcaatcagatacaaaaaagaatatagcggccatcaccctagcaatcagatacaaaaaagaatatagcggccatcacccaaatgcgtatgtttaacccagacaaccaagtattcgggttcagtcattgaaagccttcttgtaattgctgaagggtatttgtttgtaattgctgcgagaccattcttcaagttgtttcttcaactagacctcaaatgctttgtacataagcttgaatatattgccgcgcaccccacccgctccccactgcctgccagagggctgggaaatggctgcaccgctgaacaccgcagttaccccggggaaattacttatgacctcctcccgcgcgctgccactgtgcgctccctcccctcccctgctttcccttcctctcctctcgcgcaccctcctcccgccctcagggacccctgggcaaggccactgcgccccgggtctacggcagctggcggggcgctcaacgcgcgcactcacacggacgacgtagcgcaaagagttcctgtcgtccaggctgaccataagcgagaagagcgcggcggcgctgtacacgccctgcacttttttacagcagccagttgaggtcccatcgcgcagcaaccccccggcgctccgccgcgccgcgcaggtcccagcccccgcagtcctcgatgacctccagcatgagcagcgggttcagtcgttcgatctcgcgcatctcgaggcacaagcggaagaaggagcgcacctagtgctgggcagcgccgccgggtccacccttgggccgagccagcaggcgccgcaggcgctcctcgttctgctagccgatggccgcgatggtgccgtaggtgagcttgtcgtcggggatggcatggcgccgcagccagccgccgcaggcgaacgagtataagtcctggcatgggtcgatgctggcgtccaggttggcggccaagaagcgagcggtgcacgcgaagtcttgcgctcaggacagccttcaggacaggctccgccgccggccgcgaccgggcccaggtacttgagcaccagcatagccgccaggatggagcagaggccggctgcaaacaccagcccgacagcaggttcaacttgcgccgcttccagagctgcagcccggcctgggcccggtggcctgcgggcagaaagtccccgcaagcgccccccgcgccgcagtgactcacatacttgacctcctggaactcatcgtagtgcgccatcagcgaataccaggactccatggcgccgaggccgccggggtgcagccctgggccacctgggctacgggatgcgcgtggccgccggcctcctcgtgagcctccgcgtggcccctggggcctcagctgcgggaaggacagaggcaggctaatgagacgccgcagcccgacggggttccggggcaccgcgaggagagacacaggcctgggtgcagaggccccagccgcgagcctcattcactggggaaaccagggaccaggagggctcggcggggccaccacccccgcgtgcacagtggagtcttctcccctgtccccctccctgcacacacgtgcgggtccctgggttgggagggccctgatgggaagggggaggagccaggcacggggcctggcacgtagtgggccttcattgaaaggctgtccctcttcccttcgcctttctggtccaggacctgccccagccaaggccgggcagaatgggggtggggggtggagaagcggaggctggagtgaggaggtggggtcaggagcgcgtctatgctgcactttccgctttccgcgctggacacagacagaggctccacaaagcggccaaagaaccaaactttgtccttgcggaagtccgcaggatctaccactcaaccccgatcgctggctccttctactcggtggcccgacagcccacccgctccttccccaggggcgagcgccaacgccccagggtcgtggatacacagcccaccccctggacggccctgatggagaccggctccgtccccccacccacccccattcccagtctgtgaccccgacccgagccactcccggcttcaatacgttctccccagaacccaaacttgggtgaagtttcacctcccgcggggcgcaaggagacgaagccgggaggctccgcgcagcggccgcgatggcggcaacggctgcagggattcggcgccatttaccccgcaggtgcgcactcgagcaggaccaggactagcgggcccgctcgaaaccagagcctgagcctgagcagaactgcgtgggcagccgctgtctcccagcgcccgctgccttttctgccgccgagctgccagcccgaggggtccagccgtgtcccaggaccagtaagggcagcgggtactcccgggaggggtcccttcggatcccgcgtccccattacgagctgcccaccagccggctagaaaggggctggagctacgcagctgggggccgtcatgccccagcccacagccctggagcaccggccggggaggactcctcctaaaggataagggggccctgatggagtgcctgggctgcccgcacagcgcctgcgcaccttcaccagggagcttccttgtactcctgggaacgcctgtccaggatgaggtctccccagggcgtctgggcttctggttggcctcgctcacttcccccagttcctgatccagggagagcaacggagagccctgccagaagaaggcttggggctgcgagtgcggcccccatggtaccaatgcacagttgacccagagcacagcaatcgcggccaataggaggtgacttgggtttagcctgtgaccacacagtcctggtcaccctgcacaga

SEQ ID NO: 1880356 - DNA, 4001 bp, Homo sapiens; identical to SEQ ID NO: 2951

SEQ ID NO: 1880357 - DNA, 4001 bp, Homo sapiens
tgagatacgagaatcacttgaacacaggaggcagaggttgtagtgagccaagaacatgccacgacactccagcctgggcaacagagcaactccaaaaaaaaaaaaaaaaaagaaattatccacagagctcaggtcctattttgagtccaaggctccacttaaagacaaacactattctcttgttttgttctgaatccaattctggccactattccttaccacatggtgccttccctgaatggttccttgctcttacaacaaaggctgtttgtattgtacagccttctatgcccaaaaatgttgaggcagctgagccccagactcttggtcctcgcctggagattcaatctgccttgttcagtgaaagactcattagacttaggtcaccactgttgtggcccaccagtttgactagaaaaccgagggttttgacttctctgccctgctatcttacacaagcaccaactgtgccactgtcaaaaggctgttcgagccaaagtgcacacactcagacactccacatgctaacataacagtaactgctgccgctgaatgccaactattaagtgctctacctacaatgtccgatttaattctttttttttttttttgagatggagtctcgctctgtcgcccaggctggaatgcagtggcacgatcttggctcactgcaagctctgcttcccgggttcacgccattctcctgcctcagcctccccagcagctgagactacaggtgcacgccgccacgcccagctaatttttgtatttttagtagagacggtgtttcactgtgttagccaggacggtctcgatctcctgaccttgtgatccgcctgcctcggcctcccaaattgttggtattacaggcgtgagccaccgcgccaggcctgatttaattcttgacgcttgtggaaggtaggtactgttagtcccattttacagatgaaacagttaaggcttaaagcggttaagggatttgcccaaggttacacagtcttaaagctaggaagggaaggagctgggatgtgaatccaagtccaggtgacattgaagtccttggttcagaagcttgtaatgcaagcaagaaaatctagcttcagccccatcttcctaccaaggacattttaacccagaatgttgtggtgagaagtggggaccttccataggaaatcctccaaaggccctaaagattgtagtgagaagtagggacctcccacaggagatcctgcagaggccctgctaacagccatgcgtggggaaactacaggcgccctctggctgttgcctcagggacgaggctggttaccagctctccaagagaaccccaggccccattgactgttcccttcccacatgactcacacatgcaggttcattccaaccttacagcaatcccctcaggtaaagcgccctcactttacagaagaggacactgagactcaaagggatgacgtcaggtgcccaaggtactagtcagaaagtggccctggggcttctgcaacaaccactatgtcacacagtccgagctcaatccaactctgcaagagtccataagcaaaggggcggcgacgtgaggtggaaacagtagcctgaaacgtgggtgtgcacgtcggatcccatcccaccgtccactcgcctggaaacccccagtttccccatatgcccagcttcgtcccctgcaattagtgagggctcacatgggtccgccccatccgtgtggtcggaaacggccgggaacctggttctagttctgccctccgcgggagacctgcgccagggacacccttctggcctaacccagccaggcctggtctacctggcggcggcggcggcggcagccggtcctcctgcgctgagttagggctcgcggggcgggaggtcaagggcagcgggcgcctgagcactggcaccagtcaccgcatccagccggggaactacagcagcggcgaagtcactgccgctcggtgcgcactccagcgagaagcgggcgcgtccggtgacgtcacaggcaaccacccctagcagggcaccaatcccggaggggcgggcccagtgcggggcgggcggcgccgggggctcttcaggctcagggcataggcaggcgccggccgcgttttctggagacggtcgctctcggagggaccctgcaattgcccgagaccgagagtgggcgctgcctgaaagtttgtccctgggcgcttcgctggcctcatccggtctcggccctgttctgggcctggcgcctttcccattgttggggaaagtggtctaggagaccaaggcagcgtgctgggtgggagagaatgatttgtggcttctgattctgacatatgtcgttgaggaggggagggatgagtgaccctgttttacttatggagaacctggggccagagctgttttcccagggtgacacaggcggtgagtagtggagctggcattcctgaccccaaagctcagcgtttcccagccactcccagcagccaggccttcacctgcactgctgggcgcaggtggggaagtggggaaacggtgctccatcccctgcagagggcaggcgtgcagggagcggaggctgaactccacagacagctactgctcagctcttcggctgccggctttgaagagtatgaggggctctgggcaagaggcccccacattactcaaggaccagatcatcaagagctttacttgtcccacgaaggagtctggaccttgtttaagtgcacaggagaccgctggaaggtcctcagtggcgtgccatggcccgacttctatttgagaagtttttctctggccacctgtctaaggaaaggtatctgggtgggtggtgcgggtgagaacaatgatggtgcggtgcttggcggagaaggtgagtgttcatagatgttcaggaggaagaactgacagctctggatgacaggaggtggaagtgagaaggaagcaggtacaaggccgactcctgggtctctagcctggtaggtgcagggctgatcatggagacagggcttctggaggagcagcgggtctggggagatgacagtgagctccaatttgcatgggacatccaaagggcattgaacagtgggcagctggagacgtgggtctggagcttgggacttcagtctagcttacagaaggtcaccaccgatatagaaatggaacctatggccgggtgcagtggctcacacctgtaatcccagcactttgggaggccaaggcgggcggatcacgaggtcaggagatcgagaccatcctggccaacattatgaaacgccgtctccactaaaaatacaaaaaattagccgggcatgttggcgggcgcctgtagtcccagctattcgggaggctgaggcaggagaatgacctgaacccgggaggcggagcttgcagtgagcccggatcacaccactgggggacagagcaagactccgtctcaaaaaaaaaaaaaaaaaaaaaaagagcctatgggggtggctgtgatcagggggatgtgctgaggagaacctggcacaggtgtttcattaagccatagctcccaaagactttctgaaaagctaagttacagcctgaaagaaaagatcttcagaggctatatttgataaaagacttgtatccagaatatagaaagagcacttaaaatcaatagataaaatcaaacaattcaattttttaaatggacaaaatatttgaacagacacttcaccaaataagatatacagacagaaaattaagacatgaaaagatgctcaacatcattaatcattaaggatatgcaaattgcaagcacaatgtgacaccgtctcacacctactagaatggacaaagaagactgattataccaagtattcacaagaatgtggaggacctgggattcttgtacgctgcttatgggattataaaatagtatcactacaattgaaaatcatttggcagtgtatgaagagttaaacatactcctaccatatgacctagccatttcaatcctaactattgacagt

SEQ ID NO: 1880358 - DNA, 4001 bp, Homo sapiens
ctttgttattaatatacaaagacaacaaacttttaaaacattacatttactaagattctggcaataagacacagcataccaggcttgccactcaacttgttattgtaagtctcagcttcaatatgaagccgttttttttttttaatcaaaaccctgctttttacatgctaaatatcttggcaagtaggccattaaacatagtaatgaacttaagacagcaagagtgaggagttaacaaaagctaaacattgcagcctaaacaaaattcatacaaaaaaataaactatcactagttacataaaattttcctgactggttaaaacttagtataaaacatgcattttagaatctttagctatcaagttcaaaaagtaccaatgtctatttaaaataattcctctcccaagccaaagtgtagtcaaaattaattcaaatgacataacacattctaatgctaaaaaatattcattattactgaagtggaggtaaatcccagagcttttggggctttctcatgctgcaaatggctgtttctctggttcactcaaagcagcatatgacagcatccaaagatgacactaagctcagtaaagggcaagactgctggtagccagctctgacctccccgtgaagcatggctactgtgtccataatacaggatgtgtgaggatcaaaggcacactattctgctagctaaagagatagcaaaccaccccccaaccctaaaagctccttccccaggtaaataaaagtatacgaggggaaaaaattaaaatacacttatctacagagtaagggttttgaaatattaatgtaatccctccttcaaaaattctaactagagtcatctggtcatttctgattacatcttaaagatgtatccagattcaatttctgttggtttatccttagacgcttctagtcaaaagtattaattttattcccaaatatcttaaccactagtacgactgcagtgtattatctcccagagttatcaagcactggaagagaaaaaaatagatgttcaagcagcaggcaacatttatggccctttcacacagtggcatctgagtggctactgaatagtccaggaataattctaaaaacaagaaaattcatgcattttagtaaatatgttgtagttttcacagttgaaatttcctcagacattgcactttctttataagggaatcctgatttttcttaatgttacggtgagtcaggacttgaactagcagccttctttttcttcttcttactgtgtttcttatgcttctttttcttttttgttttctcctcctcaatatattctgattctgacaaggactcagatgataaaggtttatcttcagaatacatctttctctttttgctgagtcctttaatatgcttttctttctcagttccatcttttgacttctttttcttttttaaactatccttactgtctgattcagtttctgacatggagctttcagaagatttatgtgaacggttcttctttttctttctccattttccttgtttcttatcctcatcttcagaatcagaagaactgctggaagaatcagagcttgatgaagaagaagatgaatacctaccagatttcttcttttcttttttctttctctgtctttttttggatgagctctcacttccacttaacaatttctccctgtgtttttccagttctttcttccagttctcattcattttttcttcaaattcagccaaagccttggagcctttctttttcttttctagttgctcttttacttcttcccaggtaggccttggtcgattcagataatcctgtattgttggccctgaagactggattggaccccttgatctcgccattgctattgggttcatataggccacccgattgtcccgcttccccatggtgctggatcgagcgcacagtagcacgccgagggaaaccgggccagagagactgccgaagagggcctgccgcaggtcctcttgccgcctcgcaaaaatcttaaacaaaatgccaacaaaccaaatccaacaacacatcaaaacaataatataccacagtcaagtgggatttatcccaggaatgcaaagatagttcaaattatgcaaattactaaacgttatacattacatcaatagaatgaaggacaaaaatcacatgatcatctcaattcaatagattcagaaaaagattttgataagatttattctgacttcatgataaaaactcttaataaattaggtatagaaggaaagttcctcaacatcataaagtccatatatgacaaacccttagctaacatcatactgaacggagaaaaaactgaaaggctttcctctaagaactggaataagataaggatacccacactaaccattcatatttagcatagtactagaagtcctaactagaacaatctggcaaaaaggaaaaaaaatggcattcatattgaaaaagagcaagtcaaatagtctctgtttgcagatgacatgatcttatcttatatttcaaaaagcctagggcattggacttggaaaagtttttatgaataacacctccaaagcataggcaacaaaagtgaagacaaatgaaattatattaaactaaaaaccttctgcacaacaaaggaaacaatcaacagggtgaaaagagaacctgcagaatggagaaaatatttgcaaactactcatttgactggagattaatatctaaaaagcttctgcaaaacaaaggaagcaatcaaaagagtgaaaagagaatctgcagaatggagacagtatttgcaaactactcatttgacaggagcttagtatctaaaatatacaaggaactgaaatatctagataataaagaaaacaatctgattaaagaatggacaaatgatctgaacagacattcctcaaaagaagatatacaaatggccaacaggtatatgaaaaaaatgctcaatgtcactaattatcagggaaatgcaaataaaaacgacaatgaggtatgatcttactccatttaaaatggctatcatcaacaagatgataaacaacaaatgctgcaaggatggggagaaaagggaactcttatccactgttgatgggaatggagaatattacagccactttggagaacagtatgaagattcctcaaaaaaaaactgtaaatagaactaccatatgatccagcaatcctactactgggaatttatccaaaaaaaggaaattattatatcagagacacatctgaaccctcatgtttactgcagcactattcagagtagccaagatatggactcagcctagatgttcaacaacagatgaacaaataaagaaaatgtgatgcatatacctcacaaaataaaattctgtcatttgcagcaacatagattgaactgtaggacattatgttaagtaagataagccaggaatagaaagttaaacattgcacattctcactcgaatgtggaagctaaaaaaagttgatctcatagaagtaaaaagtagaacagaggatactagaggctgggaaggacagggggaagggaggaatagagagagatttgttgaacaatacaaaataatggctagataattttagtgttctataccactgtaggatgactatagagagcaataacatgttatatagttttaaatggctagaaagaggatattgaacattcccaacacaaataaatgatcaaggtttgagatgatggatatgctaattacacttatctgatcactatacataatatatatcaaaaaatcactaagtaccccattatctgtacaattattattgtcaatataaaaaaggaaattttaaaacagaaaaaaatacactttgaaagaattataaactaaatcagacttctaaaaagcaaaaactgaagaaagaaatagtgaaataaaatcttcaatatgttgtgagaaaaagctacatgtctatagttataaacccagaaaatccttatttaagaaaacataaaataaatattttt

SEQ ID NO: 1880359 - DNA, 4001 bp, Homo sapiens
ttatagcactaaatgcccacaagagacctctgcctgagaacgtgggtttcagcctaagagctgtaatatgtgtgcccattcacaggtgctgcatcagagtcccaggtgggaagaaggcaagcatacacaaaaatggtaaaaggcagaaaggagcccagagtctcattctttttaagaagttttcctaagaatctccacccagcgacttgctctcacatcttcttggccagcactggaccacacaactccttctagatacataggagtcctaggattctatgagaaagaaggggagggtgggcaaagggcagccagctgtgcagcatctgctggagacacctaacccttggtggaggggttgtggtgctgggagaaggctttctggacggtgtgacagcagagataaacttaaaggccaagtaggagttaccctggtgaagcagggcagggttacaagcattccagcaacatgaagcagcaggagtgttttaattaaaagaaggcagttgctgtaaccaactataaacaaataaaggcttaaacacaatggaagtttatttctcactaagggaacatccaaatccatgatactttaagtcagggacccaggttcctcccatctatggttctgccatcactaatctgggtcttccacaattgccgtgctccttggaagtgggaagagcaggcggaggacacgtgggaggttttagggacaagcctggaggcagcatgcgtcactcccatgcagagtccattggccaatgctggctccgatggccacatctcactgcaggggcagctgggaaatacagtctggctgtctacccaggaggaagagcagccagtttctgctgctgatgatcaggaggtggagaaaatgttcagtcaggcagggagtgggaatagacaagaccacaagcagcttggtgcctctgaaagggagaggggtggaggggagactagagaggtgggtaggaatactggattccactgaccacgtgctggatgtcacgcttagccctcctgctctgtgccgggttaggcacctggtgttttacgtacataatctcaattctgtgagggcatccgacctgtgggaaaagagctgtttgtttcaaatgctactcctgcttcctaacaagtgtttagagcttaatcgtgttcaaaatacatatacaatgtttaatacttacaagaatttggaggggaaaatattaccatctttcccttttatgattggagaaaaatgaggctttgaagggtttaagaacttgcccaaggtcggccaggtgcagtggctcatgtctataatcccaactctttgggaggctaaggtgggaggatcgcttgaggccaggagttcaagaccagcctgagcaacatagtgagactttgtctctataaaaaataaataaataaataaaaagaacttgtccaaggtcagacaggcagcctcttagtaagcacacatatcctctatattatactacctctcatggaggatctcctgtgttctacaaatagtctggacttgagccagaatgtgttataatcctgggatcacggccagtgggcttagaagaagccatctctttctcatgccaagatgaggctcccccagatttgctcagacttacctatagtcagcagcatcgggggtcaggaaagacttcatgaagccataaatgcatccttctcggggcagcacctggctctcccaggtgagagaggactccattttcacaggcaggcgtgggagcttcagcacccatctctgggcccagaatgacccactggagaccttacagctctcctgtcacccccaattcctgccccctctgcagccttggaggagaatggagctgaagggcctgccctctgtagggtgagaaagggaggctaaagcctggtgcccactgccctggctgctccgcattgcaggagctgcgcccttcctttcctggcacagggtccacagccccgaaaccccgttgtgtgggagctgggcacagggcagcaggactaatccttggaacagctcagggaggattatcccagccactgtcagcagcggtgcagctggctcattcccatatagggggaggccagagccgggggcctgccacaagttggaaggctggggaaggggaggccagcagaggtgtcctggctgtgggtggctctgagggggctctcagggatggggctaaatctcaggggcaggattaggtaaatcaaaccaattctagccacagatttaaagtttggaaaaaaaaaaaaaacccagcctggcggaaagaatttaaattataaaaacttagaagtatggaatgtgaaatcatcctgtaggtgcttatttaacaacgaaatcatcccgacacaatgagccatatgtgaaaagtcctccttccccaacacatcccccaacaggcactcctcaaacctctaccacccaagtgctggcatcctccctgtcctgcttcacctgagacaccccttgtctcattagacatgcaactacgggaggggtgacaggaagacaagacactatttcctcaggcccagtttggtgtggggagaaagcctcctgatcctgaaagcaagaatttgaccagagcagaagtaatcagtatgcagattgacctgtggtacgttaatgtttatgcatagattatgaggaccaggtgaaaagtgggccaggggagacagatgtgtgtgtgagtcatgggtggctgagatgaggacaggagggaaactggtttggaggctgctggcgatgggatgggggtgccaggaggggtgccaggaggaagggaggcagttgtttgaatgtctgcatgaaaaagcggaggacagcggggtctgggtgaattcgggcaacaatttggaccgtggagaaaactgcctgtgtgcggctgaggacctgaactattaatttgttttttagctaatgcaaagataaatataaaaactgatactccatccagttaccagaaaacatttaggtacgtgtgagacaacttgggtatgtgaacctaccttttcaatgtaaattcagtgaaatctaagtacagatcccatatttccaataaaaaggtaacatccaaactcagatgtcctatgagtataaaatacacaaagatcttctggacttagtatgaaaagggatttttttttgtcaggtacctcactagttatttttaaaataggattgcatgttgaaatgataatcttttggatatattgggttaagtaaatgtattattaaagttaatttcacttaaaaatgtttaatgtagctactagaaattttaaaattaagcatgttgctcaccttatgtttctattggacggctctctctagatacaaaggctgccaagagggacctcactctagcttcagggagaagagaggaattagcaaggccaagcagaagctcctgagggcagggccaagggcggcttggtggggtggggatgggatgcacaaagataactccaacccttaagaaggtgtttcctagagcaggctgtgacctgtcagtttatatactgaggcttaggagcctcttggatgcccccagatctgcacccctgaattgccctgtgcccctgccgtctttgttcctgtgctggcatagtggtctcacctccggcagtatcaccaccactgggcacaagcttctccagcacagcaactgtgtcttatttctccttgtactcccagtgttcacaccatgctgcactcacagaagactcttcggtgatattttgtggacagagagaatgcctgtgagagtgggctgaagtgtgcgttgggctccagagaccttaaggaggggagaccaggtcctgagtaaagttgaaggggaggggctgagtcctgctagccaggagtctcatcccctagggaagttccagggaccctcagaagtgcaaggggacggtgttagtgttagtccagtgacacagcccagagcctgccttccacgtgggtt

SEQ ID NO: 1880360 - DNA, 4001 bp, Homo sapiens; identical to SEQ ID NO: 2972

SEQ ID NO: 1880361 - DNA, 4001 bp, Homo sapiens; identical to SEQ ID NO: 2981

SEQ ID NO: 1880362 - DNA, 4001 bp, Homo sapiens
atcatggcagaattgacagagacgtcatcccccttcaccagctggagcagagcctatgagaggggctggggaacagccacgaggcctggcacccaccattcaatgtcttcagaattgcggtccctcagaactcttgcaccacgtggtggcagcactcccagtgtctaggtgtcttctgaggttgtacaggatccagtagaggccactggctgtgctgtcatatcctgagtggcaggcttgggtctctcggctgcttcagcaccagaggttggacagcgcccttgcactgaggccctcagaatgggagggaaaggaagggcagaatggagtgatgtagggtccatccaccatgtccctggatggagagacccctattcccacagtagtccacaccaggacaacgattggcactcacgaagatgccagccttcatttatatgttcttgtctgacaactccttctcattttcatcctggaggcaagacccctgaacacactagctctgaggacacctgagtgtaacctgagacattccctgaagacctttcatcaaagcaggatccctcccttgtcatctccagacctgccccacaagctccctccctggtctcctggctcttgttcactccttccaggcagccttccacagtcatctctaaaacatatacgactgtccctcctttatccaacaacttctatggctccccagagctctccagatcaagttcaagttatttgatcagacacttgatctcaagctgcattctacctcctgaactaaaatcccggagaagcccaccttgctcagcaaaaatgcatcactgaagtccaaaatcttgaatgtggccttagccttgaggaagtcatcaacaccccggcaagtgagggtgaggtgctgctccaggatgatggtgtctaaagttgtgcaccaggtcataggccctgcagaagcatctcccctcaggagtgaggtagtacaggaagtccgtgcacaggcagatctgctggtgccattacactaagagggcactgagctccaagatggtggcaatatattcactgggattcctgcagggtgagcctggagagaggaagcagctccataatacatatgaaaccctggaagcgcttcccagccagaaactcaggaccacactacatccagatacgggtgccctctgagcacacttgtctctctgtctcccactctgagctgcctcctggccccatatgccccagcctggcccagggcttggagcccagcgggtgttcagtccatggtgttggctgctccctgggccaggagaccccttggtggctctgtgactcctcctgtggaacccctccctctgccttgagacctcccaattcccatggaagcccccacagctctggattgccccacctgccctgggatcctccagccccagaggccttacttgatgccttagccctcccagaacatgacatgtttctcagaatgtggctgatgtccagggccatctgtagatgtttgctgcggacctcttgctgttttcctttatggtctgtagggcagggccaagaggagaaaccagcccaatctcagaatggacaaaaggctcactgccccaacagcaaccaccaaacagtcagcagtgcttctggatgaaaaacaggtttcattctgcagaaagctccttgtttggcttatttttgaagccagggaggggtaccaagctcagcttacccgcggtgcctacattagcatctgtgcctaggatgcgtgatgggctcccactgcagggttgacattccctccagctggagacctgggctcctgataccacctggcctgtttgtcctgctctggatgagggtggaaaggctgtacctggtatttccctaggtccttggttttcaccttccagacatccagcaggagtgaccatgcccagccccacacctgaaatgggactcccttgtacagcagctgaaacatctacagatggaagaatgctctggtgagacaggccacaggggtccctggggaggatcgggggccggaggattctggaggtttccagccttgggcactgtggttcctcaaagaggttaggtttacctaggactaggcctcccctcccatgattcaaagagtggatgagtgcccagcatcaggaactctgttctggacctattttttcatttaggtcaccaagagacaacccgtacctcccaagctagggacggtccaagctctggcatgaaattctcttccagcaatgtgatgcttgcagggacagggagaaaagccggtggccaggcctgctgtcccccaggtaaggacagtgtgctacccaccctctgagaggcaggtggtgccaggtcactgcactgggtgcctgtacccctggctctgcagacaccggtcatggaggtcctcccctctccacattaccttcttgctgctcctcgatttcttctagtcattaagcactttgagccatttttctgtgcagctgatatgatatttttgttatcagatgaaacatgacaaaataagtcgagccaccaggatttctggagggaaccttggatgctgcatcttgggctctagggccctgaatgggactgaaccagaagcagccagggaaggaaaaacactggggctcaggccctatgacccaatggccattggtggcctgtcctcatggccccaagacaccctgtcctcaggccacagacaccatgggcattggtcaggtcccagcttcccagtagtgccctggcactagcgggtgctgacccccaaaccacaatcacagttgtgggttatgggtttggtaaaaccacctcagggagacttctggggttgggtttggcaggtgcctcccagggatggtgtgtcactcctacttgccacgaaatgtgcacacaggctttcccacttcccagcccatcctgctggacaggatggaggaagtcagggaacaggcagggtggacatctggggtgcagggagaggcaggtgcatgctgggaggacagaccctgtgagggctgtgggggcatcaggtggagtgggctccaggtgcaccctcaatgcactgggaaggtctcaggccaggttccctggaccccggctgggtgatgtggtcactccctggggactgctgtcaggccccagccacccaccctgggcaacaccttcctatctcaggactggactttctgagtcctgagacaggacagtgctgtccaggcctgacagattgggaggacctgttaagtcctccatccctagaccagcctcgcacacagcagggacagtctcttacatttaccttcagagcactgactgatccatctcactctaaggcaatcaaggcagagctgaggacctgtgccaggctgggaaccagtcccctccctaaatgggcctaaggaaagcaccatccctgtcccagtgcgccgcaagtttcagcccaggagacacatagggaagggaggactgggcctccctgctggctgacactggaaatgtgggacctgggaaaaaatggagcacagggctggcaggtgatgctccaggaccatggagagctcaggctccaccaaggggctgcccctcctgggctggaggctgtgccctctgcaggatctgaggaagtccagtcctgagatgggacagtgctgcccatggtgggtggccggggcctgacagcagtcccccaaaggagtgaccacatcactcggccagggtccagggagcctgggctgagacctgcccagtgcactgaaggtgcacctggagcccaccccacctgacgcccccacagccctcacagggtctgatctcccaatatgcacctgcctatccctgcaccccagctgcccaccctgcctgttccctggcttcctccatcctgtgcagcccatagactgtgaccatctctccgaccactctggcccttcctttatgtttgtcttgtgagaatctctgagcaagatctccccggt

SEQ ID NO: 1880363 - DNA, 4001 bp, Homo sapiens
cttgctcagcacaagcgcatcaataaagtccgaagccttgaatgtggccttggccttgaggaagtcatcaacaccctggctagtgagggtgcggtgctgctgcaagatgatggtgtctgaagttgtgcaccaagtcacaggccctgcagaagcatcgcccctcaggaatgggtagtacaggaagtccaagcacaggcagatctactgacgccgttacactatgagggtactgagctccaagatgtcagcagtatgttcactggcattcctgcagggtgaggctagggagaggaagcagctccgtaacagatatgaaactctggaagcccttcccagccaaaatctctggaccacattacacccagaaatgggtgccctctcagcacacttctctctgcctccctctctgagctgcctcctggccccacatgccccagcctggaccagggcttggagcccagcaggtgttcagttcatggtgttgactgcttcctggcacaggagagcccttggtagctctgtgactcctcctgtggaacccctgcctctgcctcaggacctccctattcccatgggaagaccccaaggattgccccacctgcccagggatcctccaaccccataggccttacttgatgccttatccctcccagaacatgacatgtttctcacaaggtgacttacttccaaggccatctgtggatgtttgctggggacctcttgctgttctcctttatgatctgtagggcaggaccaagaggagaaaccagcccaacctcagaacaaacaaaggctcactgccacaaatggcaaccaccaaacagtcagcagtgcttctgggaggaaaggaggtttcattccgcacaaagctccttgtttggtttctttctgaatccggggaggggtaggtaccaagcccagcttacctgtggtgtctacattaccatctgtgcctaggatgtgcaaagggcccctactcccaccgcagggttgacgttccctccagctggagacctgggctcctgacaccgcctggcctgtttgtcctgctctggatgagcggggaaaggctgtagctggtatttccctaggtccttggtttctaccacctagacatccagcaggagtgaccatgtctagcaccacacctgaaaggggactcccttgtacagcagcccagacatctacagatggaagagtgctcagtgagacaggccacaggggtccccagggaggatcagggggtggaggattctggaggtttccagccttgggctctgtggttcctcaaagaggttaggtctacctagtaccaggcctcccctcccacgattcaaagactgaatgagtgtccagcatcaggaactctgttctggacctgttttttcatttaggtcaccaagggacaacccctaacccgagctagggatggtccaagctctggcatgagattttcctccagcaatgtgatgcttacagggacaggtagaaaagctggtgaccaggcctgctgtcctctggttaaggagtgtgccacccaccctctgagaggcaggtggtgccaggccacagcactgggtgcctgtacccctggctctgcagacaccggtcatggaggtccctccctccacattaccttcttgctgctcctagatttcttctagtcattaagcactttgagtcacttttctgtgcatccaattttacatttttgctctcagatgaaacaggataaagtatgctgagctgccaggattcctggaggggaccttggatgctgagtcttgggatccagggccctgatgggactgaatcagaaggagccagggaaagacaaagattggggctgagcccctatgacccaatggccattggtggcctggccttatggtcccaagacaccttgttctcaggccagaaacaccatgggctttggtcgggtcccagcctcccagtagtgtcctggcactagcaggagctgacccctgagccacaaccgcagttctgggtttgggatttggtaaaaccacctcaaggacagagtcttgggatcgggtttgccaggaaccatggtgcctcccagagatggtgtgtcattcccactcgccacgaaatgtgcacacaggctgtccccatgtccatcccatcccgctggacaggatggaggaagtcagggaacaggcatggtggacagctggggtgcagggagaggcaggtgcatgctgggaggtcagaccctgcgagggctgtggaggcatcaggtggagtgggctccaggtgcaccttcagtgtactgggcacgtctgaggccaggctcactggaccctggacgtgtgatgtggtcaatcactgggggaatgttgtcaggtcccagccacccgccctgggcagcactgtctcatctcaggactggactttctgagtcctaagacaagacagtgctgccaggcctcacagcctgggaggacctgttaagtcctccatccctagactagcctcccaacagcagggacagtctcttatcttcaccttcagggaactgactgatccatctcactctaagccagtcgaggcagagctgaggacctgcaccagtctgggagccagtcccctccccaaatgggcctgagggaagcaccatccctgtcccaatctgccacaagtttcagcctaggagacacatggggaagggaggatggggcatccctgctggctgacactggaaaagtgggacctgggagaatggggagcacaaggctggcaggggatgctccaggcccatggagagctcaggctgcaccatgcggttgcccctcctgggtggagtctgtgccctctacaggatctgagaaagtccagtcctgagatgggacagcgctgcccagggtaggtagccgggacctgagagcagtcccccagggagtgaccacatcacctggctggggtccagggagcttggggtgatacccacccagtgcactgagggtgcacctggagcccaacccacctgacaccctcacagccttcacagggtctgacgtcccaccatgcacctgcctctccctgcaccgcactgcccaccctccctgttccctggctttctccatcctgtgcagcccatagactgtgaccatctctccagccactctgaccctttcttcacctttgtcctgtcagaatctctgagcaacatctcccaggtccatccaaacaactgctttgtctacttttgaccgggccattgggcatcactgggccatcccagctgtccagagggccctcgataacgtgcaatgcacctggcttctccaagcagcgctcagcagtccccactgaccaggttcctgctgaccagaccccacacatcaggtcttccctgaccacaccctcactgattagacccccatcaccaggacccactaacaagacccccgctgccaggccaacaatgaccatgactccactgaccaggaccttactgacaaagcctcacggacaaggcctcactgaacaggaccttactgaccaggcctccctgacaaggcctcactgaccaggtccttactgaccaggcctcactgacaaagtccttactaacaaggcctcactgaccaggaccttattgacaaggcctcactgacaaggcctcatggatgagctccttactgacaattcctcactgaccaggtccttactgacaaggcctcacggaccaggtccttactgacaaggcctcacggaccaggtccttactgacaaggcctcacagaccaggaccttattgacaaggcctcacggaccaggaccttattgacaaggcctcacggaccaggtccttactgacaaggccccactgacaaggcctcatggaccaggtcctaactgagaagacctcactgaccaggaccttattgacaaggcctcactgaccaggtccttactgacaaggccccactgacaaggcctcactgacaaggtccttattgacaaggcctcagtga

SEQ ID NO: 1880364 - DNA, 4001 bp, Homo sapiens
gcttagaaaaatggccttattatttactttttcttcagaatctcatttcacctcacagatcactgatgttatatagatacaagagtttggaattatttatgttaataatttgttgagtttatgaaattcattctttctgctttgcatgtttcccactttaatttgaaatgattagcactttcttatgttactcagttctcttttcttataactagctccccttcttttggacataagaaaccaatttagaacattttttaaaatgtgaataaatatgcagctttgcatataatgaaaaccgctttgggatcacgttaaaataatgatgttctaagtcatcaaacgttcaccccaactgaacttttttaggagaaagagttgaaggcaggtgggaagcagaaagaaaggggctgctagaaaaatccggaattcgaaggaaggtctttgtcactaccataattcattgtctcatatttctatttgaattcatgttgaacccagctctgggaggaatagagacagagtctgaagggcagtctgaatccctaataagatttaaactcatttagatcactgatttcccattcattgtacaaaagagtaaagtggggtttaggccctgaatgcctcagtgtgagctgtgaaccccacagctctgccggatcaatgtggacttcagggagatgcgcactgagggctgctcacctagaggagccacgtttctccttgtaagacattattgaaaaggcgttgccggcacatgtcgacctatgtaacaaacctgcacgttgtgcacatgtaccctagaacttaaaatagaataataaaaaagaaaaggccttgcctatattcactgatgtttgtatttgaaaaatttgccccaatattggtagttctttcttgtattcattaagaattattgatgtatacctgctttccatacacacacataaactcttctatgtgttttataataacgaatttaataatctttgaagatatttttactgcatcctcaattcactgcactaattcatgcaattataaactgcaggaaggaggaaatacccccatcttgcgataaataaagcaaaatccttggcagaaccatgcccgcctgtccgcgccccgaccagccctcccgggcagccactcaccggtgtccgtcttcccagctccccgccatgtcgccaagtgaatccatcctgccgtccgtctccactttcaccagcccgtaccgcaagcgccgcctgcaggagcgctgaccctgcgccgagcccgaggccaggggaacccacaactacctcaacagcgtgtgggactccattcggtccacagggctggatggcctggggccgaggccaccccgaagcccccggcgaccccaccgtctgcgtcctattacccgaacactgcacgccgctgccctagggcgccctggagctggacccgctgccagaaggcccgcgctgctcagctggtttttgttgtttttgttgttgttgttgttgttgttgttgttgttgttgttgttttgagatggagtctccttgtgtcgtccaggctagagtgcattggcgcgatctcggctcactgcaagctccatctcctgggttcacgccattctcctgcctcagcctccggagtagctgggactacaggcgcccgccaccgcacccggctaattggtttttgtacttttagtagagacggggtttcacctgttagccaggatgttctccatctcctgacctcgtgatccgcccgcctcagccttccaaagtgctgagactacaggcgcccgccaccacgcccggctacttttttttttttgtatgtttagtagagatggggtttcaccgtgttagccaggatggtctcgatctcctgaccccgtgatcggcccgccttggtctcccaaagtgctgggattacaggcgtgagccactgcgcccggcctgctcaaccgctttcaactggcgctgcccagccgcctggtcaaagcccaaccccctgaggcagatggcggcagctgcggctgcgcacccaggttcaggcatggaccgcgcgtcctcaaacactagggcgccccgggcctgcggcttcatgcatgcgaggtcccgggtccctcccattccgcccccaacacccgcccctcagcccctacggcccgcacgcctccttcccgctgcctttccgtggccctggtttgggacacccagcccggccttcatgaggcgccccccacccagctccgcccctccacgcccctgtctttagtctcttaggcgttggccgccaccgccacagccctgggcctggcacccccagtcgcccgcagtctccttgtggtggcaccggcgtccccgctggagcggctggaggccaagcccaagcatgacagctgctcctggcctgggaaccgcaacaccgggcatacctatgcggctacggccagacctacagcaagaattctcccttgcaggcacatctgcgcagcacacaagtgacaagcccgaccactgccactgggatggaagcagctggaagcgtgctcactcagacaagctaacgctccaccaccacaagcacaggggccactggccatttcagggccattggtgccaccacgccttcttgcgctctgcccaccttgccctgcacaggaagcggcacatgcagcccagaggcctccccacctgcacacggccccctcccaaactgtgactggtatttattgcacccagagaactcggcagggcggtgtggctccatagggtctacctcgacgacgaagacggcgccactgccccagcccccatctgtgactgaagaccaggtgggaaaagaccactatccgccttgacgagttctgtttttcaaaatggtgcaataattaagtggcatcttccctcccacggggcataagacttgatgtcctttgagaaataagtgccttaatttgtactgtctgcgacattttttataatattgtacataataactgggacagatattgttattactgtacatagagtggcagggctacttgcctccttttcctaagacttttgcttcttttatttttaatttttaaaaaagtcttttttaaaaagaaaagaaaaatccttattaaagacttttcaaaatagaactcttaaatagtaattgatagcactttacctctgttttcctgataaaaaaaattctaaaagaataaaaacaatttcatcctgcctccatattataaccagaataattgaaataatatgcttcaattgatagtaaagtagcatttatgtttttggatcaatgaagctaagccagcactaagaattttcttactattcctccactacattacagttacttcttcatccctatacataccgcaataatgagtcagctacatccatttagattatcaacccaaccctaaaagaaagaaaatttccattggttacacatttcagaaaattgttgtatctttggagcatctgccgtctaatcttaataaatttcaaacaagggcactgagactccagccgatagaactatctaattcagtatgattaagatcccaaagatcaatggcaaagcattggctattttctgcagtttgtgcaagaattaaaatttggccaggattgttgtttgtagcaggagtcatgaatggttttgtggcgttttatgacaacttaagggctacaatggaccttgtccttatatcatgatctgctaagcaattcaccaaccatacttcacctcattcctgattttagcctccttaggagaacattgaaaacatgattggtaataatgtgtattgacttgcttaaagatgttacaggaaagattatgcttaagagtagttagagggaaatgtatttttcagtttgtttcctaagccctaagccgtctctttaccttacagtataaaagtcgaaatgcgtataatgggagaccagatatacgggaagagaagatgaagggactaatat

SEQ ID NO: 1880365 - DNA, 4001 bp, Homo sapiens; identical to SEQ ID NO: 2989

SEQ ID NO: 1880366 - DNA, 4001 bp, Homo sapiens
agccggggctgggaggggagagctgcgcccgcctcctcccctcccgcgcctcttcctcctccgcggcctcctccccccgcctcctcgtgcgctcctccctgcaaggtggagtctggggttgacgtgagtgaatccacatggtacagggctggagaataaagagtgtgagttgaactcgtgccattgtagtgactcatctcgggcagagcgctagggctccgagcgaaccagcgagcgagcgaacgagcggcgctcggcggggacagaaagagggagagagagagagagagagagggagaggcgcggccgggcgaggcgggcccgtccgggagcgggctccggggaaggggtgcgggtctgggcgccggagcggggagcggggccgcgtccctctcagcgccagctctacttgagccccacgagccgctgtccccctggcgcgctcggggccgcgggacgggcgcacgccgccttctcctagtcaagtatccgagccgccccgaaactcgggcggcgagtcggccacgggaagtttattctccggctccttttctaaaaggaagaaacagaagtttctcccagcggacagcttttctttccgcctttttggccctgtctgaaatcgggggtccccagggctggcaggccaggctcgctgggctcctaatcttttttttaatttccaatttttgattgggccgtgggtccccgctgagctccggctgcgcgcgggggcgggagggcgcgcgcaggggagggaccgagagacgcgccgactttttagagggagggatcgggtggacaactggtcccgcggcgctcgcagagccggaaagaagtgctgtaagggacgctcgggggacgctgttcctgaggtgtcgccgcctccctgtcctcgccctccgcggtgggggagaaacccaggagcgaagcccagagcccgcggcgcggccggcggacgaacgagcgcgcagcagccggtgcgcggccgcggcgagggcgggggaagaaaaacaccctgtttcctctccggcccccaccgcggatcatgtaccaggattatcccgggaactttgacacctcgtcccggggcagcagcggctctcctgcgcacgccgagtcctactccagcggcggcggcggccagcaggtaggtgcgggccccggtgcacctggcggcgcgggcggacccctgccctcttctcgccgccactgcctcttttgctttcttttctttttcttggcgagaaaatacctacgggccaccgttgtaagttctggattttcgtcctccccttcccccccacccccttttaaactaggggattggagagtgggcttgaagagacaacatgcccttttcctctcacgttatattttacccagatagactcctggaattgtaggccccctaccaggagcctgttacctccttccaagaactactccccctccccagtgtctgcccccccccccccacccctgccccgcgtcttctctctgggtggtggacagacaagaaaatctttgcacccactggcacctctcgacatcctgggaccctattccttcaggaaagccctctctctctcctccccgttctccatcagtcataactcctttctgaaaggggttggggacccagaaacatggttggactccttcaagtaatctggagcgagggcgagggctgccgctctgggaatcaggtgcgaaggtcaggaaggaagaagccagccttggttggctcatgccgcctgtgtgccccctgcctgcctgcctgcccccccgccgacccgtcttctgtaaggatcacggacaggaggctgcactgccccccaggaacgaaggagcaccttgagggtctgggggtacctggagcaaggagaccggcagagggaagagggggtcgggtgggggaagagacatcacgcaggctcctgggtggttctggaagcagaaaacaacttgtttctaaagcagccggactggtttgcactggagggattgtgcgtgtgatctctgtgtttataaataccaggaaggtgctgttggcgggggggtgctgatggcgtgtctgccctctgctgcagctcccccacccgctctgtctcgagagagagctgggttaacgcaggcccaatacaacatgaagcccaccgtggtcagcatctgtggagtctagcatagttggctgcagcaagggatgctcatgctccataaggcggtggccttggcctctagaaggggctagggtgggcttccagggaggggtggactcagctggaaagaattttggaacgtggctctcttttggatctgatgggggggtcccttgttccaaagtgattccctatacctggtgagtccccaaaatggcttttctgtcttccctctgcctcccatggtgctcctataagcacccacagtagagacagcctagtctgttcattgagggtgcagtcaatgcacccttcgtaatgagcaccaaggtgatgagtttaaaatccgaaaagttgttgattatgtttgcttcccagccccgctagtggtttgtgttgaatgtaaacataatgagggaataggttgaagtctgtacccactccctccgtctcccgttcgacaaaccccaaacgcctgtctgtctcctcctccctgaaatcaggaagggatcttttgatttcttctctgttcttttccctaatgtgtctttagcagtgatcattggagtattacaatctcactgcctggtttagcatagaccctggggcctggagggaagtcagaccggacatcagtgccccaactgaataatctgtgtcactagggctttgagcccaggatgtgagcggaggcaattcccggttttggaagaaaatcagacaggaaaccagtgctaggaagaaggaagagaactcagtccagcagagtgtaatagggcctcattaccgaagcaaaaagcagctgttggctaattcctagcatgctgtaacacatgagtattttgcaattagcaataaccagtgcacggggtttcgcatagacgcctgcccattcggcccggcagtgtgtgaggcgcctttcaaaccggagggattggcaaggtaatgccacttgagacaagtttcttggcctgtccgctccttggtgtggtggtggttgggtgggggacgaggaggaactggtggatttttctgtcattgctccaagtgtgaacaaaattgttctgtggtcctaaggactgacctcagaggcttttgttccttcacaagtctatgctatgaccttgcccgatcttgggctcaaggtaactttactacataccagataaaacctgtaatcactttatttctctccgcttcctgtactggaagactttcctggcaattagtggatgggcctttctcttttatggcatctcagtggaccgatccatatgagacagttctctggtttttctctggggaagtgaattttatttttttcagctctctcttttgggggtccaatattcctgattagtttgttgccagttcttcaacccagagctttcccgtcctctctagcttcatgaagctggatcttaatacatggccatgagctccagtgactttgggggtggggggagcagactagtctttgttacagcctctgttcttatatatggcaggaacttgaggcatgaaaaatatttcctgttccagttatagttttaatctcaaaggttggtcattggtgattttgttttgtcagtaaccgttgcacacacctccccttcttggatttttctttttgctgttgttttttctctcctaactttcctaggaaaacatctcccagatatatgccctgcctggctgcttgactattacggtttcagggcctgagcattacgcaatccagccagttacacaaacataggtcatttcataacttgttttcatcagctgggcccccttttaatgaaaaaacaaaacaaaaacaagacctagaacttttcc

SEQ ID NO: 1880367 - DNA, 4001 bp, Homo sapiens
ttttggggtgaggaaaacccaataaaagacaactccagcaacctcccaaacgcagggattcttgtgctcccctggaaagtctcagataaagttagaccacaaaatgtgggtgtgccctgagccctcgctcaagggcacagagcaagtcactggcagagcagggactggaacccggtgtcctgatccccaggtgaggccagcctcagagctggcgggaggggcagggcggggttggtcctcccaggctggggcgcagtgaggctcacccagagtgaatttggatgtttttccaggcagaaggacatgtaaaaagagactggcagtgactgacctggactggcaggtgagtttttttttccccctcaacattttattttgaaatttttcggacatacagaaaagttgaaagaatggtagggcagacacccaacatatgcccacccatacgcccaccacctagattctgcagttacgttgtattgtatttgctttgtcacacatcagtccagccctctatcaactctcggtctgaaatggtttttaaattacattttaatttttaaaaaccaacctccagccgggcgcggtggctcacacctgtgatcccagcgctttaggaagctaaggcaggtggatcaactgaggtcaggagttcgagatcagcctggccaacatggtgaaaccctgtctctactaaaaatacaaaagaaattagctgggtgtggcggtgcacacctgtattcccagctactcgggaagctgaggcaggagaatcgcttgaacctgggaggcagaggttgcagtgagccaagatcataccactgcactccagccccagcaacagagtgagactccgtctcaaaaaaaaaaaaaaaaaaatccgttgaactattcagcctctacatacatcaggaactcaatcagttgtgatggtttgtcacagatgcccttgctggccttttttgccctggtccctgtgtctggagcctgtggccagggctggaggtatctgagcaaactgcatggctgttcccagctgctcagggccacagcctgcggtcagcctgacaaagcctcccaggacacacagcaaggaccccccaggacacaccgtcctctctaaagacactcacgggatgccttctgggggttcagggaagccagaaccgctgctccttgggcatggcaggaacctgtcgtcgcagtgcagggagcacagacacctccacgaaaacagcactcagaaaagcctgacccagggtcctagctcacagaggcccaccccgccgcactcctgctgtgctcatctttaccaggaaaatttaagtcactagatgccaccctgtgtcatcccagctccaaggggaggaacagaggagagacagagtcccaggcctgcagctctgattttagactaatgtttttccaaaaggtcccatccctcagctccgtcctcatgcaagtgtgggaagacgaagctggcagctctttctggcctggctctcagccctgtcttctccacgccagccctccgcccgagcccagtaggggcttcgttgccactgctcacccacaccacgccatggcaatggtgacctcacctgttttttgcccctgtcctgatggttctgttccctgcagctcccttggggctcacagcccatcggtatctccccactgggtgcaggataccgtggaaaataccccggggcctgcccccatgtgccctgccacccccgtccttgtctcctcccccacatctcccaaaataccaggctctctcttgcatccaagcttttgtggtcaccccagtttttctacctggcaagtcctttcacctgtgaagtcccaactccttgctgcctccctcatagaagcagaatccagcaggggcacacaggactggctacagtgcgagctcagtggttcactggctgccctgctgccctgcaccccgggcactctgcgcaggcctctattcgtcagggctttgtctgcacttagctcttcccttacaaagataggaagcagcgcgccagctgaatggacccacagagaagctgcgtggaaggaactgtgaatctgccagcacctaccggaacagcacaaaactcagagaaccggaagcagagagtgcaggaggcagaagtgatgagagcagcgggcgtccatggagctcagctgagccagaccaggagaggctgccacggagggagcctggttgtacccagttagagcagaaacagggctgagggctcggaccataagccctcagattctcactgttcctttcagctggtgactgactgtgtgaccgtgggcggtcacttaatcttgccggtaagggcctcagtttcctcatctgtagaatggcgttggaaaggcatggctgggaggtctcagataaagcagagtgctgtgtgaacgctctgggtttgcagacagagtggatgttcctagtgcattgcactcattttcctcgcccaacataagctcatgacttccgccatcgttcccaaacaagcaggaagcttcacactgatgcctgatccacaattcccaaagcgccctcagggccaccatttcttgcgagcctcgcagcatccacgagggggcagcacaggactaacatcgccccacggcctgacgggctgccggaagcaagtgcaataatggtgggggtggcccccaggagccccagctttgctccctccccctcccccaccctgtgcggaggactccggccttggggtagggggctgctgaactgggcgtggcatctagtcaggaactctctgccccccagccctagggctcagatcacacacacacacacacacacacacacacacacacacacacacacggggcccgcccctttcctaggagctgtccgttcccaggacaacagtcaacacagcacaggcgggagttcaaaacgaaactgggctcaaatgctctccccagcccggagagccctgtccccatcggccactctgagctcgaggcctaaagggacagtgaggaggaccctgcccaggctctcccggggttaggagggacagagtgttccaggaggaggtttgagctgagctcaggcacaggtctctctctctctctctctgacacaagcgcacacacacacacacacttgcaccatggggagccaccccacccctgggctccagagaaccacatcagctgggtaccgattgccccccaccaggccaccagcctcggtctccccagctgcccggggtggccctatggccagcaggggtcttgctggtggctgccaggccccccaggctctgaaggcgcagcgggtggctcagggagctgcctgcgatggcgtgcagcaggaccagctgtggcgggagctcctggaggccgagcggcggggccagcagcgctggtgagtacctgccctcccttttccaccctgactccgcagcctgactgcaagttggggaaggttttggagaaagggagatgggagggcaaatgatctggctgagggacagagggcatggcatgcccgggggaaggtgggtcaccagcccagcccagagccagacccgagcctgagcctaagaagcgaggaagatggaagccaagaccagatgccgctgggtcagagcagccccacctcgttcattccgactgcgacgcggccggtaatcccttgagctggagcctgctggcctagtctgggttagaggagctggctgtctgacctgactcggggaaaggatgctccttcatgcattcattcaaccaaaaatacccatgagccgctctgaaacgagaccagactgcaacaagggactagacagacctggccatggctccaccgagccttcatactcaggacagggcagccaaaaagcaagcagagaagcaaacaagtacaaatctgtatgaagtgtgaccagcggtaagaaggaaacagttcagggtcgggggcagagccggctgaaggcctctctgaggaggagaca

SEQ ID NO: 1880368 - DNA, 4001 bp, Homo sapiens
tttctctgtctataaagtaaggggaaaatacctcatctgagatttattgagagcatcacctgagataatccatgcagagcacctgaaatagtacctggcacacagtaagcattcaactgcatcacagatattattattattattattttgagatggagttttgctcttgttgcccaggctggagtgcaatggcacgatcttggctcaccgcaatctccgcctcccgggttcaagtgattctcctgcctcagcctcccaagtagctgggattacagccatgcaccaccgtgcccaactaatttttgtatttttagtagagacagggtttctccatgttgataggctggtctcgaactcccgtcctcaggtgatccacccgccttggcctcccaaaatgctgggattacaagcttgagccaccatgtccagctacaggtattattattacctcattcatctggggatggggagggcattggtgggtggagaggagctggttctcctttactccaaggctcctaccttctcttccctggatgttctcgcccctgctcccatgcaagtcctcacagacggcctctgaagccgcctttgttcctggtctggttccacaacgttcccatgcccacttgagctccctctactccaagtagactatttccaggatgagtacttcaagtacatcgaacagtgacctcaaatgcatttccttgactgtgcctctctgaactaaaaagtgcagaaatgtcattgcttccttcttttgtctggtcttccacagggctaggttgggatccggggggagagtagctttcctagctctcagcagctcaactccaccgaattagtgaacgatggacatgtccccaagaggactctaaacccacagtccccaacatggtgttctgcagcatgccacaggtcatcttgttctgtcctctctgagggtgaggttggagagggaccctaggctcacaggctcagtgacagtgactcaccaaagatcctgtgggcagtcagggtctgggccaggccagtgagcccattcatatggcatgagccacaacactgttcctcttcctccggcagcagcccgttttgcgtgtcccctcactatgagccgtgggagaaatttgaaagggcttggatcagagggcagggagaagagggtggtcctgacatctgacacatacttcattttaaacatgggctatgtatgacaggccttcagctagttattgaacaaagagaataagagcccttttacaagggctttacatatattcattcatttggtcctcacaacagcactgtgagttagaagtctcaatctcacccctttacagatcaggaaactgaggcagataatttatttgcctatggtcacaggactagtgagtgacagagcaggtggtttggtcttacagtctatgtgtttaaccactacaccaaaccacctccctaagatgctagagggggtttgtgccaatgcctggattctaagagattagattctctttaggatctctgacctgtttcctcagcattcagagataaggccagaaacaatgccatttgtgcacgaactgacaactgacggtcctcctacctcctatttctatttaaaaggcactgtaacttctttccacaggcagatccctacctctcctcccttaggggaggacgaaggtgtcccagccaaggaagatcctggtctccaagggctgtaccctactgatccggaggcaaagcagtgagggcccaccccaattcctcacctcccattctactcttcggcagaagcatctcagtgttggaaagataaggatttcttcctaaaaaggaaggattacactatatcagagtctgaagatacagttttcatttgcaacgcaagggaattcctttgaatctctaccttatgatttccctgcaaacccactccgatggggctggagagtgctctctcactcagatgaatctctcaggggttgtccagcaggtgtttgccaacttgaagagctacctactatcacagacctataaaagtacgcctgtggacagactgaaaacaaacaaacaaaacacacacacaaacacacaaaacaaccgcacactgggagaagttctaggcaatttccttgcaaataactgctttgaaaattactgttttaaattggcagaacactaaggactttgaacagatcatcccttttactcaatgttttcataaccttgaagtgaaggtggagggagcagtacgttttaaggtgccaggattacactacggggtcagtgctcccggatatgaactttctttttcagaccgaccttgggacctacagctttgtaagttactcatacaactccatcaaatgttacaggtaggtcagaggacattcaggttgtttaagcctctataaatgactcaggcagcaacaatttacaacgtctttgtttctgctatgcagtgccctcctgctagagatggcaaaaatgtggggagggcttcagagcattctaagcctggtatttctggctggaatttttaaatctcactacaatcctgacaagagaccacgaccttaatctcccacggcatgactggttagtcttgatcgtaagccatataatcaacacccaaatgtgcataacacatctaaataatgtcaaaactacactatataccacgcaggggaccagaaatcaatctttacctcaaaaggataagcttccaggatgcaataacatccccttccacccttttctacaccctaaaacagtaatattcacggtaacagcaaagcggaaatcagcttttcctgaacatgtactgaattctagtcacattcacacacgttaattcatttaattccagccacaaggtaggcagcctctgttaacattttacaattgtgagaacgcagagatctgggactggctcaaggtgacacactgcagcaaggagtcagaatttgaatccgaagcagtgtccttccccctcgcaacagctgcggcgttacaaacacaggtcagccacggagaaattaatgacccacagccatccttgcagctctgcgccataactggggagacaagctggttcccgtgactcttcagtctgttttcacccaagtgcatgactgcgggagcaaagcgaccacgtgagcatcccccccccacccccccgcttcccccaggcgagggacagtgccaggccaaggacaagtcacaggtgcaacaacgtgccagaactggatccggagccccagggcgcaagatctcccgcagcgtcacccggcagagggacgggtgtggccaccgggcgcggcaggtcctgcgtgcgctgaaagtgcggctggaggcgcggacggctttccggagccccgagagaggagctaggaatgactttggtcgcagcctctgtaaccccgcatgacggcctctagggggacagcgaggtccccctcgatctctggctgtaatcagccggcggggccagacggtgccgagactccagggcgaggccgcagggagggggctgtcccgccccacgtggaccggctccccgctgggggcgtggccgccgaagcgggccgggccaatgagcgccaccgtcgggctcacccggctgggcacgccgggccgaggagggctgcgtcatgccgggggcggggcttcggggccggcgcgaggcgcggcggggtcacgcgggtcgctgcgcgggctataagtaggggccggcggggtgctccgctggagtgatggctgccggcgctctctgcgtggttcttcttctcggccgctgaaacccccgcggctgcttcctgggaaggtcgtgagtcccgctgagctgtccccggtgccgccgacccgggccgtgtgcccgtggctccagccgctgtcgcctcgatctcctcgtctcccgctccgccctcccttttccctggtgagtagtggcgccgcctcgtaaaggctctttcttctccccggggccgggc

SEQ ID NO: 1880369 - DNA, 4001 bp, Homo sapiens
tggagtgtcggcgtccccagccctctctctgaactgggtgctggatgtagcttgcttcctgtttcatggtctcggtcctgttctggggtcctgatcctgttccgtgatcccggtcttctacctaaaacgttttatgctaaaagctttccaggcatagatccgtagaaattgaggctcacaacagtgccccaggcggacttgggccaggacactctttcagagagggtttttggctgtctaacccattaataggtaaaaaaggaaaaaaaaggagagaagtaggtatttaggagaaggggtagggcttagcacccagcatcacccccactgtttcagccgcctccccttgaagggttcagttccaaatggcagttttactgcagagaaaacaagcttgggaagggagtgtggacttgacctcggtcacacagcaagataacagcagaaaccaggaaagatccatggtcatccaaagccaggtccctgctccaagggaagaaccaaggagaacccagagcctgcctaagacgggaggcccaggaaatcacagccctttgcaaacccccaatgcctgctattcaaacacaccttctggcctctccatcatgcccgacctgggacaagagaatcggctcatcccagaaggatacttggcatagccatgcacccctgtcctgcctctgcgacagcagccgctgcaagcatagatgggaaccagtttggtagctcctcgctggctctaggtgcctgcagcgttgcacacggttggcaaagggtcggagccagctgcctttcccttgcttcctgccgttttggcattggcagctgtccacgtgctttgtccgggtgtttgggtcttttcccagcatcactgtggagcctacagaatccactgggacaggctgcaggtgggacccagagagcgagaggcagacggcctttgcatagccaccctgggagaagtagatggagaactctgtacagagcctgtgcctgggctcctgctctcggggcaggaggaccagccgacctgtggagaggggagttgtctttgcttccatctgggccatgacagccaaggccaggaaggtgtccgcgcctgggacctgagagcctcggggtgtttggcccttggggtttgcattccagggcttacagcgaggagccagggagctgagattcaaacccagccagtgctggtgaggagcggcatggaggggagtcgaggcgagctctgcatgctgactccagagcaaagccttccctttgagcgcggctgaaacatttgctgcactccaagccatggagcagttggggctgagagaaacggggacagtttgggctctgtttttgctgaatgttgtctctccttcggttgtctcacagctgaggttcacagcacgtgtcatgctgtgttcctggaagaagcagaaagccactgttggaaacgtaatttgggtctcagtttcctcagctataaaatagggattagaaacctcaattctacctttcttgtgggtctttgtgacaacgagtaagataatctacatgaaaacattttgtatgggatctgatgattgattttgaataaaataatcagataatgtgcaacatgctttgacacaggttcttgcgcctctacttcccaggcccctcagtggcgcccacctttgttgtagcccggcgtgcgggggaaccgcccagcaaaccttcgcagagcctcctgggacccgagtgtcagctgaggctgggacctgtggaggacggggccttccatgtagaagaaagtctgaaggaggaagggaaatggcaccatgctcctcccaggtacacagaagacgctttgcggagctgaacgtgcagtgaataacataatcaatgaattccacagtcaatgagcaaaatactctacacaaaccttatttgcactatgcacgtaaggcacaatctgcctgtcctcaccacgtacttcactcagcttcggggtgacagcttggaatgaacagatgacatcacaccgctgccctggtaacacaatgctgagggcttcttttgtgtttgtttttagccatttgattaattgtgaggcgtcaggactagtgcgtataggatgagcctgggcccaccctcctcaggagctgggccagacggccctccccgacatctcccaaggacctgaccactgtaccctgaacttttccccttcacacatacctattcccacccattcagtaaagacattcaaggaaaatgttttctctgcacataccccaactcccaaatgttctttcatttctgtttcaaaacagtgagcatgctgttaacagaagcttagctaagccactgcactccatcctcaggtctccagtgagggaaagtcaggtttcaggtgcggaagagaaagggcacacatagtctcccctgcctcccagaccctcaggagcccccaccttcctgtggccccttgtttggggaacagcccagctaaccttcccagagcctcctaggagccaggtgaggctgaggcggggactcacagaagacaaggccctccacgcggatgaaagcctgaaccaggagtgggatggcagagtgctccttgcaggtgctcagaaggggctttcacagaggaacgtctgtttctcgggctttccgggagcggggtccagctaagctcaaggccaaggaacttcacagaacaaaactgcccccatcctgccctcaggaaggatcaaggccttatgccgggggccacagtgtggggcgtctcagccctggctggatttgggggaggtgacaggggccgtgaaaggacagccacatgtcctgtcgtttcccaggctctgcatggctgggcgtgcagggtggccagaggctgccaccttgcgtaggtaggagccaggggcggggcacagaggagggtgagactgcttgaggtgggaaatgggggagcaggtgatcaccaagaggggacgtgaagaggagggggagcagaccagtctggctgtggcggggggaggcgatggcgccagcctccgtgagccaccaggcaggtgaggcctctaggtgaagtgttcaggaggcatttggaggtttggatgtggccttgaatggatgtcctgtgggaagggaggtgcatttggggagccggggcaaggtttccaggcaggtactctggagcaagggctgcagtggcacggccgcctaggcagcaggatgctggagcagagggagacacagagtggcctgggagaatcgctgcatgaacccaacatggagggcgggagcaggtggcctgagttgagatgcaggcagcacctggcaggtgtggtcagtggtgaaggagtgtggagccccaggctctgtgtggggtgcaggattgggagcagctgcaggggaggggaggagacagatgcagagctctgtaaccccaaggagagcagaggggtctctgcaaagtccagagggtacaggggagatgggggccatgggggacagctggtggcctggaagcaggagcgtgtgggatgacctctcgtgctggcagagctggtggatggggtgcagcaggaggctaagttgcacaaggtaggaagcctggcaggagggcccatctctggtggggggtctacaggcccgcggggctggaagcaacaggtttcccagttgtgctgccaagttcccactcaggaacgtctgagtagaacgttctccacaccacagaggggcaccgctagctggacacatgcctcctcctggggtcccaaggtgtttaaagcctcacgtttctaagggagtcctgcagcaagtgcttcatggacagtgcacagagctgtccaatgcagtctccatggcccccatcacctgggaaggccttcaggggaggtgagaatagctctgggttggggaagaaacaagaagggggctcagccagcatgaaccctgggactctagctgggaccagctgcctttcttcagggaggccttctgcagagctgcca

SEQ ID NO: 1880370 - DNA, 4001 bp, Homo sapiens
ccttgtaacgacactggaaaatacctggcagggtcctcagcgtgaatttcatcatgtaagtgaaagtttttcattaaagtatgttatcccattttaagcatagttttccttagccttatccctgttttcaaggtctgtactattttacaaacaggtatgttttttttgttgttaaactagacttagtggggaaatgcagaaaaagaaaatgaggaagattatttaatatgtggattcttataaaagaaattcttgcagcaaaaatgaaagtgtctacaggccatgccatggacattatacaaataaataaggaagccatttggatggtttacatgacaattgtctaagttcctccttgttccaccaaagtttctaaatcagtttaaagtctttttacaaaattctgtaacttgaaagatgatacatattctgatacatattattcaataatatcaaaaatgtgatttttgttgaaaattaattatacaggttttggaggttgctttgatactttttagtactctagaatagcatttttgacacatctttccatacttcaaatgatattcatgatctaaaggaattaaaacatcttaaaataataagaaaataatttccctcttcaagttcaggacctcataactttggtctcttttaaataccataactaaaaatagatgaggccctcatgaattcattcaacaaatatttaatgagggtctttttctgacaggtaatgttccctgtgtgagggataccaaccactgttccctgtgtgagggataccaaccacagtggtctaactctgagacacgcgttaaactttagagtttaagctaaaagtgctctggtgcaaataatggtgctctccctcaataaatccactggcttgttcgccaggatcattcgttggcctaatcatcttaacctagagagagctcaggcttcgtagctagctcaggtttgcaggcaggttttcatatcatgtccatcatctcatcactgaaaattcataaaaattctgtcattaggtttttctagatattaataacattgttgtaataaagcaacccagacctctcgtttctatgtaaacaaaaaattgctttacacaaggggtgtgggcgtcttctggttttcatttgttttcagtgtgtttatgcagcttaattgtctcatcaggcactttcccaacataattatgctttttaacaaatggtgtttatggcaacccctaacagtgcaaaagaaaggattagtttcatcctctcattccacattttgattccctgtggacagctaaatcacacaaagatggtgttagaaaaattcaccttcacagcgaagctgaaatgagcggcagtaccaggctcagaaagtgacccaaacgcaagccccccaaaacactctgtgtttgggacagggagatcctagtcctcccagctcatccttcaattaccattggatgacctctggtgatagattaaacactcggccgtcccccgcccccgcgcctccccacccgcggagaacctagcctagcaagtgcaaagtgcagcagttcacctgccccctgcgcacgcaccccaccggcacttggaggccgcaaggacgctcgccaggctgccgcaacgcgtgctggggccagaaccccgctgctgggattccctgcgcggtgccgactaggttcctgggtggagtgtcccaggaccacgtgggctgaaagggaacccgaagtgactcccggcctccccacaggtctcgcgggacgcagcagcggcgagggcgcggggttgtggcgcctgggagcgaggggcagccggcggctgcgctgccccggccgagctctcgaaccagcggccgcgcctgccgctctgcggtttgggaggggagcggacctgcgagcgccgaagggcggtggggcagggcgaccgcccagcccaagtcgccgccgcgcgtggcccgcgcgcagcctccgccgccgcgcgtggcccgcgcgcagcgtctgccgccggctccgcctcccggacgcccggagcgcgccccaccccagccgcacaccgaccgggctggctctgcctctccctccctgacccggcaccacgtgcctggcgtccttgaacgcttcagatttttatcagtgttgccttttcgtttgctcttccgtatcgccagaccctccacaattctctagtcaattaatgactttaaaggggcattggcatctaatgatcaggtctttgcctattgatcatgcaccagcagggggctcttctctcgtttccttggaagggacacacgcactcacacacacccttctggtaaatcccctcctggaggattagtgccccccgtgactgtgaactggacccaccccgggacaaaagcagtccttgcgcatacccatttagtcaaagttacaacgaatatgaatcaggcttccgcatttcctttttttctaggccactcaaccttgaaaacacatttcgcttccaaaaaatcaggacctgcttttttttttttcgtgtagcaaggattaaatgtcaccattttgatccaattttgttcctgtagtgaaataatcactaaataactactttgacggaataaattaatttttaaatctattttttattttctaattataatttttaaacacagatttgaggaaattaacatttatgtggacatttggtttctagcctaatgtggcataaaaataagtaacataatgagtgttaaaaaaaatcaggttcatgatgcttctcacatcatcatcattgtacttagatgtcacaacagtattatgtgcgattatgtcagatccagccttctccatctcggagtgttggcaggtaggagggttgttggcaagaggaggggtgttaacctcaggatcctggatccattccaaggctggtaattacattctgccagccaaaattcatcccataattttaattggataaatcctttctggcctaagctactgctatgcctgtcaaactgttgccacatttcaccccagaggtgtctgtgttttagttgcaagaatcagtccctttgaggttggcttatctgtttaaatcctcaaaatgcactgggatcctatggaattaaatatatatttaggtatttttttctactaaatctgcatagaagtgcataaagtagatacatacccatgttattacctaaagaccaatacctatctaatgtcagcattcactagataattttgagagctttttaatcagaccaatattcctaactttcttcatcttctcttttgagagcttttttggcctctagctttagcttccgttttccaaaaaaagtaatgtggtgtccaaatgttccttccatggtagggcaaagaaccagaatcccctgtatttcacctttccaaacaatcggataatgatactacttgccaaatgagacagcgtaataacattacatctaatcttataatatttctccagagaaaacagtgtgacacctgggggcttcatggttctagctgtagaaactgccagaaggaaagcttttccccccacagctcctaatcctctctttctcccgagagactgttccttacggagctacaggctatgggggcattaagtaagataacatttctgaaagcatccctttctccactctactcacttcaaacccaaatggagagaaagcagggccccagtgttctttgtggggggcagcatccggcccctgcctgaggagggtaagcatgtatttttggaaaatacaaggagacacataccaacctgtcccatgagaagtttagcgatacgattgaaagtattattttgttctcttcaagaatggaaagttaccatcggttactttaggtgtaccgcatgtactcctgcccatttcactacataaaagagctttatgtcacatttctgtgtgcatcttaagtctctcatttttatttaacttagcattctttggagggagtcttcctacttttt

SEQ ID NO: 1880371 - DNA, 4001 bp, Homo sapiens
tggatgtatactttgtgaatattttctcccattctataggttgtttacccccttgatagtttctcttgctgcatgtcacttttcttgaaagatctcttggattctgtgtagttctatacctctgactgcctgtttctacaggatgttctttttttctttcttttttttttttttgagacagagtctagctctgttgccagggtggagtgcagtggcgcgatctcggctcatcacaacctctgcctctcgggttcaagcaattctcctgcctcagcctcctgagtagctgggataacaggcacgcgccgccacgcccagctaatttttgtatttttagtagagacggggtttcaccatgttggccaggatggtctcgatctcctggacctcgtgatctgcccaccttggcctcccaaagtgctgggattacgggtgtgagccactgcacccggccaggatgttctttctctctatacctcaaacttaacacatgtaatcaggaaatcagcagtctgcaaaaaaaaaaaaatcaagagcttcccctacaggtcttatttctgtaaatggaatcttaactctcccagacaacacttaataccagagtcatgcttaacttcctggctgtcttccaccatccatcactgagtcctgcatgcagtccttcatcatgttgttgttcctggattactttgttttgttggtttgttttgttttttttttttttttttttttttgagagagagaatgtctccctgtcacccaggctggagtacagtggcatgatctcagcttactacaacctccgcagcccaggttcaagtgattctcatgcctcagcctcccaagtagccgggattacaggtgtgtgccaccatgactggctagtttttatatttttagtagacacggggtttcaccatgttgcccaggctggtctcaaactcccgacctcaggtgatcctcccgcctcagcctcccaaagtgctgagatttaggcatgagccactacgccagcccacagtacattttttttttggggggggggagggtaccaaatttatttatttgaaggaatggtacaaatcaaagaacttaagtgggtgtcttggaacaacttatagaaaaggtaaaggaaaccccaacatacatgcgctgccttggtgacaaggtaagtcaccctatggctatggggaaattagcctgaggcttagctttcattatcactgtctcccagggtgtgcttgtcaaagaggtattctgccacgccagattcgggcgctcccatctcgtgcatgttggtcacgtggtcacccaattctttgatggccttcacttgttcattcaggtaatgtgtctcaatgaagtcacacaaatgggggtcatttttgtcagtggccagtttgtgcagttccagtagtgactgattcacatttttttccaaatgtaatgcaaaatgcacaattttttccaaatgtaatccatcgcattcagcccgctctcccatcgcattctccccgcacagtctggtttcttgatatcctgaaggaagattcggccacctcgttggttctacagcttcatcaatttctcagcatgttccctctcctcatgagattggtgaagaaagtatttggcaaagttcttcaaagccacatcatcgctgtcaaagtagtaagccacgcacaggtaaatggaggaggcgtagagctccaggttgatctggcggttgatggcggcctctgagtcttggtggtagttctggcgcacctgcgaggtagacgcggtcgtcatgccggcgactaaggagaggcggcggcagcggcagtggtggctacgcggcgctggagctgcggcgggggccttggggcagtccgagggcatggtgaagaggtgacggagggctggctatgggcggccggccggggtgcaggacgagcgccgggttccgtccaagcactgttgaagcaggaaaccccgaccactctcggcgaagaacgtctcaacttttaattatcatatttttttctgagaaagagtctcactctgtcgccaggctggagtgcagtggcgcaatcttggctccccgcaacctccatctcccgggttcaagcaattctcctgcctcagcctcccgagtagctgggagtacaggtgcgtgccaccacacccagctaattttttatttttatttatttatttttttagagacagagtctcactctgtcgtccaggctggactgaagcggcgcaatctcggctcacttcaagctccgccttccgggttcacgccattctcccgtctcaaaactcctgagtacctgggactacaggtgcctgccaagacgctcggctgatttttgtatttttagcagagacggggtttcaccgtgttagccaggatggtctcaatctcctgacctcgtgatccacctgcctcggcctcccaaagtgctgggattacaggcatgagccaccgcgcccggcctaattttttatttttagcagagatggggtttcaccatattggtcaggctggtctcgaactcctgacctcaggtgatccgcctgcctcggcctcccaaagtgctgggattacaggtgtgagccaccgcacccaccaacagtaaactttagtaataaaaattagtaaacttttcctttctggagtagtaatttttaaaaaataatcactatttcatcttaccatatgctttcatcttcaggaaacacactataatggctttaagctgtttcttagttcataagtgatagctcagaagcatctgaattattttccctgaatttcactacctggcctagtgcctacataggctaaatcatttctgatcattcacatgctcaagatcttcttgtggctgggcacggtgacccccctgtaatcccaccactttgggaggccgaggcaggcggatctctaggtcaagagattgagaccatcctggccaacatggtgaaaccccatctctactaaaaatacaaaaaaattagccaggagtggtggcacgcgcctgtagtcccagctacttgggaggctaaggcagaagaatcacttgaacccgggaggcggaccaggaggcggaggttgcagtgagccgagatcgtgccactgcactcccgcctggtgacagagtgagactctgtcttaaaaaaaaaaaaaaaaaaaaaaagatattcttgcaactggaatgatatttcattttccaggagtttgacacaatttaggaggtttttcctgcacacaatggccacccatttccaattaaacattcataaaaacaccacaaccacccacctcactacctcatacccattagaataggaactattaaaaataataataataaaaataaaaccaggcacagtggctcacgcctgtaatcccaacactttgggaggccaaggcgggtggatcacttggggtcaggagtttgagatcagcctgaccaacatggtgaaaccccgtttctactaaaaatacaaaaaattagctgggcgtggtggtgcatgcctgtaatcccagctacttgggaggctgagacaggagaatcactacttgaatctgggaggcagaggttacaatgagccaagaccgtgccattgcactcctgcctgggtgacagagtgagactctgtctcaaaaaaaaaaaaaaaaagaaagaaagaaagaaagaaaaacttaattctagcaccttgggaggctgaggggagcagatcacttgaggtcaggagttcgggaccagcctggccaacatggcaaaaccccatgtctactaaaaatacaaaaataactgggtgtggtggtacacctgtaatcccagcttctcaggaggctggggcatgagaatcacttgaacctgggaggcggaggttgcagtgagctgagatcatgccgctgcactccagcctgggcaatagagtgagactctgtctcaaaaacacaaaacaaaacaaacaaacaaaactggttgggcatgttggct

SEQ ID NO: 1880372 - DNA, 4001 bp, Homo sapiens
gtttctttccaagagtagttcttacatttcccacaatgcaagaaagaagagtccagtgtcagagatagattctgatatctgggttttgttctctggactgtggtcagtcttggctggaggaggtagtcctggtgtctctggtaccctggataggctcaaaacctcctgcacagatcatcttctggggctgagttttcagggctacagagccttaaggaatgtattcatatctcatgtcccaccttctggcagatccctgcagtcctctaatgggttttgggcaatcaatcccagggccatggttgagaaatttttgatggatagactgtggtgcgccaattgagggagtccctacccagtaatagctgtacctattagctgcagcagtgcctgaaactctcacaacactgtggaattcaggttgagtcaacagaacccttgtcaaagtagcagtgctgccagagaggggtaacacaggagtgactttcaatcttcatttaatgccttagcacacatgcagagcattctgactctcagagtggaaggtacttcctaggaagtcaaatgatcaggttaaagtagatcagttgcccagagagaaattgagggagaagaacacaggtagggataggtatgttttgaagggatagaaggagtcacggaagccaaagtatgaggttctgctcatgtgggcaacagagaagagttgccttgtttagcaaaagtgtagagaatgagggccctgggcattaggggttgggaaacagggggcacctggggtaagggtaaaaaatatgtaagggtcaccaaagtttatccttcacagttttgcctcagatcatcccttaccttgatctgccctgaccacatttgtccatccattttgcaaatgtgacaccccaatttttcatcctttttttttaatgcttaaaggcaattgtattcagttcctttccatgcagcacacaataaggttatctatgtgcttatttcttttccaaatcaacagttcgggacaacatttcaggatccactcatcctccacggtcagctatcttgcaatgtgttcttgtaagtgtcttgcataggggtagagggaccttcttgatgacctacagactgactaagtagggggcgtactggaagaagagctaaggactattgtctcttctgctgccatcaagctcatggtgccacgttaacttgtgccaacagatgcttatagaagccagtcaggctcatggtgccacattaacttgtaccaacggatgcttatagaagccactcggatttgccacagcagggaggaaggcatgggagaagaggaggagggactcaatgtcctgtgatggagtgtagaggctgctgactggaaaaaaccaggaacaatgaaaatgaggtatcttctttaggatgccatgccaagcagaaagcctccgaaaaatcccccagtcactagaacatttttcttcacaaatgacaccacctcctcagctttgctcctgacctggttaggtatctgagtgctcttagggatcttcagctgctctttggctttcttcatgtccttctccactcgttgccaatcaactttgatgtacccagaatggtttgcaagctgaaggagaaaaaatccacctcccacagctgttgcagccaactttccaaccttctggaatataaaacccgtgcaccatccagtgacacctccaatgaacaggtgggttgccacgctatacttttcggctgagagtccagattctggcccaaacagcttacgccaccacggctgctgcttagcaaattctgcaaggtccactgactcaatatctccctcaaagtttccttgactggacgcggccatttcggtgagctagtcttgcgaggacacacgcaggggatctgcgaggttacgctgcggagtggcgcgctgtcgtggccaccacccggcttcctgcacgtggggcagatgtttccattcccaccgcggccgcggaagagggcgggcctgacgtgctgcgaccgcttcctgtctccgcaagcggctgtgtcacaaagttcagcgggcggcatcacaagccccgtagccccgcccaacagatgccatcctggttttttgttttttttagaagcagtgtggaatggtggaaagagcaatggaccacatgtccaaggagaagacctgagtctgttttctcatctatagaataagaaaaatacagtattattgtgaggatccaataaaattatgtgtgtgaaatattttgtaaattgcaaaactcctaggcaaatgtccaggtgaattatctttgaaaacacttcccttcacaccgtcgacagtctccccttttgagactcaaagatttttgtagtatatttggggaaacctgtagcctctctgcattttgcaaaacctgagtgagaaattacttcaccaggcctagcatttactttttctcttggacttacctgaaaagagctgtccgaagtgtcatctgtgggaaggtaaagagaagaggggaatatgctttgggaggcagatggggctgggctgacgacccttcaaacatgaaaaagctgtgctgcctgggaccttttgtgtggtgctttctcagcctgcaacaaaaagccattcccaatttgtagggtgtggaatggcaggggttgttgcctgggaaccctctgcaaatgttaaacccattatcgggctgaggaaggcatggttctaattgaacttttcctcccaccttctgttctgcagccataacaggactgcttgtgctattgtggcctttttaccagggctggactggaaaaaaaaacaaattttatccaatgcaatatatgaacaggaattaagtctgaacttttgaagtatatagtttttatgtcctggtatcttcttgctgctggaatttcttgtgctcatcttaaggataacatgacaacaagtcttcatctaagtaaaaaggaaaataaaagcgagaaaggcagagagagaaatgggcagaaactttgatgggtagatctcactttccttgtaactttataaatgagttccagttctctttcatcttaaaggctgcccccttcagcccctgcaaaacccttttttgacactgaattgtttccttcttcttatggttaagctgttcaaaaataatctctgttcatcatctccacctctttactgcacataacttgcccacctactctgtctgccttctgccttgcccagttcactggccttgccctcctgatatcacaattgatctctcagttttaatccttttcctccctctggccccacttctgctactttatttcaggccactgtcgtctcatggctgaattacttcaacagctttctaatgggtcctcttgtctcctatcttgcccctcgctaatccattttttttactgctgccaaagggatgctcaaaggcacttcaaggcttgtcaggatgctccaaatcccccatcctggcttactaagccatttgaagtggccagtgcccacctgtggtcttatggcctgcccagcccttctggtgttctgccctccagccatactgatctgtttgcaatttccctaaggagctctgctgttgctcttctcaggatctttacactgattgccttctctgtcacaaatgccctctgcctttgctggactgattcctattcatctttccagcatcagcacagcctcccttgtctcctggaagccctctcgagtcctgggagtcttgatcttgggtccttcccatgttcccttccagcatgatatgttttccacattctttcccactgtctttttctcttctcttgaccatctccctttctagagactggacacctgaaggcctcagaggcagggactaacattagggttcatgcataagtgatatattaaggaagggctcccatggagcctggtaaggagtggaggtgcaggacagtggaagggaggaaacccagcaagagggtgtcctcaggca

SEQ ID NO: 1880373 - DNA, 4001 bp, Homo sapiens
caggaaaaaaaagtctgaaaaggctcagtacaaacacaaccatccatttaaaaaaaaaaaatttcgatccatagttggttgaattcacgaacacagaacccatggaaacagaaggtccactatgtattgaaattaggatgctcaaaactacccagagggaaggctattaggttaaaaaatgcccccctcccaaaagatattcacatcttaatgtgaacgtgggtgttagcttatgtggaaaaaaaaaagaaaaagaaaagaaaaaaagaaaagaaaatgtttgcgaatgtgattaagttaaaaattttgatccagaagcttatcctggatgatcggcatggacccttatgtatccttataagacagaggcagacgcagatggcacacaaacagaagagaggagtgggggagaccccctcagcagacagagagccatttaaagatcctttacttctggccaagaagatggaagaaggggccatgagaccaaaatacaggcggccactactcaccggaacaggaatgcaaggctgctcttgacgctggaaaagccaaagctagggattttcctccggtgtcttcagaaggaggcttagcccagagaagcagaccaggtttctggactctagaactgcaacagaatacatttgtaattttttttaagctaccaaattactggtaattttttcaggagtcctaggaaatgaacactataaaacatccccagaatgctggaaatgtggagctggagccgagaagagaagctgaggttaaagaaacagtggaaggtgtggagttggagagagctgtggcaagtggcctgcaggaatagagaggagagaagaaaaaaagaaaaagctttacatgctgtccacattagggatcagcagaatacaaaagagagcccagcaaaggagacaagaagtagatgttggagacaagaggaaaagacaagaggaaggtgagattttaatgaagggtgagattatcaaggtttaaaaacaaaacaaaggaaaaaaccagaaaaacttttaaagaattccagacagggaaaatggagcagtgtacattcctaggagaggtaacacagtacccttcctaatagctaaagctagtgagaccatctccacttttgggaagaaccaatgcccaatcactactgcctggatgtgagcaacagcctcaaagggctacagagcactctgctccttttagttgccaaatatcagaacgcttgatacagattcatcaacacaagaagagaaatttttaagtaaaattcttgctatgctggcaatcaatatttagtgaatctgagctcactttcagtgtgtttataaaagtggaatttgtaaaatgaaacagattcagtacacctaaatgtttttccttatttattccctaactgttccaggttaaatttttcactctataaatttttggaatgtgcaacagccaactttatatctagctaaaggtaatccaaaaatgacatatatatgtaatttgttttaaacaaggaatttgtgtttttttaatctgtgaacatattactatgatgatggttagggtacccaaactggcatcccaaatctcagaatagatattataagatgaaacaacattgatgttagctcatggctgggttcctgtgagcactgagccctaagtttaaatctctctgatccttgatggaaactctataagctctaagctcagtccacctctagaccttagaggataaaggagttgattcagaaccatgcaaaacacccactgcaaaatgtcaagttctaagagagaaaatcttgtaataaatgtatcaaatatgtgggaactcacagggtctctggctgcggtgatttcactgataatctggagcaggctacagggcaacagaacagctgatgggcaggctattgagaggtgaagccagctggactttctggttcgagtggggacttggataacttttctgtctagctaaaggattgtaaacgcaccaatcagcactctgtgtttagctaaaggattgtaaacgcaccaatcagcactctgtaaaaacgtaccaatcagcactctgtaaaaacgtaccaatcagcactctgtaaaaaggaccaatcagtgctctgtaaaatggaccaatcagccagatgtgggtggggccaaataagggaataaaagtttgccatctgagccagcagcggcaacccgttgggtccgtttccatgctgtggaagctttcttctttcactcttcacaataaatcttgctgctgctcactccttgggtctgcactacctttatgagctggaacacttaccacgatggtctgtggttttgctcctaaaataagggagactacgaacccactggaaggaagaaactgtggacacatctgaaggaacaaactctggacacaccatctttaagaactgtaacactcactgctagggtctgcggcttcattcttgaagtcagcgagaccaagaacccactggaaggaaccaattctggacacaccacggctatcagactgttctcagcctggggtgggtatgaagtgcattccgcattttccttcacaggagttcctagagtatttttcttccagctcagactgagatcctggcttgcatatagtcttaagaagtaaggaaaagaataagggattctacgtgacagaataaaattagtgattaggaagtaaccaggactgctggctaagcagtgatgtttatgtaagtaggaggtagctgtactggttgttctgtttgtctttctgcctctctgttcttgactctgttctccctgctctgtgccctgtgagactgaacccgctctaccttgtcacccaggctctcctgctaattggtgactggggatcagggggcaggagaaaagtgggcatgagaagcagggggcgccttccccgcaagtcctctgcattgagtctgtctcttcctgcagctgggccttccttgactacagccgctgctgggcagaacttactctgagcttcggttcccactgggctccaggggcactgtcctcacctcccagtgcttcagcccaacggacattaattgctggcctccggttcctcaacatcctttgtttcttcctgaacctacacacacttctataactagaggtttcattagcttcttttcattttagccctctaggatgaattctatgtaccgctaggcacagatgatctcatggatcaaggggtactattcagtctccatcctcaagcagcccagcaaagagaactttggaattcccacaacaatgttccttcttccctaactcctaaaaggaagatattctttcatgcttaagcaaagttactcctagctatgtgatgaaagaggagagagaaagggaataagttagggagggaagaaaatttctggtttgcagtttgacttgtgaagcaaaatactttgaaacagtacagggtatggtaggagtgagtgggcaaaggaatgtttttaaggctttttgtagactctgaagctagacactctacatgaatttttagaaaaccacacgagttttcgcttatttatgttgttgatttgtttcttttttgaaccatgcttatattacatgggttctgaatagataagggtttcgtttgggataatgacatctttctccctctatagaagcaaagatttttctgaataaaattaggttcctcaaagcccctccctcatcaactctctatccagaagtcctcaaagaaaagattctatatttgttgtggctgtagcaacttacatgtccttatcataaccctttccaaatgaagcatatgatggtgcagtggatctgctctattctagggtagttcatgggctttgaatgccaagcttgcagtaccgatttagcaggaatgccatgacatttagctgacaaaagctgaagaaattcacatcattagtcatctcttccagcatcaccttaggtttaatttcagtctcatccat

SEQ ID NO: 1880374 - DNA, 4001 bp, Homo sapiens
gattctttcatttgggaatttagcataagggtgtcatacgctctacattacaatgtttggagtttttgccttactcatgcattacttttataatcagaaaaattgtttaaaggtattatcgtaaaaacaaacaaaaaaaagattgagtttaatttccctccccttggaacatgaggcaggtttagtgacttgcttctaatgaattctatctaataccaatgtgcagaagtgacactgtgtgactttcaagcatagactgaaaaagtgttccaactttatgttctgtcttgggacgctcacccttggaacccagccaccatgctgtgaggaagcccaagcaacccacatggagagtccacacactgaagtccatgtggagaggaaccgagacccccagccaacagccagcattcaccaccaggcatgtgacgcagcaagccttcagtgatctcagtccccaaactttgagtctcatagctaaggcctcagacatcatggagcaaaaataagccatcccccatgtgccctgaacaagaggtgggggcagaggggacagtggaaggagcatggacatagaaagatctgggttcaaatcctgtgtctgcctcatattagttttggtaccttacataagtcacttacttctaaaccttggtttcctcatctcttatgaactgagatgttgcagagctcagagcaaggtccccagcataaagtctgagacatagtaggtgcttaataaagtataagtgagctcatctgacagcccatccaatcttcagacagttttaattgttagaaatgctttcttctgtatggatgaagtgaattctgcctgcctggaatgcccaccacagactcagtctttccctggcaaggagggacgggggaggaccacctctcctccctcagcagccttcagacaccactccttcctgcctccaccctctgcctggtccctttcctactccccaccaggaggcttctgaagatgcagagggcccgtgtgttgctggtgagcctggacacattgaaagccttgtttgcatgataactcctctttgagtcagttcagctgcttccgtcaatacagccctcagataagatgctgtaactcagaatgtctggctcaaaagcaaactgctacaactgaatcatacatgctgcgttaaagtccacccgcttctctcccatgcctggccttgccactgcgcaaacagaagccgaagggaaaggtccaattattccatggagatttagctactgtattgacaaaactcagcgttaattcccagaaagcattcaagccccgaggtgggggtgggggcggagggaggcagggagagaggaagagctggctatataactgggtgagagtcatagccgcttttcagctgagtctgacctagtttaatgaaatcaggtcatctgtgagctcttcattaccctcagactaaacaggacccaacagagcagccaatgtccctggcctttcagaattctgctcattcgcattatgacattttgatgttgggtcttaatgcatgttgacttagtggcctggcccctccaaaggtagtaaacagcctgggtaaaggctgggaagtaaacaagagggctgatttaaaaaccacacacataaaggcagtgtaaataccccaggtccctagcctgcatcctcagggaaaccagcagacaaaaggcgtggagtgtccgcgaccattatggctgacggatggatggaactcacctattatcctcctgccttctcacatggaactcgcagcctcagcagatcttcagggcagggggcgggattggaaggaaatgaaattgtcaatttagggacagtatggaagattcaagggcaaattgctccccagcaacaattgtagaggacagggacagttaacccccttgagactgtcctatgcgctggtgatggctttatttgatctgctgcccagtctgcattgtcctgaaaccaaagcctgtggtcagggaggctgaaaatgatccttcttctcccggtggatgctcattaattgaacgaattttacggaagtagatgatatctgtgggttccctgctcctatcagacagccagactaccaggctcagaaagggcagagtaccgtatcagtgctaaacaccgtgtaggtgcttcagtgcataggtgtctcaaggactctatttggcgtgtgctggtggtagaagcagtatttttaactcaagataaatttaccaatgggcccaggctggtgagggctgagaatcacaggaggcaggagggaattcttatgtacactgactgctctttgcagtccttagacaggtgtggggtctagagtctcacaagctgatgaatttggtctgggtttaactaatggtgtgttggcttctgcctctcaagcaatggcacaaggtcgaaaaattccctcaccttcccttctcaaaaaaacctccttgccagttacctaatttaagtacccagtccctgttcagagatatgtgaggactgcacaagtgtggactgggaggaataaaacattaattgtgggtgaccacaggcaagaggtgtcccttctataggttttagtttttccatgtgtaagataaggaggtttaatcacataatctctaagggctttctaggaagggcattctaattctaaggcgaatgcgattcatcttgaagcgaatctctgcctcccccaccccaggtagcagacgtgccctaaccaagccatttctctgggcctccgagggatccactgctgaccttgacttccttaatcccaggctccgacactgatctgctcactctcaaccctctcatctgataccagcatttggcctacatctattgtttcctttaatgattagtaaacatggttgaacagagcagaaaaccagtttccttcccaagggcaagggactacaagctggtctcttctgtccctctcctcagccaagggaacaaagtctgacatccagactttgattctccgtggagggaagcaggaccccgacagcagaatgacagctaagactctactttagcctgtctctactatctaatcaggaaaatggcaggatccagcctgtctctactatctaatcaagaaaatggcaggatccagtttcccattgtgttggcattgataatatgtattgagtgacagtgtctgcagtgagactattgatttgaaagacagtttaagaattgactagtattcataatcccagcactttgggaggctgaggtgggcagatcactttagctcagtagttcaagaccagcctgggcaacatggcaaaatgcccatctctacaaaaaaatacaaaaattagccaggcgtggtggcatgtacctgtagtcccaactactcaggaggctgaggtaggaggatcgcttgagcccaggaggcagaggttgcagtgagcagagatcatgccactacactccagccttggttacagagccagaccctgtctcagaaaagtaaataaataaaataaataaaataataaaaaaagaattgaccaggattccagggcttagaattccagaatggtaattacctccacatgcatcctaatttataggaacgccagagagcttgatggcttataagtttcagccagtcaaagttgagagcctaaaagaacatctctaatcagagtaccggaaaagtacaatgccaaaagaaaacctacagaaggttggtgaagtgattcccaaacatttagtcacaaaaccttttttagcaacaaaagcctacatgaaaaccaaatacataaaacgggactaagtggaactgttcaggtgaagctgagcaaggacccagagccctacctccctttccctcattccgccccctccccaagcccttaaggccctaggcaccccatggaacctcaagagtttgaagagcaaagacctactcccacctcctcaatttgtagatgaagaaaccaatgtctaaaaaaatgaaaca

SEQ ID NO: 1880375 - DNA, 4001 bp, Homo sapiens; identical to SEQ ID NO: 3025

SEQ ID NO: 1880376 - DNA, 4001 bp, Homo sapiens; identical to SEQ ID NO: 3033

SEQ ID NO: 1880377 - DNA, 4001 bp, Homo sapiens
ggctaattttgtatttttagtagagatggggtttctccatgttggtcaggctggtcccaaactcttgacctcaggtgatctgcccgccttggcctttgggattacaggcgtgagctaccgcacttggccacaatatgttgtttctaaaaattataaagcagtatattgtaaaatttttcaaatgtttgatcaaggtataaaattcatttccttatactataccacatgttaattgatccaggggtaatcacaattaagtttttattgtatctgctgagatactttccatacacacgtaagcatatacatatatacacacacacacattattgtacacttaatttatgtccttaatacattctgaagcactttccatatcagcacgttgagatctagctcattggtttaaacatctgcatgtttcattttatgattatacaaaaaaatttttcagcagttccctattgatggatatttacatatttttgttttgtctgacatgacaaacattgcaaatgtacatcctttgtctcatgatgaatcatgccttgagtctcactcatatctgatttagatgagactttggactttgactttaaagttgatgctggaacaagttaagactttttaggggctattgggatggaatgaatttattttgcatgtgaggacatgaatctggggagcccaaggtgtggaatgctatgttttgaatgtgttgtctccacaattcatgtgttggaaacttaatcccaatgcaacagggttgggaggcggagccttctgggagatgattaggtcacaaggactctggcctcatatttgattgatgccattataaaaagggtttgcgggagcatgttagctctcccttgcccttccatcttctgccatgggaggacagcaagaaggcccttcccagatgctggcacctgatcatggtcttcctggcctccagaattgtaagaagtaaattttttttttttttaacgaagaagtgagtattttattattttgctgtacagctgttgcttcactatataaaaacagcaccagcaaatgcagtgtattgcaaaattaagatagtgttgttcttcatctgacactgtacaagcaacaaaaacttcttcactcccagttatttccaatggaaagatcattaagtatttcatcccaagtccaggtatggacatacacaagttacaatattatataaggcttaagaataacaacattatctttgaattatgtaatttttgtaactaatttttaccatggataatttcatggataatttcatgaatactagagcctagtctaaaaatcataggatgttgtgaaaaagacacatattatgtttatctacaatcattagaaagttaaaaggcatcttctttcattagcagtgttaacagtagtttttttttcccatgggtaatgctaaaagttgctattctaagtcttctatccaccactaatttaggacaactctgctgggttgcgttatttcatactagcttatttagtggttccattttcactcctcaatagattttatgtatttctcatatgcttcttcactcataagttcatctagttatgaagggttactcagtgtcatcttgatcagccaaccatcttcataacgagatttgtttacaagtcctggattttctgcaagagcttcattaatttcggttacttctcctgataaaggagaatagagttcactagcagctttcacactctccaaagcaccaaactcatcttgtttgttcaattttgtcccaacttcaggcagattacagtaaccagacggcgcccatcccaagctgccagggcctcgataggcagggcgcggcaggtgccaggaccacgtgcaggctgcagagcacggcccgcacgctccgcaccactcgcagcgccatgttcccaggggtgcggggatggcagcgctacgcctcagccactcgcgcggggaggcggggcggtgtgggcagaagtaaatttctttataaattacccagtctgggcctggtgtgttggctcacatgtgtaattccagaactttgggaggtcaaggtgggaggagcgcctgggcccaggggttcaagacgagcctgggcaacatagtgagacctgtctctataaaatatttttaaaaattagctgggcgcggtggcttacgcctgtaatcccagcactttgggaggccgaggtgggcagatcatgaggtcaggagtttgagaccagcctgaccaacatggtgaaaccccgtctctactaaaaatacaaaaattagctgggcatggtggcgcacacctgtaatcctagctagatcctagtagattgaggcaggaaaactgaacccgggaggtggaggttgcagtgagctgagattgtgccactgcacttcagcctgggcgacaaactgagactccgtctcagaaaaaaaaaataaataaataaaaattagtggggcatggtggctcacacctgtagttccagctgttcaggaggctgaggcaggaggattgcttgatccagggaggttgaggctgcagtgaactgtgatcatgccactgaaccccagcctgggtgacagagttgcctcaatcagtcaatcaatcaacccatcacccagtctgtgatattctgttttaacagcagaaacaaagacaactagacatgcccactgtgttatgtacttacctctattagaatatgttatgtcattactataattgatgcctacatatctcttttagtatactgttagcttcttgaggacattagctaaattgtatttctctttgtagtcttgggtaatgtacttgacacacagtagatactctgcaaaaaaattttgtttttctttttgagatggggtctcgctttgtcgcccatgctagagcgcagtggcgcgatctgggatcactgcaacctccgcctcccaggtttaagcaattctctgactcagcctccagagtagctgggattacaggtgtcttgccaccatgcccggctaatttttgtatttttagtagagatggggtttcactatcttggccaggctggtcttgaactcctggccttatgagagccaccgcacccagctgatactctgcaaatgtttaatagatgttggagctgaatttcaggctttgtaatgtcacagaaccaggcatcagaagagctgatccaaacccaagatctgcccctaacttgcctcttattctttctggcctccatttccacaattataaaatgcaggtataatactaaaatttttttttgtatagtcctttacagatccaaaattatgattttaagaaggaaattaataagttattcatctcagtatctctttaggtgccaatactgtaaattaatcaccagtctcagatcatatatttgccatttccaacatatgcttttagtccagtctaatcaccagtctcagactatacattgccattttcaacatatgcttttagtgagttatttaaaaatattaagatatcagatgttttgagtatcagcaataggtaagtcaatctctaaacattttcagtagtgaaaaacacaaaaaacactttaagcagagggtatttggttttgagatccttgttctcttaaaatctgtgatctgaaatctagtcagttttctcattaacatccttgtcccttgggataaattaaatcagcaaactaaagtgctatgtaactattaaaatattttaaaatattggttatttaaaacttattaggggccgggtacagtggctcatgcctgtaatcccagcactttgggaggctgaggcaggtggatcacttgaactcaggagtttaagaccagcctgggtaacatggcgaaacctcgtctctacaaaaaatacaaaaattagccaggtgtggtggcgtgtgcctgtagtcccagccacttgggagactgaagtgggaggatggcttgagcccaggagatggaggttgcagtgtgc

SEQ ID NO: 1880378 - DNA, 4001 bp, Homo sapiens
tcacacctggatagcagaccaggagataactcccctgaccccatctctgcctctgggtctttgctcagatgtccccttccctgactaggtcaccctccatagagtcccagattttgaggccctccaggtctgtttttctacagcccgtaacacacccgcacctgcctaggttcttttcccacctggagtgtcacagatttcatctgccatctttgtttttcaccccagcttcaggaacaacagctgattctttaagacaatgctcaatacattctagttaaataaatgattctaagcatccacaaggtgccaagcctatgattcccgcattctcttaccctgagcaacttcatgtctacagatgctgagtttctcaatgagtattaaaaacaaatgaaagattggtggggcacagtggctcacgcctgtaatcccagcactttgagaggcagaggtgggaggatcacaaggtcaggagttcaagaccagcctggccaacatagcaaaaccctgtctctactaaaaatacaaaaattagctgggcatggtggcacatgcctgtagtctcagctactgtggaggctgaggcaggagaatcacttgaacctgggagggggaggctgcagtaagccaagattgcaccactgccctccagcctgggtaacagagcgatactctgtctcggaaacacacacacacacacacacacacacacacacacacacacacacacacacatttgttgggcgtggtggcacacgcctgtaatcccagctacatgggaggcttaggcatgagaatcgcttgaacttgggaggcggaggttgcagttaactgagattgcaccactgcactccagcctggcaacagagcaaaactccatctctagatagatagatagatagatagatagatagatagatagatagatagatagatagatagatagatatagatagatagaaagaaagaaataagtaaaaatagcaaccaaacaacaaaacagtggagtttatccaaagagacagagactcttagaactgagaaaaggggccctgtttggctctagagacccacaccctgctctcggagtcaccgtccccttcccaaaggctacttagagagtccaagcaaagcttacatgtgggaaaactgagtctcagaggggtgaaggtattgctcaggtccacttgcccagttttcagggcccatgtcccatgccctgccccgctcacctcccaatctccgagcactgcttggcatctgcagccacggcagccctggtgtacacatggttgtcaggttccttggaggctgagggcagtcagagacagaggccgacaatgaccagcaccaggaccacggccagcaggcccagcaccactaacttcttcttcatggctctgctgctcccatggggtaaggagcagggtcaggcccagcctcagacattccctggcacctccccagcagggcacagtctaaagttgggcctcagaaacacaaggcctgtgtctccttcccgcttcccagaacacgtgcaggctgtccggcccccagacctttgtgcaggccatgccctctgccagaagctctgggcctcatctctgccctcccaaatcctccctgcttatcttcagagcccatcctggtaagaaccccatctccagcagcggcccttcctgggagcccccagatttccacacccctctttctgcagggccttgcctacctcctcacagtggctgagcctccactgcttagggagaagctccagtagggatgggcctggcctggtttctcctgtgtcccccacctcagcctagagcctggcactgtccaggagtcctctgaaggccctccaccccacctggagcatggggtttagcttccatagtgcccacaatcagagcaccccacagattcactgccacggggccaggacttactgtccagcagcagacgggggccccaagccttgcctggggtgttggtcacgaaagacaggaggatttggtggaaacacctgaggaaacaactggggtctccctcacactctgctgaagcctgtagccacagaatcttcttcagagactctgatcaggcagccttctcgttctcctgaaggtcaagggaggttacctgaagcacgcgcagcccagacctttctgggggactccgtgttacctccctctgcctctagctggtttctctgtctccatttgaactctggaggcaaagaggctgtcagtaacacatttgtttccatgaattctctcagcatgtctcccaggcacagctcaaagagggttttgcatggagcagggcaggtaggggacagggcattcctgcagaagcccaggatgtgcatgtggtaagcatggcaaagggggctcaaggggcactgccagcctgccctgctctgacgctggacttgccactcacctgctgtggggcctcaggcaaatcactgaactgtccagcctggatgacggcagcacctcacttgccttgctgctgggagtgttgtgaatagagtaggttagactgtgggcaggacttggtgaatggtagctgtgattatcatcatggctgcactggggacacccccaggaggcctgagtggcacaggtctcttgctcactctatgtcccctgtggactcccttccaggctgtgcagtgagtggcagcagtgacccttgggaagtctcatggctatggcagcaggtgacaggtgtgacaacagggaagagggatgtggtgacagaggttggggttcccctctcccacagtcagtttcccacaaagggcggtgtctgccagcaagcccctccaatgagccccaagctgggtttccctccactccaccctgtcccagtgcagagcatctgacctcagaggtagacacactgtcccagaggtagtctaggaatggagtccctgtgccctccccacacacagggaacatccaaatgccatcgtggaagggtggtcacctccccaggcttggtgggcctggggccgatagtgtgatacatttgaccccctcccagccctggatgcagacaccaagagcagagagacctggcagtagtcatgcagcgcaccaccccacatccccagcacaatccaaagcagcccctcatccccaccgtgaccaccacagcctgaatccaggcgccacctgtttctgacctgaactccctcacagcccctgcctgcactccctccctccaacatcgcctgcccttcagtcttccagaaagcagctagagggctctgtctgtccaactacagaacaggccctgcctcctccttgccctgttggacagctcacacccttcaccaggcctgacagcgctcttgccactccaacaccccgggtcccagccgggagtccgggtcagggttaagggttcctgatagagacaccgattcctggaggtccaaagagcctcaggagctgggccagcaatatgcagcatctattatggacacagaacattcccatcacatggccgggtacagtggctcacgcctataatcccagcactttgggaggtagaggcaggtggatcacctgaggtgaagagttggagaccagcctggacaacatggtgaaacccccatctccactaaaaatacaaaaaattagccaggcatggtggcaggtgcctgtaatcccagctactcaggagctgaggcaggagaattgcttgaacccgggaggtagaggttgcagtgaggcaagattgcaccaccgcactccagcctgggcaacaagagggaaactctgtctcaaaaaaaaaagcaaaaaacaaaaacaaaaggacatttccaccacaagtcatggggcaggggcctggcctggtcagtgaccctgtcctagcatgacagccccctgcaccaaggaagctacccagtcccgtccactgggccgggtcatgctgagtgccctggagggcatggcctcatctctcccaggctcagggtcatgagc

SEQ ID NO: 1880379 - DNA, 4001 bp, Homo sapiens; identical to SEQ ID NO: 3044

SEQ ID NO: 1880380 - DNA, 4001 bp, Homo sapiens
caaataagcatacataaaaccacctggaaagatacaccaaggtatttacagtgtgtaccatggatgttgaaattatttctggcttactagttatttctaatttttttagaaacatattaatttgatactaagaaaatcattttaaaaatataaaggaataactaaaacaagtacagcattacttaggttaacatgttctaaataaactctcaaaatacaggagttccatcggttcttagaacttcaaatagtgatttctcctcagtctccaaatgctggctataaaggttaagaaaacttcgagattacatatattaataaaaagaaatatttctaataggataagttaataagactcctcaaatagagttactacaggaagtctgcatcatttattgaaccactcccacctgaacaaccaagagtttaagacacaaatccaatttatctattttagatactacttctgatattaccaaaggggttgcccgaggtttgaatagaaaaagtaattattattattgatgccactgaagagaggatcttcaatcaccaactttggggaaaaaggaaggaggggagggggggaagccacactacaatgtgatggatctcaaaattccatgagaattccatattcggggtccaaacacatctgtaagagactcaaaggtcaattaatcgttattatgtccaatgctaactgaatcctagataggctactgttaacagccagtataatactgaactacctgcctagcccatctttcaaataatacttcaatgaaaactatttctcaaatcaatctatgaacagcaatgataaaacaatgtagcagaaaacatacagacataaaaatgttataattatacttacataaaattgtatgtgcacctagacaacgactcaaataaaaagaaaataattttctagggcgggtgggactcccgccatcattacatatataaccagacaaagaaaaaaaattttaattaagtatagaatacactcatttaccaaatataatttattcctgaactaacacattgttttcagcgaggcacataaagcaaaagtttcaaaaacatgcacatttataaaccacctagcacctgtcaaatactttactactgtattagtcatccaatatcaaagaagatgagattttgaaaactcaccattcaggcccaaagttcagtgtctgcgtttccgctgccattcttttccgtatttttacaatagatttttatatgtgaagaaacctgttaacgagaaaaatatctccatactattagttgagattaaatgtggaattccaggccagaaagtacagttagagagtgttttatttatgctcctctcaactagagtcacaaaaatgagattttgaaattcctacttaaaacaataatatagcaggcaaagtgaaatgaataaatcaacccttatattctgactccccacctttctatgttaatctggggtaaggaggcacagtttaagatgaagctagtgagagaggtaggaacagaccacacagggcattggagactaagttaaggattttctccctttatccctggaacaatggggagtgaatgaaaggtaatagatttacattttagttcatattacttcctagtaatgactcccctatcaccatgaggtacatcaaagattattaaaataaggaccctccttacctatcacatagcttctgccacaactctcctcaccttctgcttattagcactttacaccctagtgatttttttttaacagacagtgtgtatcactatgttgctcaagctggtctcgaactcttggcctgacctcaagtgatcttcctgtctcagcctctcgagcctactgcttcttttaaaaattatcttggatcaggccaggaaccaccaggcaaggtggctcatacctgtaaatccagcgctttgggaggccaagatgggagaatcgttggagcccaggaggtggagacgtggtctctaaaaaaaagaaatgttaaagatcaactgggcatggtggtacatgcctgtagtcttagctgcctgggagggtgaggtggagggatcacttgagcccaggagtttggggctgcagtgagttgtggtcctgccactgcactccagcctagacgatggagtgagaccctgtctctacaaaataaacaaataaaaataaatttataatttgggaggccaagccaggcagacggcttgggcccaggagttcaagactggattgggcaacatagtgagactccatctctttaaaaaaaaaaaaaaaaaaaaagttttaaaataaataaataaaatataaattttttaaaagttgcttcagattgtcaagttaaaataataaactaatgaatttcacaagtgacatttcaaaagtaatcttaagatatgagagcttaaaaaaatggaaaatactataaaaattgtaaatataactggccctccatatccatgggttctggttcatggattcaaccaacctcggatggaaaaaaattttttaattgcgtctgtaccaacatgtatagacacttcttttccttgtcattgttccctaaacaatacagcagaacaactatttacacagcatttatgttgtattaagcattataagtaatctagaggtgttaaagtatatagaagtatgtacataggttatacgcaaacactatgccattttacattagggacttgagcatccaaggattttaacatctgaaggacatcctagaatgaatccccatggatactgagggacaactgtatactgtaaaatatctctaagatacatcacacacggcactggggaccaagttaaggattctctccctttatcaccctgttgcctctgtttaaatgatctaaaaaataataaactacaaatatgtctaaagcttagaaacagcaaagtaaaagtgtgttaaccttcataatcagctattcatttatctgccttccttctgaaaggtacttccagccctgtgtcaaccaagcagactccaagggagattatcctgttcttacttgaccctgactccctgctcccccaccacacaaaaggtgcaaaccagactaaaactgaggtaaacttagtcccctcctcatcactttttttttttttttttttgagacaagagtctcgctctgtcgcccaggctggagtacagtggcgcgatcacggctcactgtaagctccgcctcccgggttcacaccattctcctgcctcagcctcccgagtagctgggactacaggcacgtgccaccacacccggctaatatttttgtatttttagtagagacaaggtttcaccatgttagccaggatggtcttgatctcctgacctcgtgatcagcctgcctaggtctcccaaagtgctgggattacaggcgtgagccactgcgccccgcccctcctcatctcttaaaacaactagtgattcaaagaaaacataactgccgagcatggtggctcatacctgtaatcccagcactttgggaggccaaggtgggtggatcgcttgagcccggaagttcaagaccagcctgggcaacatggcaaaaccctgtctccacaaaaatatataaaaattagctgggcatgatggtgcgagcctgtagtcccagctgaggtgggaggatcacttatgctgtggagcttgagactacaatgagtcgtgattgcaccactgcactccagcctgggcaacagagcaagaccttgtctcaattaaaaaaaaaaaaaattaaaaaaattaaaataaaaaagaaaacactatttttaacattttaatttctctgaaattagaatgcatcttaaaactgatgccaagttacaactgctactggctgggtgcgagttgtgttacagctgtctgaacaagggccaattttttaaaccgctgttttaaatgtcttcaaaataatatgattctgtatcaaaactaaatttattgtataacagaaaaga

SEQ ID NO: 1880381 - DNA, 4001 bp, Homo sapiens; identical to SEQ ID NO: 3064

SEQ ID NO: 1880382 - DNA, 4001 bp, Homo sapiens
gaaataaagtcgtatttcgagacttcctcagaaatatgttagatttcccaaaatgcagtaagttaaaaaaaagtttagctattttaacttgttatttgaacatttacaagaatatgcacacatctttcagccttaaataaataaaagattgatttttgaaaatagagacctgttttctaggtatggtaagtggaatctgctcagaatcactggatgctctttactaatttcccacattatgaccacttctttttagttatttctcaagcaatcagtaaatgatatattcatcaaacttaagagagtaaacaaaatgtatctcttcctaagaaaaacaactgattgcttctttagccagttggattacagcaggtcagtgagatcatagcaagtagcctgattatgttgtactgatattcatcacaagaaatgaactaatctacacaaatcttttgctgcaaaataaataaactcctttggtggaacattatcacaagatcagaatatgccactttgtcaaggatggaatgaacacagcgtagctttactgtaacagcaggaaaccattattttgtggctcacagcagtctttcagttgatgttttctctcaggatgaaacccagatccaaaatgccatcaaaagtacccacaaaccgggtgcggtggctcatgcctgtaatccccgctactcaggaggctgagggcagaggaattgcttgaacccgggaggttgaggttgcattgagccgagatcatgccactgcactctggcctgggcgacagagcgagactctgtctcaaaaaaaacaaaaacaaaaacaaaaaacaaaaacggaaaacagtaaccacaaatgagctctctgattagagccattgatcattaaattagctagaagcccgagaatttgctatgtttcagcaaagtcatgtaagtcatgtgaaatatttcataatacaatgtaatgaaagaatcaagtaaagtcataacaatgatattgcactttttttttttttttttttttgagatggagtctcgctctgtcgcccaggctggagtgcagtggtgcgatctcggctcactgtaagctccgcctcccgggttcacaccattctcctgcctcagcctcccgagtagctgggactacaaagatgcccgccaccacgcccggctaattttttgtatttttagtaaagacggggtttcaccatgttagccaggatggtctcgatctcctgacctcgtgatccgcccgcctcggactcccaaagtgctgggattacaggcgtgagccactgcgcccggcctgatattgcacatttattgagctcttactatgatccagacactgagctatgccctaacatatattatcttttgtcattcatacaataaacctagaacagtttactcatggtttcttccccagttccctatatcatcgatgaaggaacaggagctgattgtaccaaaacacttatatggtaagcttgatcaatgtatttgatttagtatctatgctgggctgagaaaaacatgcaaagcagtacctacaaataagaaaacaggaagtaagctgggcatggtggcacatgcctggagtcccagctacttgggaggctgaggcttcccacgaccgcccctcacattcattagttcgctagatcagatcggagaactcgggaaaatggcgtacttacaagactgcaggtttactacaagggccagaactcaggaagagccggatggaagcgatgcacgggacaaggtctgtgggaaggggcgcggagcttccatgccctctgggcgcgccaccatttccaggacctccgtgtgttcaccagaccggaagctctggtttttacggaggctcattacttagtcatgattgattaaaccactggccattggaaattaatgcaatctccagcccccagtcctcccctggaggtggaagttggaagctgggaagcgggctgtggacacgatttgtaatgaatgcaagacaccggtgttgggctgctttttttttttttttttttttttttgagacagagtctcgcgcttttcgcccaggctggagtgcaatggcgcgatcttggctcactgcaaacctccacctcccggattcaaggagttctcctgcctcagcctcccgagtagctgggattacaggcatgcgccaccatgcccggctaatttttttttttttttttgtagttttagaagagactgggtttcaccatgttggtcaggctggtcttgaactcctgacctcaaatgatctgcccgcctcggcctcccaaatgctgggattacaggtgtgagccaccgtgcccggcctgggctctttcaaacggagcaaggttcaagtttgtgcctacaaagggggccaaaacagggttatctaggagggaggaggtcgatctggtagcaagaaagaactagggtggaaggtgagtttgggaggtgtccgcaataggaaaggaaacgcgctggagtgggtacagtggatggaggggtgacaggctttgaggggctggcagcagctgaggtccacagtgccacgtgtaccgagacactgagaggagcagagttctcctcttttgtagtaaggtaagccggccgcctgacctggatggcttgaaacccagccccccgccgctgccaccacccacctcccccatccccacccgaatgaggcgggcgccctgggcgaatagctatgacgccatccagccttaaccaggttagtgcggaacgtggtggcgcgcctgcagccccagctactcaagaggctgaagcaggagaattgcttgagcccaggaggttgaaactgcagtgaaccattattgcgccactgcactccagtctgggcaactgagccagacctgtcttttaaaaacaaagggaaaaaacacacacaaaaccaaggctgtgatcctatgatctttagccaatctgactccaccccgtttcaaacagtctaaagattattttaaaaaatatatttcataccgtcttctctctatagcctccatgtcaccccatcccttcaaaaaacttagtagaacctaacagaaccttagggtttcagcgcttactgaattttagacatcaacaagtccaatcacgtgtaatgtctgatttcctgcttaaaacccctcactttaaggttgcatcattaaacatctccaagtatgagaaatgtaccaccctctgacatagctttacagtagaatgaaatctccataagttctgtgtcctactctctctccagggcctagaatacatagtaggtgctgaataaataattcatttaatttagtttttaaatgtttaacaactataatctttaggaaattctgccttacattgagctaacattagcgcccctcaattttttgaagccagtttgaatagttccctcttccaaatgccagcccttgggcatttgaaaaaattgttaccctgctctttcttttccaggataaatagcttccaccagtttgctcaatgctcctcacatgatatagtttctctccatccggttccctctcctctggacatatttcagtttatcattgtttctcttaaactgtaattcccagaaaagaacacagtacccctaggtgctgtctgatcagttcaagtagaattggataaacactcccccaattctattaagacagcccaagggcaaagttacttttttttttttttagctgtctcatcccgttgttgactcacatggagctcaaggtcaaggagaaaggttgtgtttgggcagaaatttaggttgtttaaatcacagaccaggtcttcacagggcactaattgtgatgcccttggtgaatggttcaaaggaaatgtatatgaaaagtggttgtgtgggaccccgctggggtacactacatttacttccttttcatggtgaaaaggcactaaataagccattagtcaatattacgtatctctttaatgtagaattatgaaatccat

SEQ ID NO: 1880383 - DNA, 4001 bp, Homo sapiens
tcatactgggagtttgctgagtggattcctttagcctggaagtggcacttgttatctgagctgtaagttgaagcaacatctctgtagcttaggaagggtgacaccactggagacgaaagggtgacagaggctctataatgggaaccctgagatgggtgaaacacttccaaatttagactgttccctttgtcttcccccagtgaggccgctccctacctgccccaggaggagaagtctccattgttttctgtacaacgtgaagggctacctgaagatggcaccctctaccgaataaacaggtgaagattgcacatccgcccttttttctgattctaggagccagaaacaagaaaaatgaatgttgaaagagatgacagataagtcctgtccttcccctgatgctggttcagttggtcccaagaataagagtgctgactagagctggtcagtcctctctgatttgtagtgttcattactggcaggctgagggaagctagagagatttaggggccaaagcagttcacaaggttacatctactcagatagacctggacagactagccttagggagactactatagtatgccagaatgaacagccctgaagatgagctggagttagacagactttggaggccgggtgtggtggctcacacctgtaatctcagcactttgggaggccaaaaagggaggattacttgagcccacgagttcaagaccagcctaggaaacatagcaagacccctatctctacaaagaatttaaaaattagtggggtatggtggcatatgcctgtagtcccagctactccagaggctgaggtgggataaccacttgagcctgggaggtcacggctgcagtgaaccgtcgatcatgccactgcactccatcctgggtgacagaccccatctcaaataataataatataagacagactttgggaaggaaaggaggaagatacaagtggaagccaaggactctgttctcacttgtaaactgtttttgatattcaggctcttgcttgagccagttcatactggctctgggtggagcgcccattcagtcctcattacctttcattaattcctttcttcatcccatctttgatttttctctagatttagctcgatcacagcacatccagagcgctgggatgtgtccttcttcacggggggaccgctctgggctctggactggtgcccagtgccagagggggcaggagcctcgcaatatgtggctcttttctccagccctgacatgaatgagacacacccactgagccagcttcattcgggtcctgggctgctccagctctggggccttgggaccttgcagcaagaaagctggtgaggtggggttggacactgccatgggagggtggttgaggacagcaggatggggtctggacaggatagggggaagggcttggattgggctgagacaaggggagcttacctctggcagccctgcgtcccttcttcctacccaccatccccacatgctctctctctccagtcctggcaacagggcccactttgtctatgggattgcttgtgacaacggctgcatctgggacctcaagttctgccccagtggagcatgggaacttccaggcacccctcggaaggtacttcccagtcaactgtgggatggccctaggactcaaagccaggacaaagaggccctgggaattcttagagttgaaggaacgaaggttggagtgtagtggatggagtttttccagcaacttcatacagtatttcagggactagaacctcaaaggttttctgtgagtcagctgaaggcagcaagcctcagcataccttttaccctttaggctcctctcctgccccggttgggtctcttggctctggcctgctcagacgggaaagtactgctattcagtctaccccatccggaggccctgctggctcagcaacccccaggtgagtagcacagcaaggagaatggggctgctgtagtggtggtcacagcatagcagggcctgtctgtctccctggaaactcctctgggccagtctctcttagcacaaagccttactcagccacacacacaccctgcattgtgactcaggtttgttcttgagccctctctcttttgcagtcttacagctgtactctttcagcacatttccttttatctcccccttcttccctcttctgtgctctcaagactttccccctcttgctgccacaggtaactggctgtgtaaagagctgctgagggcttgggctgatagatagggcccatctcccctgctatactcttgttcccccaatcctgttcttagcctctcctgccctcaccaccacacaaacacaatctcttgttctgctgaagagagggatggaatagagagctgaagatgagcaaaaggagggaggagtcaggaaaaggcagctcctatatgttgaatttatttttcattagtactgagtatttaaagaagagggcacccaggctggagccctgggaagtcccatatgtggtggtctggtggagtgggttgaggaggtaatagaaggtcagaaagtaaagatagtaaatatagaccattctttcaagaagtttggctgtggggctgggcatggtggtccatgccttaattccagtactttgcgaggcctaggtgggaggattgcttgagcctaggagtttgagaccagctggggcaatataatgagatgtcgtctcgacaaaaaaatttttaaaagtagccgaacatagtggtgcatgcctgtaatcccagctacttgggaggctgaggtgggaggatcacttatgcccaggaggttgaggctgcagtgaactgagattgtgccactgcactgtagcctgggcggcttagtgagatgctgtctgaaaaaaaaaaaaaaatttcgctgtgaaggggaaccagtaattgagggtggtggattgcctaagtgtggtcaataaaggaaggttttgtccctttatttggataggagacattagggcatgttcacatagcaatatgggagtgacctagactagggagggaacaagtggatgacacaggaggaaggaggataacagaatgagcagtgttctggaaaaggtgctagaggatgagaagagagtagagtgaagggattgctcttctgataggaggaaggatactatcaggtgtaacagaaggaaagaagatgggaacagatagaggtaggttcataaatttggtgatgaaaagataaggactttctcaataaaggataagggaatgtcattattcaaaggattggttgctgatttaagagaaggcctgtgtccacagaggaggtctaaaggaaaaaaaaaaaaaggcaaggcctggctaggcatggtggctcacacttataatcccagcattttgggaggctgaggcaggaggattgcttgagcccaggagttggaggctgcagtgagccatgatcatgccactgcactcgggcctgggtgacagagtaagacctgctgagtccttgggatccatagagttagttcctgctctttttcctcacagatgcagtgaagcctgccatatataaggtgagtgaggaacctgctaccttagctgaggctccatcttcttagagcctcaccttgctgattccacagtgagtctccttatacttctgaaaaataccctcatcctgctggattaagcactgatttgagctttcgttccaaacagtgtaggtgtccctaaccctagtcccatctcttctttccctgcaggtacaatgtgtggcaactctgcaggtggggtctatgcaagctacagacccctctgagtgtggtcagtgccttagcctggcctggatgcctaccaggccccaccaacacctagctgctggatattataatggtaaaaaaaccaaaataaaacataaggaactattgctctttaaattttttatatatgcttgttttttggttctttctttggtggttcaatactggacatatagttagaaatat

SEQ ID NO: 1880384 - DNA, 4001 bp, Homo sapiens
atattcacaatctcaaactcttaaatacagaggaaatataaaccacattagtttgtttgtttgtttgtttgttttaaccatttaacccctaagcccacaatagtaaacctacaacccacctctctgaagaaaaaaaaaagagagatgaaacatacacaactttaatacacaaagaagagtctgaattgcagttaaggctttgagttcctagctggtttggaattaggaagcagtaaagggcaaatgtgtgaaatactgagatcatctcaccttttacttctttacatgaaagagcaagatctgtttatcaggatcacttttgataagcacaaagaagtcatgccggatacgtttctactttaattccatgacccaaatccatgctagctgagaatacgtaattgaattattcaatttaggtagaaaaccatctgctcaaacccttaagtcttcaattcttgctgctatgaaaacaaagtaaggccgaagtcaaggaattgaagttgcagcaaacctcgtccaaggagacaaacagcaacaaagtgtgggcatttgcaaagtatgatcagcacaaacagcatcaggcccccagctattccactgcaacactgataaggaaagttcagactttgctcctggagccctttttgtaatttcctcggtcatatccaactgcactctatgcttagtttatttttttgccaagaagactgatcttagccacctaaaaattctcattgcaaaagaaacctcttgtttaaaccccaagtgcaaccgacagcccctttccaattagcccctgcaacttgcccagtctctttcatgcctggctactgagctcagtctagtttggctgccggccaggttcctctctttttttccttgtcagtcgtaaaaacttggaaaacactcctggacagctcaaggagacctttaattatgcagtggggcagtaccttagcctgtctgctgtttccagcaaagcctgtagtcaccagcgactgcactctcccaatttgtgggttttccagccaaggctacttgttcatatggggggaaaagggaaagactggcagagaaagggagcaatttgcaaatttgaagaatttccaattcctctgaaagttttccacttcctcacattcactctgtctaataatctcccttactttagcacctaatcacccattttgtaatacagacacaaaatcatcagtattgtctcctgctagtcctagaaatcagtcatgacttgaacattctccgtaactttttattctcaaatgttggtgtaacgtattttaaaagcaggcacaaaataaatttattaaatccttcctaattgactgcattacactttgtcaaacttgcagattgaaatagtgcatgtaaaatgtctgattgcaaatgagtaaggcgagctcagttgggaaacactactaggacctagggaggggtaccttgactgccagccctcacttacttggagtttgcccagcgtaccaagtggacccgccaagcccaacaccagctaagtcttccttactctaccttggcacgctagttccagctgcagcgtccagcttcctgttcaagtcccattcaacatcgtaaacacattccaagaaaaccagcctgcccagagttccctcccgcacacagggaagtcagcgcggcagccgcaggagcctcagaatagagagaactgcctgctccggattctgatccgtgtggcgagtgaggccacgagaaggtggacccggccaagcgaatttagcagtcggagcgagaacccaagggctcatcacccccgccgcgccttgcgccctccagaagaagctacttgacccgcgcagcagaagggtaaccatgtggacgccgccccttcctttgggccctcccagctctgagctttaaagtatccgcggcccggcctcggagcttcgcgcctccccacccccatgcccacattctctcccagcgccaacaaaagggaggctgccctggaagttcgctcctgggtcgcctcgctgtgacccgacgatgacttgcctgctcagcccagtctgatccacgcaccctcagccggacggatccacggtttccccaccgcctccctccagttcctgctcaccggccccccgccgccggaccaaagttaccacaaaaggctaaggaggtttctggagcccggagaccgctgcgtccccgacctcgctggactcccccagtcatttctcaagcgctgccatagcaggcgtcaacaggtcttagcctcctttagtgctggacgactccctgagcatttagctgtcctaattttttacaacctgctggccagcggctacgcgcagccccgcgccctccttcccgggcactggtggccggagctgtccacccccaccgcccctcgggatatcagcttctaagcgattccacgctacctggagggagcctgggttcgcagccagggaagagcctagataaatctccgtacctcactgagagaggcagtcgggtcaggcttcgggcaggggcgtggagagctgccggttcctccgagcctggcgatctccactccggcacggccggggcgccgtctccgaggccgagagggaaagtttctctacgccaacacggcgctggactcgggaccctccagcttcggtcccctccctcttcgcgctctctcccccctccctcctcttcctaatccgccgaatccaaaactggcgctggcggcagctgggacgcggggctggggactccgggtcgctcccggccgggaacgccgggctccccctctcggtgagaaggaaactctagccgactccggcttgcgcacttctggcggtctccttggacatttccacacgggacgcctgtgttcaagctcgctgactttccttctttaatctctgatggtcgttatctgtgggcccactggactatctcgcgcgtgcacgcggaaccggaggtgggtggagggtggaatgagagagaaacccatccgcagaaggaggggccctaccttactcagtcttcagcccggacagaagcaaaaccacaggccccctctcccaccccactcgcgccgcgtttcctttccagcctcttccctgagacactagatcaggaccatttgccttttcttatctctgtgtgtttcctaacacaattttaaaacacctctgaggcttcatagaggggtaaagtgtcaaaagaaatacacgaataagagtaaaacgtgccgtcttcacagcctttatcaagaaagcagccacagttgctgctgctctggccgcacctcagcggactggtttgtcctcattggtttgtcctcatttgttttttaactcggccttaatctctggactttgttatgccttaaaacagacacacacatacacacacttgaaaattgccttaacccccagatcatactcatttgttccattcagatgtttacctcggaattaaggacttctgtataggatttgagagaaaacacaacagcccattcttactgacctttggtaaagttctgcgtgggaaagggagcaagaaggagtatccttatataagaagttcttcaaggatgagaggacctttactaaaattttttctgctgctcagaatttagtttactaaattttagtttgagtgtgaaaatagatgagaaaaggaaaaaggcattttgcaaagctagcagttataatgtattacagtggatccagggcttagagtcagacaggccagattccattccaaactccatctttacgctttctgtgcctaccaattataactgtcaacaggaattctataatctagctcacggagtcacagtcacatttacaggagttaaaatagagttgtgataggcgcagagaaaatactcaataaatatttggttcttatatcccaccatgttttactgtaattaggagagagggtggtgctagaaattttcccccaaagaccctgtaactgaatcagtt

SEQ ID NO: 1880385 - DNA, 4001 bp, Homo sapiens
acccaagctcttccctcttgcagactgggcaacccacactacacaactcacaacccctggccttggtgccttagagctttccaggaaaaagacggatttatattaataatcaaccaagagaaattagagatctacagacacatgtcaaataacaaaaggtagcaaataacatcatatagccattaaaaactaggacaggaaggacctcaacgactggaaaactgaagtcaccatacagtatagaaatggttattgcatgtcacaaaaacattacacgtacatgcacttgtgttagaaaaagattcaccaaaatactgaattcacattacagtatgtgtccatacttctatttgtattcttagatacagttcaggttgtttttcagtgagcatgtattatttttaagtatcattaagtgctggcagagagatagcactgagatcagagaaagatgagcatacttccagctgtagtctccaagattggtgtccttggggacatggggccaagggataggaaggattagacctatcaggaaagatggtagagcactctgagcaggtcggagaaagcagcatgggacaaggaactcaccctggagtgggggtgtgggagagggccaggcaggaacttcaaggacaggcaaagcaatctgcacagaatcctatcaatactgcagggccacagaagtgatacgagtaagagaaagggaccaattgaggaacagaaagaaagaaaatctaaaaaactgacgataccaagcattggtgaaaatgtggagcaactggaactctcattcatatgttgctggataagaatgtgaaattgtacagccactgatgttggctgtatgacccggcaattccaaacctaagtatctgccccaaagcaacaaacacacatgcccacacacaaatgtgtatgcatatatttataccaacattttcttttttttttttttatagtttaatgtattttaatagcaaacttacaggaacagcacagaagacagacaacattaaaaacatgtacttgcatgtaggacaactcagttagaaaagtatagtgaatggatggaatctactgtatgataaaaatgctacaaacaccatttagttgccatcaataagaaatttacttgttttaaaaaaatccaaatgctggcattgtccagaaaaatttaacaggtttatttataattattataaagttgaaccgctgaaacttgttcactgaaacattttaacttgcattaatgctttacgtctccgcatttatattaaaaattcacacacaaatgaaaatggaaaaactgccaatacctgatttctgtcccctatttttccactcgcaatcatatacttaggtaccttttgaccccatggaaaaaaaatatctaacgttcagaactaccaataacaggaagaagagaaattttttttttttttttgagaatgaaatgtttcccatcatagtggattcttaagcacgttctccacgtatgcggcgtgctagctggatgtcttttggcataattgttacacgtttggcatggatagcacacaggttggtgtcttcaaaaaggccaaccagataggcctcacttgcctcctgcaaagcaccgatagctgcgctctggaagcgcagatctgttttaaagtcctgagcaatttctcgcaccagacgctggaagggaagtttgcgaatcagaagttcagtggacttctgataacgtctaatttcacggagcgccacagtaccaggcctgtaacgatgaggtttcttcacccctccagtagagggcgcactcttgcgagcggcttttgtagccagttgcttcctgggtgctttaccaccggtcgatttgcgggcagtctgctttgtacgagccatggtacagagacctccttacttaccccccttctccttcggctggagctcggcgagcgagaggcggcgctggcgttggagagcgacggcggcgcggcggcggctgcgaacctataccaacattttctactagtaaaaaaaaaaatcagaagcaacccaaatggctaccacaagtaaaatgacccatgtggaaatgtattgtctgaaactctacatcacgggctcttgtccctgtggcgtctgtggatgcaaaatattaagtttggtgcatttttctggggaacaaggagctttttgagtctcaaagagtatggtggtcagttttatgtgtcaatttgatgaggctctattgcctaattattcaactaaacattagtctcagagtggctatggagctcttttgtagatgaggttaatacctatagttagttgactttaagtaagtaaaggagattactcttgatggtgtgagtgagactcatctaaccagctgaaggctctaagagcaaaaactgacgtttcctgatagaggaattctgcttcaagacctcagcatcaattcctacctgtttccagcctgccttacagatttcagacttgccagctttcacaatcatgtaggccaattcctagagatgaatctctttgacatgcattacatatcgcccactggctctgcttctctggagaactctgatagatatgggggaaatctggaaatccacagtagcaggaggaggaggaggaggtgaaacaagtggcccagagccacctgcagtgctaggaggcgtgaggtggaatagaattaggagaatcaggaccaggaccctgatggggcaacagcagcccaggctcatggcaggagcacaggaagaccgagtttcacaggaacactagaggagggatgaggcgggaacccaatcctgggcctggcttagtctcaggagcaatgcagagcattgtctccgacagaggcagcaacatgccggtcatgctggttactcatgcactgaaccccccagagaggccacgacgggggaaaggtggtgatacagcttgcaggggggatatggccaggagggttatggtggtggttagggggtaacataccaaaagttaagtccaggaggttaattccagatgagtaaaaccaggtgaatgtggccaggtggagaaaaacatgaagttaagactaaggtcaggagattaaggccagctgaataaagctaggtagtcaacatcaggtgagtaaggtcaaaaggttaaggctaggtgtgtaagaccagctggataagccaattgggtaaggacaaatgagtaaggccaggaggttacacagtgtgttaaggcctggtgaataaagccacgtagataacattgggtgggtgaacccaagaggttcaggccaagagtttaatgagtccaggtaagtaaaaccaaggaattaaggccaggtgggtaagccaggttggtaatgccaggatattaaaaacagaagtttaatgccagatgagtgaggccaggtgggtaaggcctacttgatatttgcacctgtgtcatcctctcctcactgaactgacatctgtagcccttaggaaactggaagtgatggagtgtggcttttgaagctaggatagttcctgttctcttggatcactcattccatggaaagctggcagccatgatgtgaggacactcaaacagccctgtggagaggccctgatggtgagaaatggaggcctcctgcctgcggccacgtgggtgactcatcttggaagcagaccctccagcccctatcaagctttctgatgactgcagatctgggcaacatcctgactgcaaccacatgagccatcctgggacagatgtacccaaaccaagccacttccaaattcctgacccatggaaactgtgtgggataatacatatttatcgtcattgtaagccactaagttttgaggttgtttaattcatagcaatagatagctaatacagtagttagaattttttctagaacattaaaaaaattgcctcttttcatgaaccaggttagtcatgaatatgtttttgaagggatcatgaatcctacataaattaatttagttccatat

SEQ ID NO: 1880386 - DNA, 4001 bp, Homo sapiens
gagagaatacaggaggagaatgtttccccttggtgcagccccaagctccctatcagagacacatcagccaaattagtttccgaggctcacaggctgctaacattgctgaacaagatttttcgaatttctatgtgttaggagtattaaaagatagtgattacctatactagcagcctttgtcccttttctcttccctagtctgtaccagcccactggcccttgagtgaagtgcatcttctcagcctgcggacttgggagctcaggctctccatctgttgaggtttttcattagggagactacagaggatgtgtgtgggtgtgtgtttgaataacaaagaagtaacccttcattctaataaaagtgttcctctgcttgacctggaggagccagaagcttgtttataccttcagtattcaagggacagtcacaggcctgttttgaccttttcctgagaattagctgaaacttccctctgaagtcaagtagtgaatctgttataggtctaaggaaggtcctcttcatctgggagttcttggcattactttggtccttctttcagaaactgaaagaaaagaataggaagaacagaagtttgtgagtaggcaggaagggacatggatgaccccagtcttcacaggactatggcctgatcacttcgaggcactgcaacttcccagagtatatatgtagggcttgggttgagtggccctgttccgacactttgggcacagggagctgagactgggctgtcactagccaagcccttaccatctttgagggctggttcttagatctctcttgcagaaggcctggatagaaaggagaaagattgggtatattgggaggctgagacaggagaatcgtttgtacctgggaggcaaggttgcagtgagctgagatcacaccattgcactccagcctgggcatcaagagtgaaactctatctcaaaaaaaaaaaaaaaaaaaaaaaaagattgggtacataagtcctctgcactttctgcactggtgatgctggagaggaaggacggtgaatgataagaatcatcacagaggatgaaatcttagttctcattgttcccttcttttctactccagctacaaatgcccttatctttggagtccaaggttgggaacaaatggatttaagtacctggcctaaagcctattcctaaaaacttccctcaggtttcacacctaccttggcaagttggaaagtgcaaagacaatataagggcccattttcaggccaggtccagcatgaaacagagtgaacaaaattagttccacacattagggaagagccaagtcagacgaatatccaatcatttgcagtagtagaggcaggtgaagggtccccagatctgtaaggcaggagttactgcatgagtctttctgtcctagatcttgggcaaaatgtcctgattggttcctatagctagtctggattattttaaggaaagaatactacctggagaaatcataaaagctgggttttaacattagtaagggccagaagaatttaaatcctaatttaaaccaaaattcatggagagctctggtacaggcagtgtttttacctgggaagcagggctcaaaacctggccaggaggtcttgttgggccaggaatgtccgtggttggtgaggaggctgggagaaggcctttttgatggctccattgttcacagcgctgccctacaaataccatatccgtccccacctcctctgcaagggtcgagcggaagagtaggtctggtgagctgagctctagggagctggtaccatcttccctcaatccccctcggttaccccttggggcagcaacgacgccatcccagccccttccagagaacacacaaaggaagccccacccgtccttagacctgaggacacgctcgggagcgggctgacgtggaccccgtttcagggcgccccgggcccctgcggggaacaatagccgccgcctcctgggcggtctggcgggcgcgcggcacaaacgtccgcgccgccacgtgatgcgcgcgctcgttccgcgctctccgcgcctcagcgagcggccaggctgcgggcggggtgggctggcgctcctgatccacctggaacacttttgcaaagacagacggtgagttaatcaccctaccggctggcggccgcgtcccctctcgcccgcgaggaggactggagaaggggctggggtggaggttttctctgtgtgtgtctagggttgggggcaggagaggttagttctattaagagttcatcaatcacccggtgtgcacttttcgctcgacagcggttcctcctacttcagagcaagtctgggccagctgggatccgaccagaaatcgcaagcggaggagacgcagtagcgcaggctgagcgctaactgaaggcgcgacctgagcccggcgcctgctggggagctgcgcagccaggacagcggtcggcagcacagggcctgggcgcagggcccgccgtcaccacctcacgtcggaagccagcactgctgcccgccagccctgccgcctgccctcggacttcccagggcgcccagggtcctcccaacgcgcctgcacccacacccgcccctgagccacagtgaccttgcattccccgccccctgccacacctcctgcgtgcccgagtgtcacccttaaataccgctctacacccagagagggacgaatacacctctgaagacagggcaagactaatttcaatgggtcagaaggttcttgcaggcactgttttatttaagagtgcctatttactggcaggagtatttgtgtgggaggaagtaggctaagactgctgttgaacttgaagctaaacttgaatgccatttaaaataacaataaaaatatacttaaaacaccaatcacaatgatatgactcacctctttccagtgtggaggaaacactccagtatttttacctccgttctttccggtgtattttaagaacaccctaaagggatagacagtaagtgtctgagggtagtcactagcattagagctgtttacagcaggagggtttggtggagttagtggtgaagcatttttataacccttctggagtggtcatgctgttctctttgtaaatcctaacaaggttccagcctagttccccttttacccttttttgctgcgggacttcagctgagatgtttctgaagttagtaaatgtgttgcctcaggccacagaaaatagtccctgaaggaaagaaagcctcagctttgccccctcttccttcagccttctctcccttcatcctcttgggtggaaaattaacttgctttggaaaaatgttctaccatcttgcttcagatagatataagctgaagcattaagcctcacacagtgtcctgaactcactgagcaatgaaactactggtcctgctgtccttggttcagtctgttcctcctccttgcctttcaccaatttctagtgaacagctcctatacacactgtgctgggctctgggatacaaagacaagtcactgatggtgtatgctcttcaatctagtggggaagagaaataatcttaaaacaatatgacaggtgctataacagaggtgtggtcaaaatgttcctctaataaaaaaggagccactagtagtactataatgtcaaaaaaaatagtttcagaggaggtgaattcgggttcctgaaacataagcgtttttcaggccaagaagggaagccataccaggtagagaggacaactcatgcaaaagcaaagagggaggaaaaagcaaagtctgggcttggaacaaggagagtactttggagtgtggttatcctggctgaaaagagaggttgcacagggttcacgtgaaggagtctggacctactctctagagactggggagccactgcaggttttaagctgggatgtgaagttatgtattttgaagctaactcagggatgctgtgtctgattggagaaaggagagacacgaggcaagaagaacaaaataggaggcaaccgcaacaac

SEQ ID NO: 1880387 - DNA, 4001 bp, Homo sapiens
tccttccttcttgacccatggggcctctaggctttggagttgtgataggataagtatcatttgagggaacactgtgagagctgggacatcttgcagataaaaactggctattaaaatctagccagaggtggaggagggggcattgtgaactcagcagcatcttatttgctgttacttttgcataaatggcacaggagagcagtgaagaaacgtgtctacattttaaggctgagctagctctgaagagctctaacatttcctaactggggtgttagggaagaacttttatttttctcttcttaaaaattatttagggccgggcgcggtggctcacgcctgtaatcccagcactttgggaggccgaggcgggcggatcacgaggtcaggagatcgaaaccatcctggctaacacggtgaaaccccgtctctactaaaaatacaaaaaattagccgggcatagtggtgggcgcctgtagtaccagctactcgggaggccgaggcagaagaatggcgtgaatcggggaggctgagcttgcagtgagccgagatcgcgccactgcacttaaaaaaaaaaattaaataaataaataaataaaaattatttaggaccttatctgactggctatagcacaactgaaatagcaaaatcaagattgaagggctattttcagcacaggtattccatttccaatcaaactcaagaactccagcagtgcaggaaccacagacctctttaactttgtgctgattcctaggcatccaccctctactggctcccctcaacctggggacatccctcccccatcctgcagcaacttcgggtccatcagtagtccacattttggtagggctttgtttattcacaagtccacaaccctggaaggaactggctccctgggctgtgatggcgcctattctaaagacttcctcagagtggaaatttaggcaacaacagctcaatcgctcttttatgacaagtcaatcagtaaaacaatgataaaacctcggttaccataacttagaggctgtaatagattaacttttcaagggcacttgatataagctctgagtagactctttagagtctttattcacacagggttttaggaaaccaccctctttcataactactgtgtgtaaataacctctatttatctaatttgtaattttcctacagtcccctcaaaagggaacattaaaagaaatactaaaggaagttggaaagtttgtcaatgtaaagctggtctttgtaacctttctactcttcatttcctgtggcaattgcacttttatttcccgtctctctacactcagtaaacaaaaccatattatcaagggaaagacgtgagcccattaacattgtgagccctcagatttcactcacaagagacgatgcagcacttatctgatggagcagaagctctaattgcttcgaggtacaagtccatctaaacctctgagatctcacccgtccccggtaagcccttgcgccctccagacaagctcctcagtgaaagcaagcgccgcaccggtgcctgtgccagtctcccagaaaggagcataaggagtgttccaccaccactctggattctttattccaacaacccagccggaggggaaaatctgctaaaccaccccacaaggcagaaactttatcaaaatctggcactacaacactggccctcatcacgccgccacaaattgcgagggatagaagaaagctgcaaagtcacgttaaaaggaagcctagtcaaaaagtgaaaattttgtcccgccctaggcacacagcactcacagcataagatgtagttccatgagtcctaggaaagggggaagaaaggaaaaaaccaaacatctgctctaggtttagaagagggataacatcagcgccaagcaaaccgaaagcgcagaggactcagaagaggggaagaggaataactttatctgtcctggaggtgggcgaagagcagtctccaccggccgcgcgtcacgctcccatttaaccttttccatgccgcgacgcccacactccgccctcgagggactagccccccccacgatccagagcagaagcggctcgccccgctgcatccacgggccctcacccaagcgtccagtcctgcctttctccccccacctcgcccaatacctgtccgagagcaggcgttctgccctctcgccccgcccttgcccaggcagcccccggtcgcgacggctctcctcggggctcgggggcgctgggcggcggccctgggctgctttggctaacttggctgcggggcaggcgcgaggagcggcgcgccgaccgggccgagcggagaggccgcccattggccggccagcgccacgtggccgcccccgccggtatattaggccactatttacctccggctcactcgccatgggttggagagggcagctcgggtagagagggctggcggagcggcgcagacggcggcagtcctgctcagcctctgcccggctccgtactccggccccggcctgcgccctcagaaaggtggggcccgaaccatgagctcctacctggagtacgtgtcatgcagcagcagcggcggggtcggcggcgacgtgctcagcttggcacccaagttctgccgctccgacgcccggcccgtggctctgcagcccgccttccctctgggcaacggcgacggcgccttcgtcagctgtctgcccctggccgccgcccgaccctcgccttcgcccccggccgcccccgcgcggccgtccgtaccgcctccggccgcgccccagtacgcgcagtgcaccctggagggggcctacgaacctggtgccgcacctgccgcggcagctgggggcgcggactacggcttcctggggtccgggccggcgtacgacttcccgggcgtgctggggcgggcggccgacgacggcgggtctcacgtccactacgccacctcggccgtcttctcgggcggcggctctttcctcctcagcggccaggtggattacgcggccttcggcgaacccggcccttttccggcttgtctcaaagcgtcagccgacggccaccctggtgctttccagaccgcatccccggccccaggcacctaccccaagtccgtctctcccgcctccggcctccctgccgccttcagcacgttcgagtggatgaaagtgaagaggaatgcctctaagaaaggtaagtccgcgggccttggatggggccacctggggttggggacggagcctcccccgcggaaatgcgctgggagcgtggtgtcgctgcctttccagacagcggtttgggttttgtggaggagacgcgttcccgggcgaattccatggagtctgcctcgagtacagattcggaaaatgtgccaggcattgagaaaatttcaggaaggagctctccgtggaacttctcctggtacaaattctgttcctagggacccaggagggctgcgctgggactttgattctaactagctccactgctcacccacattctgtccccggcctcaggcctggctgacgccctgtctttacgttgcaggcaaactcgccgagtatggggccgctagcccctccagcgcgatccgcacgaatttcagcaccaagcaactgacagaactggaaaaagagtttcatttcaataagtacttaactcgagcccggcgcatcgagatagccaactgcttgcacctgaatgacacgcaagtcaaaatctggttccagaaccgcaggatgaaacagaagaaaagggaacgagaagggcttctggccacggccattcctgtggctcccctccaacttcccctctctggaacaacccccactaagtttatcaagaaccccggcagcccttctcagtcccaagagccttcgtgaggccggtacttggggccgaaaaactgtggcctgcagaagtcccaggcgacccccatccctatctagacttaggagctcagtttgggatggaggtgggagaacaaaaatgaatagggatttcacttggg

SEQ ID NO: 1880388 - DNA, 4001 bp, Homo sapiens
aaattatttagggccgggcgcggtggctcacgcctgtaatcccagcactttgggaggccgaggcgggcggatcacgaggtcaggagatcgaaaccatcctggctaacacggtgaaaccccgtctctactaaaaatacaaaaaattagccgggcatagtggtgggcgcctgtagtaccagctactcgggaggccgaggcagaagaatggcgtgaatcggggaggctgagcttgcagtgagccgagatcgcgccactgcacttaaaaaaaaaaattaaataaataaataaataaaaattatttaggaccttatctgactggctatagcacaactgaaatagcaaaatcaagattgaagggctattttcagcacaggtattccatttccaatcaaactcaagaactccagcagtgcaggaaccacagacctctttaactttgtgctgattcctaggcatccaccctctactggctcccctcaacctggggacatccctcccccatcctgcagcaacttcgggtccatcagtagtccacattttggtagggctttgtttattcacaagtccacaaccctggaaggaactggctccctgggctgtgatggcgcctattctaaagacttcctcagagtggaaatttaggcaacaacagctcaatcgctcttttatgacaagtcaatcagtaaaacaatgataaaacctcggttaccataacttagaggctgtaatagattaacttttcaagggcacttgatataagctctgagtagactctttagagtctttattcacacagggttttaggaaaccaccctctttcataactactgtgtgtaaataacctctatttatctaatttgtaattttcctacagtcccctcaaaagggaacattaaaagaaatactaaaggaagttggaaagtttgtcaatgtaaagctggtctttgtaacctttctactcttcatttcctgtggcaattgcacttttatttcccgtctctctacactcagtaaacaaaaccatattatcaagggaaagacgtgagcccattaacattgtgagccctcagatttcactcacaagagacgatgcagcacttatctgatggagcagaagctctaattgcttcgaggtacaagtccatctaaacctctgagatctcacccgtccccggtaagcccttgcgccctccagacaagctcctcagtgaaagcaagcgccgcaccggtgcctgtgccagtctcccagaaaggagcataaggagtgttccaccaccactctggattctttattccaacaacccagccggaggggaaaatctgctaaaccaccccacaaggcagaaactttatcaaaatctggcactacaacactggccctcatcacgccgccacaaattgcgagggatagaagaaagctgcaaagtcacgttaaaaggaagcctagtcaaaaagtgaaaattttgtcccgccctaggcacacagcactcacagcataagatgtagttccatgagtcctaggaaagggggaagaaaggaaaaaaccaaacatctgctctaggtttagaagagggataacatcagcgccaagcaaaccgaaagcgcagaggactcagaagaggggaagaggaataactttatctgtcctggaggtgggcgaagagcagtctccaccggccgcgcgtcacgctcccatttaaccttttccatgccgcgacgcccacactccgccctcgagggactagccccccccacgatccagagcagaagcggctcgccccgctgcatccacgggccctcacccaagcgtccagtcctgcctttctccccccacctcgcccaatacctgtccgagagcaggcgttctgccctctcgccccgcccttgcccaggcagcccccggtcgcgacggctctcctcggggctcgggggcgctgggcggcggccctgggctgctttggctaacttggctgcggggcaggcgcgaggagcggcgcgccgaccgggccgagcggagaggccgcccattggccggccagcgccacgtggccgcccccgccggtatattaggccactatttacctccggctcactcgccatgggttggagagggcagctcgggtagagagggctggcggagcggcgcagacggcggcagtcctgctcagcctctgcccggctccgtactccggccccggcctgcgccctcagaaaggtggggcccgaaccatgagctcctacctggagtacgtgtcatgcagcagcagcggcggggtcggcggcgacgtgctcagcttggcacccaagttctgccgctccgacgcccggcccgtggctctgcagcccgccttccctctgggcaacggcgacggcgccttcgtcagctgtctgcccctggccgccgcccgaccctcgccttcgcccccggccgcccccgcgcggccgtccgtaccgcctccggccgcgccccagtacgcgcagtgcaccctggagggggcctacgaacctggtgccgcacctgccgcggcagctgggggcgcggactacggcttcctggggtccgggccggcgtacgacttcccgggcgtgctggggcgggcggccgacgacggcgggtctcacgtccactacgccacctcggccgtcttctcgggcggcggctctttcctcctcagcggccaggtggattacgcggccttcggcgaacccggcccttttccggcttgtctcaaagcgtcagccgacggccaccctggtgctttccagaccgcatccccggccccaggcacctaccccaagtccgtctctcccgcctccggcctccctgccgccttcagcacgttcgagtggatgaaagtgaagaggaatgcctctaagaaaggtaagtccgcgggccttggatggggccacctggggttggggacggagcctcccccgcggaaatgcgctgggagcgtggtgtcgctgcctttccagacagcggtttgggttttgtggaggagacgcgttcccgggcgaattccatggagtctgcctcgagtacagattcggaaaatgtgccaggcattgagaaaatttcaggaaggagctctccgtggaacttctcctggtacaaattctgttcctagggacccaggagggctgcgctgggactttgattctaactagctccactgctcacccacattctgtccccggcctcaggcctggctgacgccctgtctttacgttgcaggcaaactcgccgagtatggggccgctagcccctccagcgcgatccgcacgaatttcagcaccaagcaactgacagaactggaaaaagagtttcatttcaataagtacttaactcgagcccggcgcatcgagatagccaactgcttgcacctgaatgacacgcaagtcaaaatctggttccagaaccgcaggatgaaacagaagaaaagggaacgagaagggcttctggccacggccattcctgtggctcccctccaacttcccctctctggaacaacccccactaagtttatcaagaaccccggcagcccttctcagtcccaagagccttcgtgaggccggtacttggggccgaaaaactgtggcctgcagaagtcccaggcgacccccatccctatctagacttaggagctcagtttgggatggaggtgggagaacaaaaatgaatagggatttcacttgggaaatgaagtactttagttggcttccgagttccagactatatgtccagatattaattgactgtcttgtaagccacttgtttggttatgatttgtgtcttatcagggaaaaggtgcccagctgccagcccagctccgctgctatctttgcctcacttagtcatgtgcaattcgcgttgcagagtggcagaccattagttgctgagttctgtcagcactctgatgtgctcagaagagcacctgcccaaagtttttctggttttaatttaaaggacaaggctacatatattcagctttttgagatga

SEQ ID NO: 1880389 - DNA, 4001 bp, Homo sapiens
aatcaaactcaagaactccagcagtgcaggaaccacagacctctttaactttgtgctgattcctaggcatccaccctctactggctcccctcaacctggggacatccctcccccatcctgcagcaacttcgggtccatcagtagtccacattttggtagggctttgtttattcacaagtccacaaccctggaaggaactggctccctgggctgtgatggcgcctattctaaagacttcctcagagtggaaatttaggcaacaacagctcaatcgctcttttatgacaagtcaatcagtaaaacaatgataaaacctcggttaccataacttagaggctgtaatagattaacttttcaagggcacttgatataagctctgagtagactctttagagtctttattcacacagggttttaggaaaccaccctctttcataactactgtgtgtaaataacctctatttatctaatttgtaattttcctacagtcccctcaaaagggaacattaaaagaaatactaaaggaagttggaaagtttgtcaatgtaaagctggtctttgtaacctttctactcttcatttcctgtggcaattgcacttttatttcccgtctctctacactcagtaaacaaaaccatattatcaagggaaagacgtgagcccattaacattgtgagccctcagatttcactcacaagagacgatgcagcacttatctgatggagcagaagctctaattgcttcgaggtacaagtccatctaaacctctgagatctcacccgtccccggtaagcccttgcgccctccagacaagctcctcagtgaaagcaagcgccgcaccggtgcctgtgccagtctcccagaaaggagcataaggagtgttccaccaccactctggattctttattccaacaacccagccggaggggaaaatctgctaaaccaccccacaaggcagaaactttatcaaaatctggcactacaacactggccctcatcacgccgccacaaattgcgagggatagaagaaagctgcaaagtcacgttaaaaggaagcctagtcaaaaagtgaaaattttgtcccgccctaggcacacagcactcacagcataagatgtagttccatgagtcctaggaaagggggaagaaaggaaaaaaccaaacatctgctctaggtttagaagagggataacatcagcgccaagcaaaccgaaagcgcagaggactcagaagaggggaagaggaataactttatctgtcctggaggtgggcgaagagcagtctccaccggccgcgcgtcacgctcccatttaaccttttccatgccgcgacgcccacactccgccctcgagggactagccccccccacgatccagagcagaagcggctcgccccgctgcatccacgggccctcacccaagcgtccagtcctgcctttctccccccacctcgcccaatacctgtccgagagcaggcgttctgccctctcgccccgcccttgcccaggcagcccccggtcgcgacggctctcctcggggctcgggggcgctgggcggcggccctgggctgctttggctaacttggctgcggggcaggcgcgaggagcggcgcgccgaccgggccgagcggagaggccgcccattggccggccagcgccacgtggccgcccccgccggtatattaggccactatttacctccggctcactcgccatgggttggagagggcagctcgggtagagagggctggcggagcggcgcagacggcggcagtcctgctcagcctctgcccggctccgtactccggccccggcctgcgccctcagaaaggtggggcccgaaccatgagctcctacctggagtacgtgtcatgcagcagcagcggcggggtcggcggcgacgtgctcagcttggcacccaagttctgccgctccgacgcccggcccgtggctctgcagcccgccttccctctgggcaacggcgacggcgccttcgtcagctgtctgcccctggccgccgcccgaccctcgccttcgcccccggccgcccccgcgcggccgtccgtaccgcctccggccgcgccccagtacgcgcagtgcaccctggagggggcctacgaacctggtgccgcacctgccgcggcagctgggggcgcggactacggcttcctggggtccgggccggcgtacgacttcccgggcgtgctggggcgggcggccgacgacggcgggtctcacgtccactacgccacctcggccgtcttctcgggcggcggctctttcctcctcagcggccaggtggattacgcggccttcggcgaacccggcccttttccggcttgtctcaaagcgtcagccgacggccaccctggtgctttccagaccgcatccccggccccaggcacctaccccaagtccgtctctcccgcctccggcctccctgccgccttcagcacgttcgagtggatgaaagtgaagaggaatgcctctaagaaaggtaagtccgcgggccttggatggggccacctggggttggggacggagcctcccccgcggaaatgcgctgggagcgtggtgtcgctgcctttccagacagcggtttgggttttgtggaggagacgcgttcccgggcgaattccatggagtctgcctcgagtacagattcggaaaatgtgccaggcattgagaaaatttcaggaaggagctctccgtggaacttctcctggtacaaattctgttcctagggacccaggagggctgcgctgggactttgattctaactagctccactgctcacccacattctgtccccggcctcaggcctggctgacgccctgtctttacgttgcaggcaaactcgccgagtatggggccgctagcccctccagcgcgatccgcacgaatttcagcaccaagcaactgacagaactggaaaaagagtttcatttcaataagtacttaactcgagcccggcgcatcgagatagccaactgcttgcacctgaatgacacgcaagtcaaaatctggttccagaaccgcaggatgaaacagaagaaaagggaacgagaagggcttctggccacggccattcctgtggctcccctccaacttcccctctctggaacaacccccactaagtttatcaagaaccccggcagcccttctcagtcccaagagccttcgtgaggccggtacttggggccgaaaaactgtggcctgcagaagtcccaggcgacccccatccctatctagacttaggagctcagtttgggatggaggtgggagaacaaaaatgaatagggatttcacttgggaaatgaagtactttagttggcttccgagttccagactatatgtccagatattaattgactgtcttgtaagccacttgtttggttatgatttgtgtcttatcagggaaaaggtgcccagctgccagcccagctccgctgctatctttgcctcacttagtcatgtgcaattcgcgttgcagagtggcagaccattagttgctgagttctgtcagcactctgatgtgctcagaagagcacctgcccaaagtttttctggttttaatttaaaggacaaggctacatatattcagctttttgagatgaccaaagctagttagggtctccttgatgtagctaagctgcttcagtgatcttcacatttgcactccagtttttttttctttaaaaaagcggtttctacctctctatgtgcctgagtgatgatacaatcgctgtttagttactagatgaacaaatccacagaatgggtaaagagtagaatctgaactatatcttgacaaatattattcaaacttgaatgtaaatatatacagtatgtatattttttaaaaagatttgcttgcaatgaccttataagtgacatttaatgtcatagcatgtaaagggttttttttgtaataaaaattatagaatctgctgctctctgcttttcttacactctttaataatgattctctttctttaaagtt

SEQ ID NO: 1880390 - DNA, 4001 bp, Homo sapiens
cttcactcttgttacattagttcctctctctgctgtgttgttgcggttgcctcctattttgttcttcttgcctcgtgtctctcctttctccaatcagacacagcatccctgagttagcttcaaaatacataacttcacatcccagcttaaaacctgcagtggctccccagtctctagagagtaggtccagactccttcacgtgaaccctgtgcaacctctcttttcagccaggataaccacactccaaagtactctccttgttccaagcccagactttgctttttcctccctctttgcttttgcatgagttgtcctctctacctggtatggcttcccttcttggcctgaaaaacgcttatgtttcaggaacccgaattcacctcctctgaaactattttttttgacattatagtactactagtggctccttttttattagaggaacattttgaccacacctctgttatagcacctgtcatattgttttaagattatttctcttccccactagattgaagagcatacaccatcagtgacttgtctttgtatcccagagcccagcacagtgtgtataggagctgttcactagaaattggtgaaaggcaaggaggaggaacagactgaaccaaggacagcaggaccagtagtttcattgctcagtgagttcaggacactgtgtgaggcttaatgcttcagcttatatctatctgaagcaagatggtagaacatttttccaaagcaagttaattttccacccaagaggatgaagggagagaaggctgaaggaagagggggcaaagctgaggctttctttccttcagggactattttctgtggcctgaggcaacacatttactaacttcagaaacatctcagctgaagtcccgcagcaaaaaagggtaaaaggggaactaggctggaaccttgttaggatttacaaagagaacagcatgaccactccagaagggttataaaaatgcttcaccactaactccaccaaaccctcctgctgtaaacagctctaatgctagtgactaccctcagacacttactgtctatccctttagggtgttcttaaaatacaccggaaagaacggaggtaaaaatactggagtgtttcctccacactggaaagaggtgagtcatatcattgtgattggtgttttaagtatatttttattgttattttaaatggcattcaagtttagcttcaagttcaacagcagtcttagcctacttcctcccacacaaatactcctgccagtaaataggcactcttaaataaaacagtgcctgcaagaaccttctgacccattgaaattagtcttgccctgtcttcagaggtgtattcgtccctctctgggtgtagagcggtatttaagggtgacactcgggcacgcaggaggtgtggcagggggcggggaatgcaaggtcactgtggctcaggggcgggtgtgggtgcaggcgcgttgggaggaccctgggcgccctgggaagtccgagggcaggcggcagggctggcgggcagcagtgctggcttccgacgtgaggtggtgacggcgggccctgcgcccaggccctgtgctgccgaccgctgtcctggctgcgcagctccccagcaggcgccgggctcaggtcgcgccttcagttagcgctcagcctgcgctactgcgtctcctccgcttgcgatttctggtcggatcccagctggcccagacttgctctgaagtaggaggaaccgctgtcgagcgaaaagtgcacaccgggtgattgatgaactcttaatagaactaacctctcctgcccccaaccctagacacacacagagaaaacctccaccccagccccttctccagtcctcctcgcgggcgagaggggacgcggccgccagccggtagggtgattaactcaccgtctgtctttgcaaaagtgttccaggtggatcaggagcgccagcccaccccgcccgcagcctggccgctcgctgaggcgcggagagcgcggaacgagcgcgcgcatcacgtggcggcgcggacgtttgtgccgcgcgcccgccagaccgcccaggaggcggcggctattgttccccgcaggggcccggggcgccctgaaacggggtccacgtcagcccgctcccgagcgtgtcctcaggtctaaggacgggtggggcttcctttgtgtgttctctggaaggggctgggatggcgtcgttgctgccccaaggggtaaccgagggggattgagggaagatggtaccagctccctagagctcagctcaccagacctactcttccgctcgacccttgcagaggaggtggggacggatatggtatttgtagggcagcgctgtgaacaatggagccatcaaaaaggccttctcccagcctcctcaccaaccacggacattcctggcccaacaagacctcctggccaggttttgagccctgcttcccaggtaaaaacactgcctgtaccagagctctccatgaattttggtttaaattaggatttaaattcttctggcccttactaatgttaaaacccagcttttatgatttctccaggtagtattctttccttaaaataatccagactagctataggaaccaatcaggacattttgcccaagatctaggacagaaagactcatgcagtaactcctgccttacagatctggggacccttcacctgcctctactactgcaaatgattggatattcgtctgacttggctcttccctaatgtgtggaactaattttgttcactctgtttcatgctggacctggcctgaaaatgggcccttatattgtctttgcactttccaacttgccaaggtaggtgtgaaacctgagggaagtttttaggaataggctttaggccaggtacttaaatccatttgttcccaaccttggactccaaagataagggcatttgtagctggagtagaaaagaagggaacaatgagaactaagatttcatcctctgtgatgattcttatcattcaccgtccttcctctccagcatcaccagtgcagaaagtgcagaggacttatgtacccaatctttttttttttttttttttttttttgagatagagtttcactcttgatgcccaggctggagtgcaatggtgtgatctcagctcactgcaaccttgcctcccaggtacaaacgattctcctgtctcagcctcccaatatacccaatctttctcctttctatccaggccttctgcaagagagatctaagaaccagccctcaaagatggtaagggcttggctagtgacagcccagtctcagctccctgtgcccaaagtgtcggaacagggccactcaacccaagccctacatatatactctgggaagttgcagtgcctcgaagtgatcaggccatagtcctgtgaagactggggtcatccatgtcccttcctgcctactcacaaacttctgttcttcctattcttttctttcagtttctgaaagaaggaccaaagtaatgccaagaactcccagatgaagaggaccttccttagacctataacagattcactacttgacttcagagggaagtttcagctaattctcaggaaaaggtcaaaacaggcctgtgactgtcccttgaatactgaaggtataaacaagcttctggctcctccaggtcaagcagaggaacacttttattagaatgaagggttacttctttgttattcaaacacacacccacacacatcctctgtagtctccctaatgaaaaacctcaacagatggagagcctgagctcccaagtccgcaggctgagaagatgcacttcactcaagggccagtgggctggtacagactagggaagagaaaagggacaaaggctgctagtataggtaatcactatcttttaatactcctaacacatagaaattcgaaaaatcttgttcagcaatgttagcagcctgtgagcctcggaaactaatttggctgatgtgtctctgatagggagcttggggct

SEQ ID NO: 1880391 - DNA, 4001 bp, Homo sapiens; identical to SEQ ID NO: 3096

SEQ ID NO: 1880392 - DNA, 4001 bp, Homo sapiens
gaatgattggtaaggagagagctgcagtgcccaccacaaaaattttaggtcaatggaaatttaaatcaaaatatttgtagttggacagattccaaccaatagggtcatctggaataccttattaacattatttcttaaaggaatggcattcttaaaggaatattccatttacatcagatttatctggagacatttgttaaaatgaaattcctgggcccattttctgacccactaaataaacctctgagcgggacctgccatggaatctgcattttaatcatgtgtcccagttgcttggaacagccctggtttatacatgctgtcctggggtaattactagtagagccactttcactctcagaagtatcccagattggactgtacagtacgttttatttccctctctcacagttgacagtgcagagcccagcaggaaaagtctccagcgggtaatgagtcaagacttcccatctgtctggcaagtggaaagggcatgggcttcagggccagctcagccacgtacaaactaacttcagtgaatgcttcccctccctcagcccatttccttgcctgcatttttgggcgtaatagtgcctccctcacagggtggctgggggcctggatgggaggagtgtgtcaagggcccaaccgaggctgccgcccagggctgcacgatacagatcagtgctggcctctccatctcacttccatgctctctgagctgaactccgaaggccccatcaccagggccccatttgcgaaggcggcaccagacaggctgtgggaacgagcttcacagcttttgtcaaagtggcataataaagcccccaagtgtctgctctttgcaaactgggatggcagatcaattgtggcataaacaaaatagcaggcttggtgcgaacccagggacagatcacgcctctgcagggtgtgattgagggggaggaggagattctcagggtggctgggtttgccttttctctggctgaagctttgaggcccctctccagagcagcttggctccccacaaattgcaagagcttgggagactgcttctctactctgggaggcaactggctaggcagtggcacaagcataggccccagtgccctcagcaggaagcctgtcccagggtctcagcacccccccagagctctgaacctactgaccttgatgcggaagaaggatggaccatcctccacccccaccttgtctcccaggatgagctgagtgtgctctgtaggaaagcgaagggcagtaaagcaggcacagagagacctcaggaacaggacagtaaggacgctttcactggttgccctgtgcgctgtcggagacccttctgcctcacctgtcccttcattctgggcagatggtgttacacagctagtctagtatttagcatcatttggggcctgcagcactccctagctaagttgttatgctgaatgcaagctgaaccagggccgtaagaagaccccaggacaagttctggcccagactatatgcgccctgtcccagaggtgagcctgctggcagcaaagggggtaggatctgtacaaaactgctaagaaacccagtgaggggcctctaggaaggcagcctagagactgaggacaggaactgcatctgtctggttttccaccatatttctgagccttgcatgatactgccaacctgatgctgtccacagtaaatgtttgctgaaggaatgaataggtggatgttggtcttaccagcttcatgtctggtgttggttgccttgctgaggccctcggataaagccacacccttgtgaggagggagcatgaggccggtcacattctaggtttggtcatccaggaaaaaggcagatcctcaactggaaacccaaactccaatagatggccttgggcagaagccaggagtccagacatggaagagtttggaggagtcagaagaggcccccagagagtggaggagatggccttggcctcacaagagtaggtcaggcagggcaggcctgtggggggcctcaagaggccaatgagtaccccagctgtggtcagccaggcagactgtcacccagaagcagcagtctcctctgcacctcattcctcgcgctgtcctcaagccctgggtcaagtcttatgtaaatagcccagcttgtctgagctgtgccacggggaggttatgagtctaccttggcagactctttaggggataggccatggcccctctcccctgtgaaggggacagcaatgatcagtagaaaggaggccagagaggacagaggactcttaaggatgggagtcacaactctgagcagcagccactctcccacgaagatgctcccctggctgtggtcctggaggactgcaatttggtttcttaagaaaaatggagcttccttggtgccctcagaatacagtctaatgtggtggaaagagcatgaactttagatgctagcacacctgggtttcagtctcggctccaccatttccaagctgtggggacttcgcaactgcttttcaccctttaacctgcagtttctgcatctgttgaatggagctgttctcccccataggttgtcatgatgacatgcgatgatgcaggcagggccagcattgttaggtggtggctttcaccacaatgaagagaaaatccaggtggaaccagtttattaaatgggccgacactggaaatggctttgtctcatctattgtctttaagaactcccttttagattccttaacatcttgggtaaatgctagagttatccaaatagtttttatgtctttttgtgttttggggtttttgtttgtttttgagacggagtttcgctctgtcgcccaggctggaaggcagtggcgcgatcttggctcactgcaacctctgcctcccggattcaagcgattctcctggcttagcctcccaagtagctgggattacaagtgcactccactatgcccggctaatttttgtatttttagtataaacggagtttcgccaagttgcccaggctggtcttgaactcctggcctcaagtgatgcacccaccttggcctcccaaagtgctggggattacaggcgtgagccaccaggctcagccagtttctttgtttcttttctttctttctctttttttttttttttctgagggagtctcactctgttgcccaggctggagtgcagtggcgcaatctcggctcactgcaagctccgcctcctgggttcacggcattctcctgcctcagcctcccgagtagctgggactacaggcacccgccgccacacctggctaattttttttttttttttgtatttttaggagagacggggtttttgcatattggtcaggctggtcttgaactcctgacctcaagtgacctgcccaccttggcctcccaaagtgctgggattacaggcatgagccatcacgcccggcctcttttgttgttgttgttgttgttaattaagtaccagttttaagattgagactcgttctcagttgtttaatcaaatcttcaaattcacttctaatcagagcttatttagcctccccctctagctctgggctgacacatggctcaggggacccgcagtggatggggcatgggggtgatcttacatcactggagccactatcattccttcttaacttttgctggtggggctgcaaggctccctgttagaacaggcatatgtgctttcacggcatctatttatgggtccttgggagccctgcacagggaccactccctgccccattccctgagtgggcactgccctctccatccctcctcctgtgactccctctcatgctgtccccagccctctgcccctcagcctcttcttcctagggcccccttgctccagcaggcagccctcttgagcagtctcttcagatctcttcctttcagtatccacttgtcaccctctggtgacccatgtcaccctcacatctcctgatgaagcaagcccttgaagtacagatggcccctgggactgccctcttcctcccc

SEQ ID NO: 1880393 - DNA, 4001 bp, Homo sapiens
aacatccaaggtcatcagaactttttcaagggataacaaatggcctgctccagagggtgctgtgctgcttcctgcttcagtccacatccacttaggcacttactgggtgtgcagatgttaatagcagagaacttatacacaggtatctgatgcaaacatttgtaacatagtactggaagtgtaaagacactgtctttaaaaggatggggggtggtgttacctctttcaggaaggttctgaaggctgcatggctatgcccatgaggggaatgctggaggccagccaaggacatttactttcagggggagttcaccagagcagttcctgtgaaaaatataaagggaatgtgacaccggcctttgaggaaaaggaattattcttttttctaggctgatctgaggaagtcactcttttcctgaacaaatgtcttttcagtattgcgttgaacaaatttttcaattgggaaatatttgggggcaaggggagaggggagaactagaattaaactccataaaaatgagaattgctcttagaggaggacgtagagcaaggagtttcagaagggatccagaaaccataaccctgtctgtccagaaagatgtttctgtggagaaagaccaggtggtagagtttcaaacgggtatttcggagaggttgacaagtacctaaaaccatttgaagcctttaagctggttggtgattatcctactgcagaacctcccgggaatgggagggaccccaatttatgttggagtggtgtgttgggggcacattttcttggcctgcagatccctcgttttcttcccaaggtaactggggctggcttgcaagatgagagggaggaggggaaaccgaaagtggttggctgcctctggggacaggccttttcctgaggggagaggaggagaagccaagtgactagcacagggtgagagatgggaggaggtagctgtggggatcgcttccccagagcgtgagcagtacattgagttcatttccctccttcacgatggccaactgcgcagaggttttgagccaaaccaaagaaaagaacacacacacacacacacacacacacacacacacacacgcacacacacaaataaatcctagaaaaagaaacagaggaggcggggagggagggaagaaccacgaagggaagaaaaagggaaaggtgaagagggacagagaaagagaagggaggaaggagagagagaatggagagagagaggaggaggagaaggaagagaggaggcgggggagagagaaagcagaagaggaaaaaacatggcgcttgcgagctgtatgtgcaaaatccgcaaggaattgcagtaaattcctttttgtttgaagaaaatttacaacttggtaatagacctttttatgacctatttgcggtcgtcattggctgcggctggtcatgtgcaggcgccgctcgccttcacggcctttttcctgatttccccggcgaatttccccccgcattctgctttcccagagcctcaccccctctttttctaacctttgtctctgcagaggtgggctccagtcaccggctgcgggattgcggagtccgccgcggcctcggctcccgcccggcgcccggcctggccccaccgccgctcactcggtccgcatcgccgccacctccggagctggtggggagcccggcgagggagggcctggaaggggccctgggcgccgagtcccccgccggcgccgacaccgcctgccaggagcagccggcctgctcgaggtgactgcagccgcgcggttctggcgcggcttcttcaccaacatgagcgggtctctgcgtccgagagtgagcgcagccgggcagcgcctagtggattacagcagacgcccggaccgaccgccgcctgtagctcggcagccttcgggtaagaatcgccccctccccgctccccagcatgccaccaagaagcctggggcgccgacccccttgggcagctcagtccggctgctcccctacatttcccggggaagtggggggtcgctgtctaagccccttcccccaatcacttcgttcctagggcgtcccctggggcctggggtggagtccggctgggttcagaagtctaagggggcagtattatttcaaaaattctgagatacgggtagccacagacaggatcccactgcctagatggagagcccctcaatcctaccctaggaaagtgtatagacgggttactactgaacatctccactttgctgggggtcactaaaggcattttatatagagctgtggtttttgtggtttacctgtggccgtggccagaggttcctgggaggctaacaggtgttttttgagggttggggcttgggtgggggtggggtgaattctctgtttctaggatgtgcttggtgtttgaatctaggctttagtgactgatgctggttaatttctagggttgatggtttattgggccttgtgttgtatgagatggaattttaaatatttttaaatgtttctctagttcttagagaaatttttaagcaactcaagataggctcttcccgcatatgataatccgtcaggtgaatttggattcttttatatcacaaaatgaatccatgttttgggaggtaatggtatcagaatatatggtgcaggtcttggtaaaaacccaatagatctttgagaaatacaagacatctctgtgttgaaacatcgtgtgtttcttatttgccagagtaggaaaagagtagatctttttgctctctaaatgtattgatgggttgtgttttttttcccacctgctaataaatattacattgcaacattcttccctcaacttcaaaactgctgaactgaaacaatatgcataaaagaaaatcctttgcagaagaaaaaaagctattttctcccactgattttgaatggcacttgcggatgcagttcgcaaatcctattgcctattccctcatgaacattgtgaaatgaaacctttggacagtctgccgcattgcgcatgagactgcctgcgcaaggcaagggtatggttcccaaagcacccagtggtaaatcctaacttattattcccttaaaattccaatgtaacaacgtgggccataaaagagtttctgaacaaaacatgtcatctttgtggaaaggtgtttttcgtaattaatgatggaatcatgctcatttcaaaatggaggtccacgatttgtggccagctgatgcctgcaaattatcctggatcactaactctgatcacttacaaataagaaacttgagtgattgttattttatttggagtgtttgtattttgtaattatttctctactacagtacaatgacctttgaggtcattctttgatcggggtaaaaaacattccccattgaaaagcaggcacctggatagtggcttctaggccctgccaggtagattcggagcaggaagagtccctaggtcggatggtacccgggtgggtgtgggggtgtggccctgatggccaagctctatgttcagagcttcagtgcttttccctggttctgtagcacagcgcgcttgagtgactaaaaacctgggttgggtgcaggtccgattacgcagcagaggttgatgtcatgggcagatttggaagacttgaggggttctttgtaagccccgtggtagcattaattcttattggaacgaaatggtcgattgcatctaagggaaataatccacaaatcacaggaactctcgggccattagtccacaagaaaactagttcgtgctgttgccactaccggaaataaccccattgtttctgttaacctaaccaaaaaatgaaacgaaattttaaaacgctgggaccctgagagctgagaagcccagaagtataactcccagtgtccttggcccaaacctctgttctctcatagatcagggagccgatagcatgtccgggccttggtgacgacgggtcaggccatgaactgggcttgagatctctggcgaggaccaggagaaagacgaagctcgaaa

SEQ ID NO: 1880394 - DNA, 4001 bp, Homo sapiens
ttaggtcacgtccccgtactccacctcttcctcatggcatggcccggcccatctgacaggtcctctcataggcagagctggacgtgtgggctgggccaggctgggcaactgggcctctatgaatttccacagatccagagtcaacccagtgtggatccagtgagaacttatcaaacacctgggcacctgagctaggctagacatccaaggacgctgactttggcaatccttgttgggaccctggaaagggcaatttattgtctccacttggcattagaggaaactgatgctcaaagagatggacctcctggaccaaggacaaagagcacaatctggactctacacagacttgtttaggtgcaaagattcctattcaataaagggaagggaatccaggaaactgcatctccctacctccctgcccaatatttgtccatcaggctgcccaggtccccatgctgtggcaggagcgccgatgatgagtgctgcagagaccatgggaggaatgccagcctcaggccaggatagcagggcaggctggttacgttgggaggcctggagccagccagccaggccctgatagcttacagctgctccaaatgcaggaggcggaatcagagcctgccccagccactggagagggacgcctccatctgtgcttgtgttcttgggtgctgccagccccttcctccacgggagctgccaaggaaagagcccttttgtcatcttcccaggcaagaacagccatcccgtggcactcactccctgcacactccaaggcctcgcttctgcttcatggaaacaggattgagtcttgcttgaagctgtgcaccaccagaccacaaaaagcctcaaacataggtgtggccaccagccccagagagccacaagcactcggattctgggagccccaagacttggaagtttcccgtggcaccaaggccaggtgtttattgtcaaagttctggccagccatgcacattgctgacagtttctgtccctttggagttctggtcgaccattgtgtttgtttgtttttttgaggaagggtcttgctctgccacccaggctggagtacagtggcgcgatcttggctcattgcaacctctgcctcctgtgttcaagtgattctcatgcctcagcctccaaaaaatgcagacatgcgccaccatgcccagctaatttttgtatttttagtagagacgtggtttcatcatgttggccaggctggacttgaattcctggcctcaagcaatctgcccacctctgcctcccaaagtgctgggattacaggcccgagccaccgcacctggccctgtgtgatctttctgagagtttctgagcagcgaacaccccaggtggttgcatgggggaggctgtaaaatctgacagcagctagtgggtcctagggggacggttcaacatcacgtcccatggatggtccaaggacagaacagccccagcatccaggccagaaagctggccctggaggaagttggttcctatcctgtgcttctaggctggggtgaaggtttccaggaggacacctcccttggtcacactattctcctgagcccctctctcacatacgtgccctgctgctgcaacccccagagggctgcaaaaattagctgggtatggtgatgcatgtctgtaatcccagctttttgggaggctgaggcactagaattgcttgaacgcgggaggcagaggttgcatcacaaaatccgccacaacccctggatttcctcaagggattccctgtctggccatccacctcccccgccccgccccgcccattcctacttcccctttcgggcctgtccctctcttctgacctcccccatccatcacagttctagccttcactcacctgcatcaccgtagtgactccccgacagctctgtccctgcccggctcagactctcctatgcagctaggagtaagcccaggagagcatgtccctcctccgctcaagagcttccaagggcttcccatcaggatcagtttcccagggcagtcatagcaaatgaccacaaactggatggcttgaaaagtctcctctcacagccctggaggccagaagtctgaagttgaggtgtcagcaggaccctgcgccctcagagggtccttctttgcctcttccagttcctggcgttcccccgctggtggcagcaccacgcccatccctgcctcagccttcacgtggccttctcttctccactgtgtgtctcttacagaaacacctgtgattggatttaaggcccacctggataacacaggatgatctcatcttgagatccttaatttaatttcatccacagattccttttccaaataaagtcgcattcacacgttccaggggttaggatgcgaacatggcttttttgggggcaagaattcaacccacgatatcacctccttaaggaaaatcccaagtcattactctgtgcttcaaggcccttcaggatctggccttatccatgacctccaacctcccgctgtctaccccaccacccctgacctccagccctgtccccccactgtccccccagcacaccatgttcctgcttcagggccttggcagatgctggcctttcccccagggtccacacgcttcctccatcagcatcgtcaggtttagtcaattgtttggtatggccaggccctccctggccacattgtctaaacttgcaaccttcccggaacactccctcttcctcacctgccttctctcttccttaccactcatcaccatcacacgtgccggccttctcctcatttatgttgttcattgtctcccctcccctaggccacaggcttgttttgtcagttttgttcactgctgtgtcccagcggctagaacaacgcttgacactagttgaccttggctgaatgaatgagtgaatgaatgagcaagagtttgctcaggctgaactctgagctgccggaagcctttgtagacacccccagaacatgctggccccacctctgagctcctggtgtacctcggttctcatgaggcccccgcacttcagcctctggtgatcctctttttcgagccagacatgttggctcagccaacactccctgagcccacatcatgagtcaccagaggcccttgacccttcctcccacaaccttcccccactgcgcccgctctcaccctggtcacagttagccgagtgtgtgcagggaactgtgtatgaaggtcaggcctgccctgctgcccctgctggtccctggagccgccacggggatggaagagtgggtccttttgatgcactcaagcctgggatatggtcctccagggccggcattgaaggaatgtacaagggctgccccagggcctgcaacactaactgtgaagagtcccctaaaacttccctgatgaaaaccaccacagcctccatttcagaagagggacgtgggcttcttgccatgtctctgctgctgatgggctctgtgactggcacaatttccttcctgttgctggtccccagttttgtcatctttaaatctgggcatcgacccatcggggatggctacaatagcttgcatcttacacattccaactcagatggctctggctgtgccactgggttgagaaggattctgaggttcaatccaggcttaacaggaagaagtgcagtgatccattagtgacatctgccatgggtgtggggagagtgggggcccaggtgtgctaaggctgggttagatgctttgtgagtgggctttgggcaacacgtccacgtgagtctatggatgcctgatgatagagaaaagatcctggaggaggtgaatgggtctgaaatgagtggctgatggcatcacaaatcctttttgagcttactttggtgcattgaggcagctggcatggcctgcctgctgggaaggcatcaatgacccaatggagagatggctccttccctatgctggggttgaagttgcagggcagttaggctagggccctgctctgtgttttgtctctcaggtgg

SEQ ID NO: 1880395 - DNA, 4001 bp, Homo sapiens
ggagaaggcactgccttaatcaactttgcaaagtgtaaagtgaaaccgcacaatgctcattaccgcccaacccagagcctggctgtggggataatgaggctggcacggatgttaacatacggtgtccttggaaaaagctaggaatgcgtcagtatcgaagagctgcaatgtccaagaatcataagtaataatttgagaatcccaaagatgtttgtttacattggctattattgtaaaatagtcaaagtataacatcatgaaccaaaatagtgtcaaaacaaaatctgttccactgtggcacgtatgtgacagaaacacatgcacacaaagtacatcaaaaggctcgaactgtgggaggactcggatagtaaatcacttccagacttaatatcagaagagatacggtgcatccaacgctgtcagggacagagtcgcaggcagcattgcctggcctggggaaggccctccgcaaacttctggctggacaggaaacagtttacctccttcctccaaactgagggggctgaatttcaggaaggtgagctccacctcagtgccacccactctgcctccctggagaggcgtcatggggcgcatagctgtcacgtgacggtcagagactgctggccccaccagctgagaaattaatcattaattgaaggaaaaaacactgtttccccattatcgagcttttctttcagcttctaggcctgccccttccgctttctgaaatgcaaaggaggtagagattgaggcagaaagtaaataagatttgaatattgcctttcctggagttttctagttcattgttttctggagcaaatattttcaaaaacaagaaactgacacactgtggtcaaaacagaattctagataagctacaattatgtgaaaattaaggtatttaagtaaatagctgcaaactttttaaaacttagactgaaagaacgagttcttaaaagattttcagccaaaaaaaaaaaaaaaaaccttgaacccgtattcagtactagtgctgaaaagattccaaacctcatatgacagaatatttttttttccttagtgtgaagatgtctatcaatggctagggccacctatctgtcacaaagctttggaactcctctaggtgttggaatgtgacaccagaaatcacaattagtgcataattaatcacattactttgccacctacacggaagggcacagaccggcagcctttcaagggcagtgtatgtaaatgtagtttcaatatgcaaattctcctaattatttccgattaatacgatcattataatagccctgcctccttcttgaaaaggaaccctgaaagcgccctgcctgtgagagctccttagcgaccggtgaggttgggcatggtttgcaataagtactcattttcttgagtttacagtaatgcctcccgcgctgctccgggttgcaaaagcccacactaagcctgtcgtcgaatgcgtgcgtgggtggtttgtttgtgttaacataacttttccttatctgaagagacgaactcactctacaaacgtgactcttcagtgacaacctaatttgcgttttcactttcttctgaaatgctttctatctttcctcacgctctccctccgatgggttgcagtgaactgtggcttcccccctgcggtgctgaactcgcccgtgtagctgtgattttagagctgccgacagctctaaggtgtgtagggcttggtctgggaacacccccagggcaagggtcccgccgcgcgcttggaattagaattaagaatgcatatttaggcgcccagggtctgcccccttctccctcctccttcccctcccccttcccctcccccttcccctcccccatcttcccttctcttcctcctccctcctcctctccctcctcccgcctccctcctccccgccccccgcccgccgctccccgccccccgccccccgccagccccgcacttactgtactgtactctatttaccaccccagctgggctcgcgccccgcccaccccgcggggattggctgcgaacgcggaagaaccaagcccacgccccgcgcccgcgcccaccaatggaagcgcccgctcgtcttgatagacgtgccaccttccgccaatggggacgaagggaagctccagcgtgtggccccggcgagtgcggataaaagccgccccgccgggctcgggcttcattctgagccgagcccggtgccaagcgcagctagctcagcaggcggcagcggcggcctgagcttcagggcagccagctccctcccggtctcgccttccctcgcggtcagcatgaaagccttcagtcccgtgaggtccgttaggaaaaacagcctgtcggaccacagcctgggcatctcccggagcaaaacccctgtggacgacccgatgagcctgctatacaacatgaacgactgctactccaagctcaaggagctggtgcccagcatcccccagaacaagaaggtgagcaagatggaaatcctgcagcacgtcatcgactacatcttggacctgcagatcgccctggactcgcatcccactattgtcagcctgcatcaccagagacccgggcagaaccaggcgtccaggacgccgctgaccaccctcaacacggatatcagcatcctgtccttgcaggtaagacctgctccggggtccccgccccgccgccgcacactcccgcggtcgtctgggctgtcactaggagatccgtagcccagacggtgactttcgtatgagctatttaactttattttcttcagaatctgctgtagattgagctgtgcgtgaaattgctagtaagttctgacatgttaatgcgtctgtctttaaatctgaattgttaccataaacgtgtttaatggaacttgctggtctgtggactacaaaaaaaaaaaaaaaaaaaaaaaaaccctttctacttaacattgtcttaacctcgtactctttatcctctttctttccaggcttctgaattcccttctgagttaatgtcaaatgacagcaaagcactgtgtggctgaataagcggtgagtgtttgcttgtgccacccgtgggtaaactgcccctcggtgtgtgtgcgcgcgcgcgcatgtgtttttgcttgtgtatctataaaatgtctgatttggtaaatgcatgcttacttcgcggtgttacccgtactacattgtctcactagacatgaaggagcttgtagctttgggtgctcgagatcacagaacattttcctttaaaaggaaatgatgccaataacttactacgaaggcggccgaggaacgtgtgtattggctttgtagcaaatgtaatgccctggatcttcctacgagtcctctggtactatgaggtactaacctccactgtaattaatcttaccgccacaaattccatagtgatcctccttccctaaaactatagtcctctgggattctctgggctagttgaggattgctaccctgtgccttcaaccctgtgatgtgggatcccagacttccctatctgttaactaaagggctgttttcaatcaaataattgttacgagaagcagactggcgcctgtagcactgctgttggagatccaaataggagattgggttgggaagtttttcccttgagtctctgctattttaatgtttaatttgcgctgtcgaggcgagtgtgtgtgttgcatctggacgccagggtttgcccaatctttgagtgtttggttaaatgttcaaactgtggcttcctcccggcgccagtcgcccgcctctgcccttaggttacattctcttaaacatgcctttctcccccactctttcgcaggtgttcatgatttcttttattctttgcacaacaacaacaacaacaaattcacggaatcttttaagtgctgaacttatttttcaaccatttcacaaggaggacaagttgaatggacctttttaaaaagaaaaaaaaaatggaaggaaaactaagaatgatcatcttcccagggtgttct

SEQ ID NO: 1880396 - DNA, 4001 bp, Homo sapiens
agaaggcactgccttaatcaactttgcaaagtgtaaagtgaaaccgcacaatgctcattaccgcccaacccagagcctggctgtggggataatgaggctggcacggatgttaacatacggtgtccttggaaaaagctaggaatgcgtcagtatcgaagagctgcaatgtccaagaatcataagtaataatttgagaatcccaaagatgtttgtttacattggctattattgtaaaatagtcaaagtataacatcatgaaccaaaatagtgtcaaaacaaaatctgttccactgtggcacgtatgtgacagaaacacatgcacacaaagtacatcaaaaggctcgaactgtgggaggactcggatagtaaatcacttccagacttaatatcagaagagatacggtgcatccaacgctgtcagggacagagtcgcaggcagcattgcctggcctggggaaggccctccgcaaacttctggctggacaggaaacagtttacctccttcctccaaactgagggggctgaatttcaggaaggtgagctccacctcagtgccacccactctgcctccctggagaggcgtcatggggcgcatagctgtcacgtgacggtcagagactgctggccccaccagctgagaaattaatcattaattgaaggaaaaaacactgtttccccattatcgagcttttctttcagcttctaggcctgccccttccgctttctgaaatgcaaaggaggtagagattgaggcagaaagtaaataagatttgaatattgcctttcctggagttttctagttcattgttttctggagcaaatattttcaaaaacaagaaactgacacactgtggtcaaaacagaattctagataagctacaattatgtgaaaattaaggtatttaagtaaatagctgcaaactttttaaaacttagactgaaagaacgagttcttaaaagattttcagccaaaaaaaaaaaaaaaaaccttgaacccgtattcagtactagtgctgaaaagattccaaacctcatatgacagaatatttttttttccttagtgtgaagatgtctatcaatggctagggccacctatctgtcacaaagctttggaactcctctaggtgttggaatgtgacaccagaaatcacaattagtgcataattaatcacattactttgccacctacacggaagggcacagaccggcagcctttcaagggcagtgtatgtaaatgtagtttcaatatgcaaattctcctaattatttccgattaatacgatcattataatagccctgcctccttcttgaaaaggaaccctgaaagcgccctgcctgtgagagctccttagcgaccggtgaggttgggcatggtttgcaataagtactcattttcttgagtttacagtaatgcctcccgcgctgctccgggttgcaaaagcccacactaagcctgtcgtcgaatgcgtgcgtgggtggtttgtttgtgttaacataacttttccttatctgaagagacgaactcactctacaaacgtgactcttcagtgacaacctaatttgcgttttcactttcttctgaaatgctttctatctttcctcacgctctccctccgatgggttgcagtgaactgtggcttcccccctgcggtgctgaactcgcccgtgtagctgtgattttagagctgccgacagctctaaggtgtgtagggcttggtctgggaacacccccagggcaagggtcccgccgcgcgcttggaattagaattaagaatgcatatttaggcgcccagggtctgcccccttctccctcctccttcccctcccccttcccctcccccttcccctcccccatcttcccttctcttcctcctccctcctcctctccctcctcccgcctccctcctccccgccccccgcccgccgctccccgccccccgccccccgccagccccgcacttactgtactgtactctatttaccaccccagctgggctcgcgccccgcccaccccgcggggattggctgcgaacgcggaagaaccaagcccacgccccgcgcccgcgcccaccaatggaagcgcccgctcgtcttgatagacgtgccaccttccgccaatggggacgaagggaagctccagcgtgtggccccggcgagtgcggataaaagccgccccgccgggctcgggcttcattctgagccgagcccggtgccaagcgcagctagctcagcaggcggcagcggcggcctgagcttcagggcagccagctccctcccggtctcgccttccctcgcggtcagcatgaaagccttcagtcccgtgaggtccgttaggaaaaacagcctgtcggaccacagcctgggcatctcccggagcaaaacccctgtggacgacccgatgagcctgctatacaacatgaacgactgctactccaagctcaaggagctggtgcccagcatcccccagaacaagaaggtgagcaagatggaaatcctgcagcacgtcatcgactacatcttggacctgcagatcgccctggactcgcatcccactattgtcagcctgcatcaccagagacccgggcagaaccaggcgtccaggacgccgctgaccaccctcaacacggatatcagcatcctgtccttgcaggtaagacctgctccggggtccccgccccgccgccgcacactcccgcggtcgtctgggctgtcactaggagatccgtagcccagacggtgactttcgtatgagctatttaactttattttcttcagaatctgctgtagattgagctgtgcgtgaaattgctagtaagttctgacatgttaatgcgtctgtctttaaatctgaattgttaccataaacgtgtttaatggaacttgctggtctgtggactacaaaaaaaaaaaaaaaaaaaaaaaaaccctttctacttaacattgtcttaacctcgtactctttatcctctttctttccaggcttctgaattcccttctgagttaatgtcaaatgacagcaaagcactgtgtggctgaataagcggtgagtgtttgcttgtgccacccgtgggtaaactgcccctcggtgtgtgtgcgcgcgcgcgcatgtgtttttgcttgtgtatctataaaatgtctgatttggtaaatgcatgcttacttcgcggtgttacccgtactacattgtctcactagacatgaaggagcttgtagctttgggtgctcgagatcacagaacattttcctttaaaaggaaatgatgccaataacttactacgaaggcggccgaggaacgtgtgtattggctttgtagcaaatgtaatgccctggatcttcctacgagtcctctggtactatgaggtactaacctccactgtaattaatcttaccgccacaaattccatagtgatcctccttccctaaaactatagtcctctgggattctctgggctagttgaggattgctaccctgtgccttcaaccctgtgatgtgggatcccagacttccctatctgttaactaaagggctgttttcaatcaaataattgttacgagaagcagactggcgcctgtagcactgctgttggagatccaaataggagattgggttgggaagtttttcccttgagtctctgctattttaatgtttaatttgcgctgtcgaggcgagtgtgtgtgttgcatctggacgccagggtttgcccaatctttgagtgtttggttaaatgttcaaactgtggcttcctcccggcgccagtcgcccgcctctgcccttaggttacattctcttaaacatgcctttctcccccactctttcgcaggtgttcatgatttcttttattctttgcacaacaacaacaacaacaaattcacggaatcttttaagtgctgaacttatttttcaaccatttcacaaggaggacaagttgaatggacctttttaaaaagaaaaaaaaaatggaaggaaaactaagaatgatcatcttcccagggtgttctct

SEQ ID NO: 1880397 - DNA, 4001 bp, Homo sapiens
gaatgtctcagtgtaaagctgaccattcgttctattctgagataggagaaaaccgccctgtggctggaggcgagatatgctggcagcaatactgctctgttactctttgctacactgagatgtttgtgtaaagtgaaacataaatctagcctatgtgtacatccaggcgtagtacctttccttgaacttattcatgatacagattcctttgctcacatgtttcctgctgaccttctccccaccatcaccctgttgccctgccacactcccctcgccaagatagtaaaaatagtgatcaataaatactgagggaactcagagaccagcgctggtgcgggtccttgcacattgagcgccagtctcctgggcccactgttctttctatatactttgtctctgtgtcttatttcttttctcagtctctcggctccacctgatgagaaatacccacaggtgtggagggtcagacccccttcaaaaagctcatatacctctctaaacagttctacaggaataaatggaggtggctgccaatatcccttaagccacctcaaaaaccaagttgacaaggtgtatgcttttttcttttctctcgggaaaaataccagtgccctctggtgtccaaagtgcaccttgagtagtaccacgtagatcagtttatcttcaaagaataatgtactaattcaatgttagagataattttttaaaataaattttggaggctgggcacggtggctcacgcctgtaattccagcactttgggaggccgaggcaggcggatcacttgaggtcaggagttcgagaccaacctggccaacatggtgcaacaccgtctctactaaatacaaaaattagcttagcatggtggcacacctgtagtcccagttacttgggaagctgaaagaggagaatcacttgaacccaggaggcggaagttgcagtgagccgagactgcaccagcctgtcagggcaagactctgtctcataaataaataaataaataaataaatattggagcattaaattctgggcagcaatatacaagcatgctattgtcctacaaatcacaatataaaatactctttattttcatgtttttgagagcaatgaacacacaaaatataatctctggaggagactaaaattcttttttcaatccaccgttttctaaggcttcacatctctagtccaacttcattggatcacagataatcccccgccaactgagcatggtggctcacgcttgtaatcccaggactttgggaggccgaggagggccaatcacttgagtccaggagttcgagaccagcctgggctgctgaaacccatctctaccaaaggaaaaagaaaagaaaagaaagaaagaaaaattagttgagtgtgattgtgtgcacctgtaatcccagctactcggaaggctgaggtgggaggatctcttgagcccaggaagtcaaggctgcagtgagcggtgatcgctccactgcactccagccagggcaacagagcaaggccctgtcttaaaaaagaaaataataagaatcccattcattatcttctaatgcaaacaatcaatggagtttctaaagacctagacataggtggtgtcaggacctgcttctgtaacttttccatcctttgcattaggcagcgcggaaccccctaggcgaccccgcgctggccgggagcactctttcttcagccaaaggtacgttccattaccgcccctcgggggcgcgctaggcagcgggccggccaagctgccgccgcccagggcgccctgtcccgttcgcttttgtgccgacctggaaacactctgtggtgctctagattgttacaaagttcggggtggtgcagccccagcgcgccccgctccccggcctgcaggtggcatacaagtctcttcgctgtcgggattcgggactgaatctctgccgggcggcaaccccttcccccaccgggatcaccgggaaagtggcaccatggattctccatctttgactgtggccacgcccctctcgctgactccgcccatcccacgggaattggcgtgtggcgattggaggcgtgtcgggggcggggctgggggaggtgggctgaggaggcggggcctgggaggggacaaagccgggaagaggaaaagctcggacctaccctgtggtcccgggtttctgcagagtctacttcagaagcggaggcactgggagtccggtttgggattgccaggctgtggttgtgagtctgagcttgtgagcggctgtggcgccccaactcttcgccagcatatcatcccggcaggtaacctcaggctccaaggggcggccccggtccctggctgtggaggggtggctctaattccgcagaaggcaggaatggggtaaaggaaaaaagcgcagatcttgggtgtggagggagtcaaggcctgcgtgcaaagaagggaacaaatccaggtattgagaatgggaaaagaaaagggaaggaggggatgctggatgcttggatatgcagaaggtctgcttttgggcctgggagggagaaactgggcggtgaggaagttggatgcaacgacaaggggaaaatcaggtctgcacttgggttggaaaatcgaggggtggaagttgcaagaatgcatgtagaagactaagcctggagtgtaggaggaagaaaacgtgcagcagctgggggctggatgcaaagaaggctgtaagccgcagacgggcgtctgcaggcaactcaggcggcgaggaatagccttgaagccgatccctcgcgtccgccagggggcgtggaggggcggagctccagcggccttcagaggggtcgctaggccacacggggcgagagggggctgggggaaacacccccgccagttccgggtgcctggagtttaaaaggtcccagcaccagcgaggggaggggaggggaggggcgggcgtggagacctggaaggaggtaccgatccagccttgattgcagccctcttgcacaacggccataaggacgggtgcaggccaagagcaaggacatgcaaaccccaagacctgctaacgggcggcgaagcgggggcacgccctcgcacacgcagagataaattgtgctcccatgacctttatttggaaagtgcctgcgggcctaaaattggcctttgtcccaccgagtacactcagcactgtactttaaaccggataaactgggctgtctggcaggtactaaaaacagctaaattctcctgtgagtgttctgtatgttaacacttttattccttgttttgttttaggcgataaactacattcagttgagtctgcaagactgggaggaactggggtgataagaaatctattcactgtcaaggtgagaattagcaaattttcccccttcttctgtactttctttgatgtggcagtacagtgtttaactggtcttgggggcaggccgaggcactgcaagggaatgagtgaggaatatttccaacaacgaattccaacagcttccttgtttcttttaatacagtgtcttatctgcaagagatcctttttgcccagaaattattgtagttcatgaactcggcaaaaaacaatctggccaaaaacttgaggttgatgaaaataatattaaatggctcttttttttcattaaactactctgtattgttattccaggtttattttctggaattgcacaattatgttaggagataggattcagctacttcatatgagctggtgcctgctggtcttggaacagcccttccttctgaagttgggattgggttggagacaaaatctgaggggcaacaaaggtggagaagtcagtccagtggggcctcaagcccatcccatggaaatcagatccagaagaaatacaattatgttccacatggtagtaacaataaagcttcactgttttagttaaaagatggtaaaaatttcatggctaagtaatgtgaggaaaacctgaagcgtctgaagtatgcattatgagataaagaaagattactgcagaga

SEQ ID NO: 1880398 - DNA, 4001 bp, Homo sapiens
aggcatctgcagggcaaacccacaggcttcaaattctcccagcctggtatttgtgtaagaggaatgcactaccctgaacaactccagaggacaaaactcatgagtctggtagagctcagcatccccattataaacacggagcaatggaaatagacttgggtacattaagtcacttgtccaaggtcacagagctaaggaatgacaaataggatgtaaacccaagcctacacaatccttggttttggcactcgttctctgctctgtaaaagcatcaacacctggagctagaggggcctccagaagccattaagtctatctgcccacccaaacagtcttctgaaacccagcatcctctatagaagacaagcttaccccatcacgagatgcacactgccagtcttgggaagtatccataattagaaatgtctgccattttggatcccaaaatttcctccctcttaacttcatttattagtcatattcgaccctgtggggaagctccaaagaagtctgtctacaccttccaataactttgagagttagaaagtgtatacagaagagcacagtgtacctggacagagaagtgggaatcctgccttccttcctgccagcagcagggtggtgggcaggttacattacctgtgtgaggctcagtctcctcatctgtgaaatgggcataccctggtgtgcactacaggaggagtagatgtcacaccatatgtaatgagctcagcagtgctgcaaaaagaaagtgttcaacaagcagtagctctcatcagtgttttacagaagcagagcccggtactcagggagataaggagcttgctcaaggacacagttggaagacgtgatgagaaatcagcccttccaccatctgcattctgccgaattcctgctaagcgaccattccacagcccagcctgagaactcgtcggtattgtagttggcaacttagctaacaccagttactatactaaaaatatgtacaactttacctaatggaatccataagcctaaattcatagatccatattatagaacatataagtgttctataaatatttactttataaaatacacaatataaatgttgcgtgcttaacatataaacacacaattctaaatacatacagatgcatacacacgtatacatcttcaaggctgccaggaattctaaggtttttatctcagtgacagcatatggagctggaggttggaactgggttcctgtcttcactctaccattaactaactatgtgatcttaggcaaacacatagtcatttgctcaatctctgagtcacagtttcttcacctctaaaatacagaggttgggctggtgagacctcccaggtctcttgcaggtctaaaaccctggaactctaagtcaatctggatttgagcttaggcctcctcagtcctagatacagcttcagtttctaaagcatcgagtcatagcagacaaccactgaactcagtcaactctcttgccgaagtccccatggccaccaacggcagagccacaactcgggacttctgaggtctcctgggaactggacttccagctctgctgggctacctgctggataaagttaattagtaactggaagctctggcattagagcagcggttggttgttaacagacatacacccttaaaacaaattttgctttctgtcttataatctgagtgtgggaaacacctaaaatatttgagtaatcagtcatccagaaaacctgcccatctaaaataagacaaagacagaagaaacaaggacaggaagatctgagtaggggaaagacagccaatcagatcctggtacaaaggcatgtagcatatttcactcacagaagcagctttaaagtcttccttcagaagctctttctgttgatttgtatgagcgtcactagtttttaagagtagcagaatgtattttccagaggtgaccacaacagtatctcccatcccacatggtcttctagaatgtgactgtgccactctgccaccaagaggtggagtctaactcacctcccttgaatgtgggctggcctgtaacttggtgtaaccaatacaatgcagcagaagtgatgctgtgtgaactcttgagctagatcagaaaaatccatgcagcctccacctggtttccaaggggtgcttgcttctgcctggcttccttggaaagtcagccaccacgaagacagtccaactgccctgagaccaccttgctagggaggccacatgtagggcattggttgacaatcctagctatgctcagcctcccaggaaccctgcaaaggcaccagccatgtaagtgaagccatcgtggaccctccagatgagtccattcaccagctgagcaccactgtttgaactcaatcagacacatggagcagaagaatcacctagttgagccctcaaattcgtgacatacagaaactaggagttatcataaaatagttgtcatttttaagccactaagttttgggatagtttttcatgcaacaacaggtgaacagaatgctcaatcaaaagcagattccagatggcaaattggaaagagggagaaggctaggagaagaaaacacacactgaaaaaagcggcagctgattgcccagtaacagaggagacaggaaaaccattaaggcaggtgcgagaaccaaagcacacagccatttcgggattttaagcgcagacaccagcagtcccttccatgttactgtgccctactgagtatatcaggacattaaagcacaaaacaattgatgctcctaatgatttccttgaatcacaaagaacagtttaaattttgttcaaactcctctttctctaggatgggacagtacatgcaacacagacgcaatgaaggtaatattgcaattacctcccaatgtgttttcctccttgatattctggattcttctgccactacagccccaggaaagggagagagcaaaggcctcctcagaaagaggaaaggaagtgaatatgatgcaggggaagttccttcctggtaggaagtgtcagtagaagaaaaagaccctttgggctccagggctaaaggagggaaggtacaagaggaatcaggcaggcagtcctgcttcttattctgggtttgaaacctgaaggcaaagggacaagaggtaaaagagagagggctggatgcagaagaatttttgctctgcttccaagttgcatctctggaggaatcccaccttggtgaagtaaggggcactaaagaagaatggaaataatggtgtggctgttaggtaaaggggtgcttcactgatgggagagattcagaccttcccctgcactcccaggagagaatggaaggtaaactgagatctgggctgagatggggctgccatgatgaaagacaagatgacctgtagccacagcttcaggatattcagtgagtaaggagcagtgaggccaagtgggggaagactgccccacctcttggtagataaccacttccccaaggccctgagctctccaccttctgctcccttggctttcctggtgctcctcggagctcttcaggtgcagcaacaggtgctgtagcatcttttctgatgggctggtactcatgccctgctggttgctaaacattttgagtatcacctggacagtctaagccacagaagaaacaaggtcatggccaagatgcagagaacctgtggagccagggagaggcacagcggggtgacctcggatggagcactggctctgacaactgaggcaccagacctcgggttttcccagtcacagacgccagcagtagattccacaggacacctcatgaccaggaaggtccagggacatctccacagaagccagtgcctaccccaggtcagcacgtgtggatcagctgcccaccactccctggggacacaatgtccccctcttctcaggcttcttcctggctagaagaaggtgctggtgagaaactggaagagtgaacatctccccaaaagaaacaaaatgaaagcaagagaggta

SEQ ID NO: 1880399 - DNA, 4001 bp, Homo sapiens; identical to SEQ ID NO: 3157

SEQ ID NO: 1880400 - DNA, 4001 bp, Homo sapiens; identical to SEQ ID NO: 3174

SEQ ID NO: 1880401 - DNA, 4001 bp, Homo sapiens; identical to SEQ ID NO: 3180

SEQ ID NO: 1880402 - DNA, 4001 bp, Homo sapiens
ccaggaggggtgactctaaagaagcctctacaagggctctaacccccaacaaaattaaaaccagtgcttaaggaaagattaaacattaggtcagattaaaaacaaacagacaaaactcttctccaaaagtttacaaaattattaaggacatgatttgatcaccataacggaatatatcaacacatcatgaaacataattagaatgccttaaagtgcaaaagaactggcaaacaggtttatttagaccaaatgtaactgtatcactcatcaggtagtcaatttatgaaacttccttaccctataacataggctgggtgaaaatatcattagacataagaagggtttagattaacctatggatagcagctctgtaacaagggaagagaaaaagcaacgtcttgggaattggctcctaaccttcgtgtgtgaaaccaagaaaagcaaaatgcattactataaaaaggctattgttgccactgtcaagcaacccagagcactggactaatgtgataaaagagtcgtatcctgtgggtaatcttttaaaatcaacttttcagtctttttcttcaccagttaaataaccctctacgattttcccctttccacacgtcctactatctaagtggaataggttgtctgcttttcatttgcacgtcttgctttcctaactcttgttagctgtctcacagagatagccacattcaagcctgctatccttatgctgcttaagagatgcctgaatttaacatccaaatgcctcatacaatctcccccagtcaatcctgagaaaatcctctctaaattcccatctgatcactgcccagtgaggttaccagcagcccttagaagccccaactcacatggtactttcgtgctgccgccggggagtgacaaagagcatgcgggtggggcgggcactactggcatctgggtgggcactccaaggcttggcatagctatgatccagaaaaaccaggtccagctcccgttcatgcactgaaagctggaagagcagcgaggtgcccatgcgtcgagctgaagtctggaagtccctctccccaccccggtgggccatgtcagtggaggggcagaaagtcagagcatgggtatctgcatgctagtcacctgcagtgaaaagtttcagtttaggtcaattccaatatcctaaatttctcccaatctacaccatctaacatgcttacttttgtaacctactatcattcctattgagtatccatttcacggcagacctctggtggggacggttcgtggaatcccacaccaacaccaaaaaaaaagaaaaaaaaaactatggtgccacgagttgtcccatactcaacctctagcgaactgaaattacctaacgggagagctcaccgaccccaaggttcagaaagacctcgcgtggacagacagtaaacttgcttggccagcaccacttcctaggtgggcaggaagggttttgacaaacaggaaatcacaaatatgaattcgttgaaagctaaggatctctgttgcttcacaccatcctctaacgacaatgcgaagggagccggggccgcagctagagcgtgggcacccctaaagggcagggcaacgccggcctcaaaaaagcgaatcccagctagggctccacttcttcaagcctctcgtattgtgcgaaacaaaagttctgttaagtacttcgtaatattccagagttgtttacataaaaatgaaaactgcccccccaacaaagcctgtgacaaaatgatccccgtggaagccctttcaccctcacccccagtgaggcgtccctagcaaaccgcccaggaccccggctgccccgcaggcgttcccgccactgagcctccacacggcccatctaggagacagggctatgactcgcattttacagacgaagtcgccagctcggggaactgaagcgatttggccaaggtcatccagagttcgcgacgaggaggagccgcctggcccccgcctcccgcctcccgctccctggggcagggctcggcgtccgcgtcacggaggcccagacgcggcccctgccagcccgcccccggcccgacccgccccgcccgaccagcaccggcagccggccctagcccgggcccccgcatgccccgggagccctgaagccctcgccgagacccccggccgtcccaaccacggccgcgatccccacggcccgccactcccctcgaagccaacgctgctctcacccgcggtcttacggccgcgcgctcggccacggccggatccctaagcgcgtgcgcgttaacgcctccacgccccggcgctgcgggcaccgagtaaaacgcggaagcgggttacggcctgggaagggagaggcggtgagcggcaaagcccggaacggatgaagctccggcgcctctgtccggaagaggagagccaagaacacgcgagcatgtccgaagcagaaagtcaacaactaggctggagtttccccctcgcgcatattcagtagggaaagcgagggcggaggactaggctggcttctacggccccagttctcgccacccccaccgtgttggtcctttgtgccctctgggcggtcgagcacccaacggtccacctccaccagggcagccacctgaatttactcattaagaatttacctaatgtggctcacgcctgtaatcccagcgctttgggaggcctaggcgggaggacctcttgagctcaggagtttgagatgagcctggccaatatgatgagacccccgtatctacaaaaaattttagaaattaggtgtgtgtgatagtggtgtatgcctgtagtcccagctacccgggaggctgaggtgggaggatcacttgagtctgggaggtccaggctgcaatgagccatggttgcaccactgcactccagcctggacgacggagtgagactacgtctcaaaaaaaaaaaaaaagaattttgttactgaccctagattgttttgtgtggttaactttcctatgtgttttgtgtagagagagtagatcctcaaaatcagggacattaacctttgtatcctccagagaacatacacccagaacataggtaattgttcaaatgttgactgatcaataattggttatttggttgactgactgacaacatgacatcaagagacatgagacaagacagcaagagacatggttcaagatgataaatctcacccgggatctgtggctcatgcctataatcccagtactttgggaggccaaggtgggaagattgcttgagcccaagagttcaagactagcctgcacaaaacagtgagacttcgtttctatttaaaaaaagaaatggccgggtgcggtggctcacgcctgtaatcccagcactttgggaggctgaggagggtggatcacgagttcaggagtacaaaaccagcctggccaacatagcgaaatcctgtctctactaaaaatacaaaaattagccaggtgtggtggcgcatgcctgtaatcccggctactcgggaggctgaggtgggagaatctctcaaactcaggaggcagaggttgcggtgagccaaaatcgcgccattgcactccagcctgggcgacacagcaagactctgtctcaaaaaaaaaaaaaagataggtacagacatgcaaacactcgaaacattcagaaagccactcaaagctgtgttccacaaagatgagagggtaaactgagaagacggaaggcataggatcggggaagcagggtctaacacaagaagcagacgaggaattctgaaggtgatggcaaagagtatcccaggacaatagctatgctgcaggactggggaccactagtctcagctgggggagaagagaagaccaggagggagagccccggggaaaacaataaaactgggaaaatgcctcatagatttgaaaaaatcaaggaatgctatttaaaagtgctgtttagaaatatggagcttaaggccatagaaattatcacaaatagagcagcccctgccccacctctccctaccc

SEQ ID NO: 1880403 - DNA, 4001 bp, Homo sapiens; identical to SEQ ID NO: 3199

SEQ ID NO: 1880404 - DNA, 4001 bp, Homo sapiens
gagaaaagaaagcagtgagcagcacaggacggcagaagcacaaagtagaaatttcaaattcacacgagggcaaagggggacagcctcctggaaagcaaggaaaaataaaagtagagaagacccacagtgataaaaaaccatccttcgtgtatgaggctggggatttggtctctcctgccatcattttcctctcaattgggttttagtggaatagctgaaatacctcaaatggtggagctgcagatgcttccccaggggccatccatccagggaaaccaggctccagaagtgctgtcaccatgggtagctcgggccctgggagactgagccgcagtccccatgccgaagggagcccagagggaagcatgaagagaaaatattgtcctgagccacaatgaatgggcatattggaaaaatgtaagttacgggctccaagttcaggcagatgactagaggcggtagggttggttatctagagtccgttccttccctacttattctcatagcaaggaaaaaatgaaaaatatccaaaaagcaaaaaacttgggagagaaatgaaaagtcaaatgtatactgcatcgtaaatttgtcttttttcctctgcagccagagggaccatgcatagtttctcctttgctgcgttattgctggtaatttcatcttgacagcatttattctaggtagagggcagtttacagatgctagaaaaaagggaactcaacatgattcatgtctctgctgactggacaaacgatgcagggggagcagctgctctctcaagaaaggaagtggggaagcaatgttcaactacgcaaattcgaatcacatataaaggagaaactcctgatgacagaaatgaattcatgtccagggggaggtttctttccaaatagaatagattctcaactcccttggacttgtttgtgtggtacccctgcttacacatagagaaatcatgtagctgatgggtcacaaatagtagcagtctatgttattttaagcactgttattttaagatgctttcttatttgagcatcttaactccatgaaatatacaaggcaggtaccatctatcaccctccttcgacagacaggaaactgagccccagaaatgtcaaactgccagcctaagggaagaacaccattcaggggagacgggaactaaagcccagagttcttttctacaagatcacactgacacagtcatatggacacatctagggcaaaggaaaacaggtgtgtgtgagcaaaagaaactacgtgaaggacatgatttcaaacacctcataaatatcattagcaataaccactgacactgtgcagaggcaggcctccactccagtctgtcagtattaagcagttttcaggtgtatttaggctctaaataacaataatcctccattatttccatctgttgtacgtctgtttaactaaagttacaagcccgtactagtaaatttttttttttttttttgagacagagtctccctctgtcacccaggctggagtgcagtggcacgatctcggctcactgcaagctccgcctcccgggttcacgccattctcctgcctcagcctcccgagtagctgggactacaggtgcccgccaccatgcctggctaatttttttttttttttttaatttttagttgagacacggtttcaccatgttagccaggatggtctcgatctcctgacctcatgatccgcccacctcggcctcccaaagtgctgggattacaggcgtgagccactgcacccggccccatactagtaaaattttagattcccaactagaaatacccggatgactttctgctcaggttttacaaatgcatactagaggacaatccaagtaaccattactcacgtggatgtaagtggccataacttggcatacgggaactcagtgatgtagtgcaataagtggggatcaatcatacagttagggagactgaccaagcttcaaggctggccttcatggggacaatcagcatgatgtcagtgatgatggaggccagagggcattgtgcacatggccttgctctatgatgttgctcgagggaggtcagtgcctccagacagggtgtggcagcagaagcctccactggtgctatggaagtgagactggagattctgggaagcctattgctctggagtacagccccagccagggcctgggagggcatgggtcagggtgtagacgacaaaagagaatccggacaaaaccagagaacagtaaaggcttgccgctgaggctgattacaggccacacttcatgagagagccaaggccttccacatgggacaccgtcagcccatgcctactgctgggagaaccagggaatgcagggagcgccccaggttccagaccttctatcagcaaaacaaacctgcagaggcaggactgccacattccaatggcaaagctcgttcctggcctattagagtcgggtacaacatgggattttctcttttctcagaagttcatatccctcccacatgtgtgcagctgcctctgccacaggctaagtcaaaccaactgttgcctcatatcatcataagggcccatcagggataaatcagagttggcatgcaaagcacctgcctgtgacaccaataggagacctcaggaccagaaaagaaagcagggacaaagggttaaatgtaataacaccttggcagagcctcagaaactttaaaagctctttaaagcaggaaaatagaaaagcataaaaattataccattgcacaatgaagcaaataaaaggggaaaattatagataatacaaataaagaacaaattaccttttcgctcccagccaaatcaaccaaataaagtttcccactgagttttttttcagtctctacattctcttgtttaatatttatcaggaagatactgtgacttctagagctgtgttcattcatgtctgaaaaggaaaatagtttactgctctacaaagaacatgtaggtttaggtagcaatcctctcatttaaaaagcataacaagtcatgcctaatagatccatttcattgaagtaagtccagtcaattctaaaaattatctgagacccctgtttcttctgaaaaacaatgctcattctagaaatacaagattttaaatgtcttcaaggagcaaagaagttaatctaaaaatcttagtcaacagtttaagatatcagattttctagctctacctgaagccccatcctctaaattcctactccagcatgactttccccttgaagaattcactacctcctcccctgcctcactttaaattcctcagacttcatcatgattaatacatgatgtagtctatcttagtcatgtgcataagccttgccttatcagtaatatcataagctttcttaagcaaggattaagactttcctaaggaaggattaagacatacacttctacaacctatgctaacagcaaagaaggtttcaaaaattaaatatgcttcattaagatggggtactggaaataaaaatccttgcaaatcctcgtctttgtctgccaagcagacagagaccccagcaaccatcccattcagccttcaccagcaatcatttctcaaaaccatcttaccagattatatgtaaaaagccctaaagattcatttttaaaaaactgttagaactaataattaattcagcaaagctgtaggatacaaaatcaacatgtaaaaaatcagttgcatttctatatactaacaatgaacaacccaaaaaattaagaaaacaaccttatttataatagcaaaaaaagaataaactacttaggaataaacttaaccaaagaagagaaagacttgtacactggaaactacaaaacatgactgaaagatatgaaagaagacacaaataaagggattgattgaaagacttaatatcattaagctgtcagtattacccaaagcaatctacagattcatggcaatctctatcaaaatttcaatgacatattttatagaagcagaaaaatccatccta

SEQ ID NO: 1880405 - DNA, 4001 bp, Homo sapiens
acatctcagcctcaagctggcaaatcctgctttggatcccggcagaggaaattcagccgttcattagccttaacaagctgctgtcactaagcgaagaaattacacgagcagccacacaccgagcctctcacagccctccccccaagggcaagcgggtttctccaggacggactgtacaagttcacacttcctatgtgcaaatccggactgtcttcttggactttccatggtgcacactgtacaatttttaaatacccgtgtccccccgcccccacccaccatctttcctgcagaatgtcccctcagcagctcctaatcgctgctgaaaaaaaccactgtttccgcagcagagccagcactttccactgaccagcactttctttattccacttcacaaagcccagtgaacttgtcaccagccccacttcatcctccctgggacggctagccaacttggcatcggtgcccttcagcatcctgggagtttcttaactagtcctctaagacaaagtcaaaggcatggaagcacacatcagcctttgtccgaggttgtgctgcctaactagagaaggaccctaaacaaaaaagagaaacaaggacacgcatagagggtgttctctttctggagggatcacactgggaaaacctacaattcattgtcagcctcagctacatcttcccgtcctccttgagtatcttttgtcagtgggctcttctctcttttgcctaccttctaatctcaaaatcaagctcctattctttattgacactcgctaattactgaaaaacactccgctttgctcctgcccaccctcccccgccccccatccgatggtcataagcaccagttgaaacagatgaacctgatttcaggtatcaagtgggtagagctcatgcatgcgagaacgtggtccctgtcagcaatcgctcctaacaccccaaaccaccttcccacccggctcctccgaaccccagaagttcggcaggtctctgataggggacagcaaacccgacaacgtgtgcgcagggatgtgtgttggcgactgaaacgcaggcagctcgcaccggctgctcagctcggcactctacgaggttaggggtgggtggagaggtaagcgcagatgactgtttcagaaaacattttcaacaacagacagccaaaaaggaagaaaaaaaagtcaaacaaacaaacaaaaatttcaacccagagcccacaccaacgcagcccctgcgtctccgccgccaccacacgatttacacaagtaatttaaatcattcacctgctgccaggtctcctccagggatggtaaagctgagaagtagccggtgtcgtggacaagttgtagctcctggaatatactataactagccaacacgtccatgctgctgctgccgggcaaaacgggaggcgaaaccctcccccgaacacagttggggctgtttgtttgtcagtctgtctggctcaccccccaagaaggcagacatccagtggcccttttgttttgttttgtttcagtcaactaaaaaggaaaaaaaaaaatcaatgcaggagagggagagaggaggtgagagaggagcgagtgagtggggtggatggagagaggcatccagcgtgtacagtgcagacgactgccaggaaaaggggacttctccacgggagtaacaattcccttccagggctctaatcactccagctcgtggatcaggaagggggatgcaaactcactgacacgaagctgccatctatttctgcagcgctgttcgctcctaatgcaatctttgctctttattttgggaggttgcatttttttctctcgcgatcgcttctcttccccccccttcccttccctccccaccccccaccccatccttgctagtttgtagtcttccccctcccttttctcctcctcctgctcttccccctccccaaactccctccctccgttcggttctccgcgcagccgtgggatctcgaggagggcgtccattaggccgcgtgtgaccatgtaaggtaaacagggggctcatgaagtcactgaggaccaatggggagcccggagcagagcctggggcggggcttggccctggcggcgggcgcggattggcacgctgcggatctccctgctgccttacaaggcggtgcgaggcgagctatttttagagggctatataagggggctgaggcggccgcccggcggccgggcagcgcgagcgcaagggacagggagggtcgtggcgacactcgcgccagctcccgggacggctgggctcgggctggtcgccgacctccgaccctccactagatgcctggcagagcccggcgcgtccggagcccgcgcccctcagagggaaggggtcgcgcgtcgccgcggcggccctgaggctgacggtcgggaggtgaaaggccggagtgcggggtcaggacgcctcctggagggggcgcggcgcagggggccgcggggaagccgccgagggcgcggagcgggaaggaaggacagtggccaccccgcctccgcctgggcacggggcagggacccgcgcgaggcggtgccggggaggtcctcacgtactcaaaaacaagcagaaaaggcatccagggccccttcccgaactccccacgggctgccagggtgcagagaagaagcgcctgaggaggaagtgccacacaatgggagagaacaaaggggagcggagcgagaccgcggcctgcgcccgccccccgcttgcgcacagtccccgccccgccccgcgggcgccgccgccgccgccctccctcccgcgcctccttctgaccccgagcgagagacctggtcgggagtccggcggctagagttgattgcaaggggcctgttgctcgactgtgcgttaaagaggctagagggagcctaggtagacgtggggcgcaagctggagccggcagcttgcgagggggcctttacgtgatgaggctcaccatggggtctccagcgaggtgtctgcagagcttcgatggtgagaggaggaactcgatttctcgttttctggagttgggatgtagacatagagagatctgttacatctgagatgaaaaccctgcacaattcacgttagggttggccaattgtttgcttgaccttaaatggttagtgtggtttaagcttccccaaaatgcgctgtgagctgagcttccacttttggaatgattgcagaattcggtgcttaagagatgagaaacttcgttctaccagtaatggaagaaacgcttcaccttaatcaccctccttgtctttcccctccctttgactatgtaggactcgataacacaacatttgaaagattctactctatgaaataagcacagattgaaattcagtatttgccaaggaatattaaacatgaattactgggattgaggaaagcctgatttatttacttgttagtgtctggaattctgttggccagattcatagcattcattgtatgagtataattggaacatttactctaatgtagatgcagatgcatctgcaattagatgtgcaaggacgctgccagctaactagctgcacgactttgagcgaattactgggtcagaacttgtatctacccatctcagaaacagaaatagtgggatccgcgttgtctagttgttatgaagagtcaaaatatctttggtaactcacctagcatagtatctgacactattaggtgaatactaaatattagctatcattgtctccccacttgagctatgtaaactaataggacctttaggagaatatactattaatagaatcttggagatagaggaaaggtagaaaccccttgctagtttgttacaaggtctccccttctccatgctctcccctgacccccatgctatttcaactggggggatgggcaggaaccattgagaaacactagggcaaaaaacatgttcatgaataataggggaaggaaaggaacttgggtatagaaaactagaggcaaaaggtgaggcaagaccaaccatataatttggt

SEQ ID NO: 1880406 - DNA, 4001 bp, Homo sapiens
aaaatatcagattctggtgagaatgcagagaaaaggaaactcttaaacactgttgatgggaaggtaaattagtacaaccactatgaaaaatagtatgacgatttctttaaaaaccaaaaaatagaactaccatacaatccagcaatcctacttctgagtatttatccaaaggaaaaagaaatcagtacatgaatatgtgcacttgcatgtttatctgagcccttgtcacaatggcaataggacaatagcactatccaaacatccatttctctgttgatagacacttaggtagaatcaattcagtaaacaatataaccatgagcactgtctcatggaatttatagtctaagtgaggacaataatcaataaatgattcaattattataagctatgagtccaccaaatgaagtattgcaatatgggatgagaggagtggaacctactttagatagggtgataagtaagacccttctgaagagaggacttacttctaaggtaagacttgaaagggaataaaaacattcattcaaagaaagattagaagaacaattcaggaagaaagaacagcatatcatactaaagaatgaactgaagaaggccagaatgtctgtagtccaatatgtgagggggagagtggcaggagatgttgcgggagctcatccatttttcatcaatattctaggaaacataaatcactgggagaggacacactatgaaaataactctactcacacaccagtctgctttagataggccctctcctttacacctaaataaatatttacaatttgagggaagaaatggaatcagcctaagcataagacatgaggactcagaacttgttggttcctcatcctccaagctccaaccacaagttgtttctccctttgccaagatatctggaatttccagacttgcaatattaatgcacagccctgtacatggtcttatatacctatgatgacagcccagtcatgaagctagagaaatgcaaaataagaaattttgctaaaattctttagcaaaagctaaagaatatgaagactaaatctgagggaaaccctaaggtatattggatttaaccattattgaagacataaaaaggtttagtcagaaagtttctggtgcttctcaaggaattagtgacagctttagagtgtgaagaccacatttcttgagtgttcagacttaaaattctgtctttgtgtaagacctttcagactctgtttgctgaagaaagagactgaaatgtaagacctagaagtcatattgtaacattgcaggctaaccaggtgttgagagaccccttgctatttatttagccatgttgtaatgccctttccaatcccaaattcattcttgcttctagaagattattgaagtgggacttgcgagacatatagtctctttcaacaaacagcaatataattcttcctttacacattccagggaagaaaaaaaaaatatcctttccagctggtacacaggctgtgatgcactggaactacctgaatcctaaccgccaaaagggcaccagggaggattttaatatatgcagtacgagtgtgtcaaaaacagcatcttacgagagatttaatctgttcatttgaaagagtgcggtacaaatggtcccgtggggctcacctccagggccgccaacgatttcacacttgatgagaatcaatatgtgtgcttggtcttgactacaaatatttcattagaagctgagaaaagggcccctgctaccccattttgctttcttcccggctttactggtcccaatttcttccacgtcagaaatgcccatcacatttcatataaaagaatgtatccagcaaattaaaaagctagagacctcaagttgaaattaatacttacagggtaacaggtgtctcacattttaaaaatcctggcactggtttacagcagcataagagtgccctttgtgctgtttcctcctctagcagaactgctccaaacacaaggactgaggccgccagtctctcaagaatgcctaacgtgccatagggtggcctcctggagacatgaatactctcttgggcccgaattagaaaaccttgaccaggacaagtagaagcaaatgcactgtcagccatgggctattcttatccctgcagttgttgcccatcttcaaaatggagacagcgagactcatgctgtctgaagaccctaagacaggcttgacacagggtccctctgttttttttatcccacccaatgtcattcattttactttggaaggcagtattatttcttctccctatcaaactttgtattaaagcataacatacatttggaaaaatgcagaaatcttaagtgtacaacttgatgaattatcacaaagtgaacaaattcatgtaaccaccagctccttcaacaaattcatgtaaacaccagctccttcactacctgaccttcctctccactacccaacactcctctctactactatcctgtcttcgaataccatcaggtagtttctcttggtcttgaactttatataaatggaaccataacactgtgtgacactgatctatcttattacatgtacctgtagtttgttcattcttattgctgtgtagtgttccatcacaaggatatatgatattctatccattttattgctaatgggcatttgggttgtttccagttttgtgcaattatgaatatcattgctaaaaatgtttatgtacattttttttgagacagagtcttgctcttgttgcccaggctggagtgcaatggtgtgatctcagctcactgtgacttctgcctcccgggttcaagcaattctcctgcctcagcctcccaagtagctgggattataggtgcccaccaccacacctcgctaaatttttgtatttttaatagagacagggttttgccatgttggtcaggctgacctcgaactcctgacctcaggtgatccacccacctcagcctcccaaagtgctgggattacaggcgtgagccaccgtgcccaacctatgtacatctttatgcatatacatacacatttgtgggggacacatgactatgagtgaaattgttggcttttaagatatgcacatgtttagtatttattcttggcctttttgtcctggagggtgctttccacttaatttcccagaaaaatatcagctgccaaaatctcttttgccagtttgttcttggaactatgctaaatattgtaggatgatggtgagttaatgggcagtcattgcccttggacatttatgctctcaattccttctcaggaggcaaccaagaaggatttctgatcaatagtctgaccattcggttactgttttcttactgccacagccccttttcttgaggtagtctctgcatcgtgtgccctttcttgccatggtctgggattttctgtccctttcatactccctctctcttgccagaatcacatactacagcatcagaattacccagtgaagcaatctctgagcaattttaatcactataaatgtccttccttgagaaatcctacacccccacctccaggggaagcagcatgttaaccatgtaaagaatcacgctgactcaatttctacatgacttactatctgcttcataaaacaagattccggagcactggttccagcttggccctggatatatcatgacctctaacaaggtaactctgagagcaaaagaagaaaaataccagtcttcacttacacaagtattggatttattaactgttaaagaaacaatactagttaaaaacttagtgacgaaaggagtgtaaacattttaaaaaatcatctttattatccagtcccagtcctttatcaagtttgcacttaaacacccatttattcttaaaaggaaacagtttacattttaaaatatttttggagtacctcataatccccagttagaaagttatttatttttaaccgaaaattatttcactcatccctgttagtttcatataaagaacagctgacgactattctctt

SEQ ID NO: 1880407 - DNA, 4001 bp, Homo sapiens
aaatggagtggggccacaggaattgtcagaaatggaggcttaggctgtccatacaggattcagcaagtacttggggactgcgactagaagaagccagggtggggaataagtagctgaggaggagagggagctgatgtggaggagagcaagggcaacttcaaggaacaaaagggaagctgcaaggcaccagctccattaattcagcaaacattccttgtctgtatgccatgccagggtccttgttctatggttctctcagtggggtagctagaaacttgcccaacagacaggaacagacagaagccaaagcaaagaattcctgaaggtagccggcctgctgccaaacctgggacaaactgtatggaggcgcagcgtgtgtagccagaacccgagttaaaacctaggtcccaccctggccggtctgactccacggcttctaggggttggttgtgcgaagctgttgagggctgaaggcgctaaccatcaaagatggaggtcgggtggcagaagatggggtgggaggcagagagtgagtacagcgaaggcggcctcaactggataagaaaactccagacttgcgggaaaggcctgagctcgcattggacgctctggggtgccacagtcggacactgtttccgggagacctccgcctctccgcgcggatgaagaggctgcagacgccgaagaagagctcgagtgcgtggggcactgatggggatcggggtgggcacacagcagacggcctgggtacgcttctttcctgacatggtctccaaggttagcaaagcttccaaacgtttccaggcctccagcctggaatgcctctccccccgctccccgacctcttccaggaacaccccagctcagggctccccactccccttcctgcgaattgaagctctgtgggctttgcggtccgggcgggcgagtacctggcggccggggctgttctccaggagtttctgcgcgaaaagtttcctaggagtgacgggatggcgtgggctcaggggagagtagaaacgctcccgggggctttgcagggaccgagcagctgcgggagctggggagcagtctgactgggactccctggaaggccctgccattggggctgggcggcagctcggcgtcgaaaaagccgggtctgaagattaatgtgccgaggccggagaccctgaggaccaagtcacgggacttgcccttggtgactcacgccttgaggccgagcagcgcggaaggcgctcaggccggatctggggtggggcccagccgagccttggtcttgtctgtcagcagcggcagctgcactgcgtctcccaaggtggctgaagctggccagctgcgggctccgcgccgctcgtcccgggtctatgggtccattccccacgcccacccggaccccggggtcactcgggtctccgtctgtgccagggagggagaatcacgcccagggtcctctctggcttcgcgcgactgagaacgcgcccggacgcggcgcggcgctcctgagtcaaaggagaggtggcggcaggaccaccccagggcgccgtctgcacccccggacgcactcggccgtgctgcgcttccgggacaaggcgtcggttctcgcctgagggccaaaccttgcccctgcccaccttcctcacccccgccatttccaggactcacatccaaaggcgacagcaccaggatttgctcccgcctttggcacagaggaggacgggtccctctctcagcctggccagtctttcccagggcttgatgggaaaaaggacttccctagaagtgagtcttggggagttggggggagaaaagtgtcgaggagggcgtcggagtttcccaccgctggctgcttcccggcccgcacgcccgggagggtggcggtgggcgcgcagagatctttgcaaaacagcgtccagggcggaaaacaactcacaggcctgccgcccccaaagtcacgaaactaagatataaggaccggttcactccgcagtagcgctttctgaaagagaaaacaatcccagaagtgtgcgggacggacggaagccccgcctcacgctcctccgcctggactttgctccctgaactcccactgccctctcactccggttcacggacgtttcctaagggtggggaggaggggagcaagctcttcgctgagattgtccttgtccacctccccaagggggttattccgagggtcctccaaccctgctacacattcacagaattcagtggaatgtccgggccggcaatccgagactaaaggtcgtttattgagcaggcctccgtgccaccagtggggaacggggtcgagcgggggcggcccggggtggaggaacccgccgatggggtgtgtgggtgcaagataaggtgggggtagggctgaggggtgagaatgggaaatctgaaaggggaggtgtgaggaagcatccttaagcgggaatggggtgccttcccaagacagcgaatttggaatgtggggatctctacaaggggagggagcgcagggccccgaaatgtctgaatggacaatcaaaggaatctgagaaggtgggaaacacaagagactgcctgaaaaggaaaaccgttggccccgcggggccagcggtgaaggctggcctccgtgcatctcttgagaaggatcgtgaacagggagggttctacccgcgggtgggaagaggcgagcacccaggagcttctgtgcttccaagctggggtggggggtaacctataggacagccgagtgagtgtcccctccccaacccagaacaagttttaatctcttaatcttcctcattaatcactcaccctcctacccctctctgtggatccgatttcgccccagctcgagttccagtactgagaaaagtccccttctgtggccccacgatcccctggactagtccctggccgctttgacgaccttagaggggcctctgctgtcctgggcctcctccctttgctactctccacttccatctcctcccccaaactcatgtttaggagctgtccaatcccagtacctgagcccagctgcagaggggagaactaggcgggagagatggaaggggctgtgaggcacaggcccatcagcagagctccacactcctcacagacacacgtaagtaattgagagcagaggtagagacagacacaaaagccacatagaggatgcatgagtgaaggttgcagcatctgcttggtgatatgcctgggatgcagtggggcagttcctgctgcctccagagagctgctttattgcacattaagtgaaaccactaggatggtttccagggctgaggcctgtagcccgaagatctctccaggccctcccctgcccctcaccattaataaccatttaacaacgtcctgaggcagctcagctttccaccatggcctggctctgctctttgatccagcagtggcccatcagcctttaagtgtgttgctcagctttccaggagggcattatgtgaatgttgcgggtgggggaggggggttgttggagtgagccctttaccaagaagaccctatcaaggtgccttcccatctttgtcaaggagtctttggcccaggtgccttggatctcctaagccctgtttagggaaccccaattgcatgcagcagttgccccagggaatagacaggtggacactgcacagatggtgggagatgcaggggtctacaaggaaagtgacataatggacagtccaggagggactggcctggtttttcctgacactgttttaaaaagctagaagcacatcagtttctgacttccctgggcagcaaagcagcaagctcctcaggagtggcagggcttccctgctctaaggtgtgaatcctccagctgtttggggtggaatgtaggaacaaaacccataccctgctgggcctcaactgctgaggccccactgtccctgagctgccttcttcctacaaaggagggctgtgggtgcttacccaggtatgagcccagaaccagaataagtgtggcagat

SEQ ID NO: 1880408 - DNA, 4001 bp, Homo sapiens; identical to SEQ ID NO: 3263

SEQ ID NO: 1880409 - DNA, 4001 bp, Homo sapiens; identical to SEQ ID NO: 3264

SEQ ID NO: 1880410 - DNA, 4001 bp, Homo sapiens; identical to SEQ ID NO: 3263

SEQ ID NO: 1880411 - DNA, 4001 bp, Homo sapiens; identical to SEQ ID NO: 3264

SEQ ID NO: 1880412 - DNA, 4001 bp, Homo sapiens; identical to SEQ ID NO: 3263

SEQ ID NO: 1880413 - DNA, 4001 bp, Homo sapiens; identical to SEQ ID NO: 3264

SEQ ID NO: 1880414 - DNA, 4001 bp, Homo sapiens
ctgcactcaccagactatggaggattcaccaccagaccaggaagtaacagcctgggctccaaagtcggccactcatccatgcacagatgaggagaggtctcatgaagctaaggcacggtctgagaccctagctctttttataacaagtcatgagggcccttcatgactgggctcaaggaacacaaaaaggtcaacttggttttacgattgtctattgtttttcaataactaggaacagattgaaatagatatttctctgaaacagcactggatgaatgcctcaaggggctcacacaacctgttctaggacttggtgaccattgtttgtgtccatgttcaattgagttcaaatttaatatttaacttttcctccacaggtgtagatgataaagcaactccatcttggacgctactctaccatactgacttctgattaacccttgttctgggaatgcctctgagatttctactttttctactgttcattcttgcctctctctgaggggttgatttcaattgttacacattccttccctgtggtatgtaatccctggacctgggggataagggctcagggatccactatcccttctcatggctgccaaaggatatcacttctgtttgtaagtcccccttaaatatttctttctgataagccggatatgtcagccttcttctttcacctctcagcttcctgggctttggggttaagtttgcatagactcgctcaccacggaacatttatggttgacagtttttttcttttagcactttaaagatgttccattgttctggcttatgtagttttggaaaagaagtctgttgaaattcttatctgtatataatgtatctttttcccaatagctgtttttaagactttataaggatgtgtgagcaattggtcatgatatattttagtatggttttacgaagtttattctgtttcagatttgttgagtctcctatatccatgggcttatagtttttaccaaatttagaaaacttttggccatcattccttcaaatattttatgtctcccttttttctctgacttcaattacgtgcatcttagactgatatcccacaggtcactgaggcattattctctctctgttcggcaactttatttcctatactttgcctgtaaattctagccacctgtgcctcccagggtgccaatctccatctcctccactcagtgggggctctgtttgcttttgctgtccctgcacggtggcctggaaactctctccaggcagtaaaccggagcaatcacaggactaaattcatttgttttctttcctttggggatcatagttctgtgctacctgttgcaccatgtctgaaattagttgttcaatgaagtttgtgcattcttaaatagttatttatggtgggcaggcagttcctatagcttataatctttcatgggtggacacagttatacattttatatattttggtatgcctatttgattaatgtctgcccttctccactagactgtaaatttcatgagagcagggaccatttttgtttctgtttaacatgtttccttatagtatgtgctcaataagtacttgcacaataaaacaattatttttagaccaaaaatgcttatttagaatgaggaatcacaaaaatcatattttttaaaaatttaacaaataccatcaataatacaatgtccagacaaatgatataaaattgtaattatgttgaaggaagaggccacttcttaatatcagaaataaaaaagctgaattgattactttgtaagcaaagttagagctgtacctgtaaagcacagtctctctcagcaatgcagaattggtcttgtaatacagacttcagggattggaggattttcaaaaacaggaatgttggctgagtgcgacagctcatgcctgtaatcccagcactttgggaggccaaggtaggcagatcacttgaggtcaggaattcaagaccagactggttaacatggtgaaaccctgtccctacaaaaaaaaaaaaaaaatacaaaaattagcagggcatggtggtgcatgcctgtaaccccagctacttgggaggctgaggcatgagaatcgcttgaacctgggaggcagaggttgcagtgagttgagatcccgccactgcactccagcctgggtgacggagtgagacgctgtctcaaaacaaaaaacaaaaaacccaggagtgtttagggtgttttttgttgttgttgttttttaatgcttaactgtgaaagcaagtaacaccattgatggctggctaactttcagaagcttgttcactgaatagagtgaaaaactgttgctaattggctgatttcaggaagtgtatttactgatgtgaagttgtcatgattgattaggatgggtttaaaactggctttggtcgttatttgttgccatggtcagataataataattcctttctaggaggatagaatttttttttctcaatccccctttataatcctccatcagtcagagttgcagaaaataatctaggaattctccagagctttaccactcttcctgattcttcttaaagatggtttttattttcagtggtttgattttctgttacgtatcaatcaacatattcatcttgttttgtctttgatcaataaacatttgtaacactagataacagacactgagctatgagagagacaaaaataactaataataagatgggactagtgggcacttagaaaccaatcacccaatgtgttttctcaggcttgaagacaagtctcagatttgttgagtcaacaacttcctaagtctacctaaggtggacaggttgccttttctcttagttgtcccagcaccatttgttgaaaagactatcctttcaccattggatgggttttggcagccttgtcaaaagtaagttgaccattatgtctgtctttacaccaatagcatactgccctgattggagcagctttgtagtaagttgaaattagataccatgattcctcaacctcagtcttcttttccataattgttttagctactctagatcctttgcttttatgtataagctttagaattatttattaaatcatcaatttctatttcaaaaagcctgctgagattttgattataattgtattgaatttacagataaattgggggagaattgatatcgtaatgatactgagtgttctgatccataaacaaagtatctttctatatttatttacttatttttcttcattaatgttctgtagttttcttcataaaaaattttcacttagattttctctaaatatgtaatgatttttgatgccaccataaatggtagtgttttttacattgtaatttgtaatttataatttttattgctagcatatagaaatacatttaatttttgtatattgcttttatatactctgatattgctaatcttctggtattgtttctctagattctttggagcattctatgtagacaatcatgttgtctatgaataaagacagttttgtttcttcctttctaatctgtaaaatgttttcctctctcaccttatcgcacttgctaagcctccagtacaatgtggagtgagtggaaatccttgccttgttctcaatcttagggggaaagcattacactttttcccttttttatcagaattaaattttatttcacattgaaataaactgtgaaaaggatttacattttcccgtattacagcacaacatcttaatgaactatttcttgccgtaaataagatcttgttagtttgaataactgaaacaacagtttatgttcttcaaggtaaagcaaaatgacttagcaaataatagtttaaaagttttcaatccagacataaacatatggcttcattattaacatcctttatagtccattacaaaattattcccattatcaattagcacccatttacaaagttgcattcctaacatcattttggtcagttggaaaacagcagaaaaattagcaaagttcagaaatctcaagc

SEQ ID NO: 1880415 - DNA, 4001 bp, Homo sapiens
agttccttctccatccaggccctgttccggcggccgggcagatgctaacccatggggaccacacagcagccccacgaggctggcaggccctcagcctggcttctgagcctcgctgtaatcgcactctccaagctttgtggcattagggtgtggcagggcctgagatccggagagtgtggaccccacccacagttatctcaacacaaaaaaacaatcctgagcaggccaaacagaacctggtgggggatgccttcaccagggctgcatctggtcccagagctgctggtttgcagcccaactatttcgttttatttttttaattttctcaatatttatcttcttttatctataaacgagtaaggttctggggaggttttcttccttggaatcttgttctctcattttaagctgacttaatcttcccacgctacacgtcacatgcagagcgccaactttgaagttcactcggtgaccgactctcccgcccaatccctcggcgagggtgacgtgcaagcggaacatctcaaggctccagatgcaggctcagccctcagctgccctagccttaataaacactagatttttcatttcagaaactatgttcaacctgttgcctcaagacaacctaaaaatcgtcaacattagccaaaggttggaagccaaatgtgttagctcctgcctcagagacagatcccttagcagagggggtctctcagcagtagcccagaggagctgggacccaagctgggagctggtcacttacataagggcggcatcctaagtcgattttaaccccaagccttcctacggggggccggccagccaccgtgctgtgctgaggagcagattgaacattctcttagctgctccaattttagaattgggtgctgactcattattaactcaggaagcccacacactcaaatgactgtactgaaaaagctccctgtcataccctgcctactgatgtgttgctttttaagcaaatttgaaaaatgtttatcataaggtatttatgacattttaaccgtttcatttacagtaactagaacaacattaaaaaaaaatgtttcctgtattttacttgacagtaaagctaagcttcatcggaatactaacagcctgagaaatacctatcaagatcaagtcaggcctcaaagactgagtggccccctcctcagtcctccccagtcccccacccccagcgctggcccccagcatttttacgttcttcctgattttactacagtttgtgactttcaacgttaaggaaaaggaaaggacgtaaaatacgctcctgcaatcattcatatgcttttagagaaggcagccaaagttctgcctctctggtatttctcacactgaaattgggcagctctgaccacgaggccagaaatggctcaggagctgcctctcctccacctcggagaagcggaagctcacccaacctcagcaaccctgggttagcacaagtatacccacttccatctctgagcttcactttggcttctcagaggagtcccgagcagcttattttccagccaagcactgcagtctcttccaagacaacagaaggtgcaaccggcatctacattcttacaacgaaggactgagaaacacctcctgacagtcacactaaaggacagtaaccatggggctggtgacagaggcagccacttttctaaaacgacagatcttcaaagtctgaaagaaacgcagtgtcctcaccaggacgcagcagcctttcccacagcccagactccaaggcaaactgcagaagcaaccctaaaaatgacagaaacatactcaccaaggagaggctggtggctccaccttcccaggaactgtgctgtgaagatctgaagacaggcacgggctcaggcaccgcttgtctggaatgtcaatttgaaacttaaaaagcagcgaccatccagtcatttatttccctccattcccaatgatgtacacacgactaagaaggaaaaaaaaaaaaaggcgcacacctcagccttcattctcattggaacgagatgactcatgctgactcatagccaccacttcctctcccgacattctcttcatacttgtgagctggactggtccggttcccagggtccctgcagcccttcctggaagagcagccttcctgatcctctcagagagacccaaacactgaccccacatgggacccaggggtcgcccacacaggggaaatgctttatttaggagtcttgagaacaactggaaaataaaatgcatgaactttgtgtgcatttgaatttcaaatacatactcagattttgtaatgtgctacaggctcatgtatgaaattcttgctcttttcaaggcagttcagagtagagagaagcataagatattttcttattcttttaggtgttcagatttactttgctctggtaataactatttcggtgcctgttttcttctgcatgtattcctctgacataacaattcacaagatctaaaatcatcatctcttcaaagctgtctgttagcggggttcgtgccctgtttataagtttacatgacttacctcttttctatccatctttcagacttcaagaatattctagattcaaatagtaaagcaccaaggaattaaatgaaggtagagcaatccaactcttaataattgttggagaatgtttatctgcaagaatcaagaattgtcgctgcctcctggttttcttttgaataatgcagagggctgggcagcctcccacagcttcaagcatttttaaattatgagaagcactgggtgtgagcagaatccatgtgatccttagcagctgctcaagaaaccaccaaaggctgctgtgattacatctgcccaactcaaggtttctggggggtgacacagtcaaagtcatggatgaacaatggtgcccttggagccttttttggcttagtacctgatgctgtgtaggctatattctgatatagacttagagtaaataaggaaataatattttgtccgaggcatgagacccagttttcatctacagctagatttatcttagggaaaaaatatttattcctttgccacatctcaaatattttattgggaaattcagggcatttttttccatcaggcaataccaagtgcggtgagttccctatgaaagttgtagcatattggccatttggccaaatagtctcattccttgcagttttgtgttttatgggttttttcccccaggagagttcaaagcctgctggttttccagaatttaggaatgtctgtattgtgcaattcattgcagtgcatttcctttagagaaaagagtggagaacaggaaggaggcacagccccagagactgctttgagcccagcccctgtcatccacaaggggcttgcttgcctgaggccccaggggtgtggcagccccactagaagaatgcattgaccaggagctctgcagaggatgtgggttgttatgtttgttctctatgtggaaagccagcctttaccttctttatgaagacttttacttttattaagttaactcattaattcctaggagaactgaaaataaaaattaatttcaaaaaataacaccagggatgaaagaaagaaatgtgaaatagttagaaaacatgggctccaagcagggccacaccttcctgccatattagaagtggtttcttccacagtggcactgttataggagccttctggatcattctgaggctttagacacagccagggtcccgaaagagcaatttggactgccaccatggagagtgagtgaaactgtgtcccccccagtgtcgcattcaaagataatcccacaaatgctaaatcttaattcctgattgacttcagcccttctcatttggaaatgggctggaaagtggggaaaaggtgctagtgtgagaagagggaggccattcccaatatactaataaataaatcattcattgaggcatatgagcaccagccccacataattgctaatatggaactttctgggagtaga

SEQ ID NO: 1880416 - DNA, 4001 bp, Homo sapiens
attctgaaggccttgaaccacctgagcctggccagatggattcttcctttcactgttgtgaccattgctttggtgtcagaaccctatgggagagctgagtccatgaccagaatcctcatgcctttcacaactccaattagccaagagcatggcacggagcagaggtgctggtgggagaaaacaacacataggtgaaaaacctcgggattaggcatttcaaacaagaggcattcattttgcccgacacccagagttgccccataaacaagccagaaactcaaccaggcggtgacggaacaaggaatggatgagtgacaaactgggctgttgattctgttgtaactgaggcttgactgtattaacaagcatgcagtgattaaacagaccagcaccagaattttagcagctaccttgaagcctgctgactgacactgtccctggagcccctgttataatgaggtccttgtgataacttactcccttggatagagtccaagacaggcacgtgccctgtggaattccacactgtaaccaaccatacttcagagagattccagaataatgatggtattgcttatttaggctgaaggttatctgctcctcctcctccagatccctgccagccaagggaagagcatctcattggtgtcagatgacaagggtcttgttccctttactggaataagcttcttatgtcatacagactctggaagtcctgaaaagccatctgtcttggcctttactttaggaaagaaagtatcataacctgccacagcagtggggacagctgaagccgggggttactattcgcccttgttactattcatggaggctcttagggaaatgaccaaaaagctctttatggctcttgcaattaatcctgaaattctggttgtcacttgtgggtagaaacatatggtttacaaatgggttgatgattattatttcaaggaaaaactaaaacattataatgagagttataacataatggtgggacagtataaatagggagagaatttgtagtgttttcttgttcgttttgttacatgaatagacagctaggggaaaatggcattctatggggaactgatgggatttatttaatatttatttaaataaatttatttatttatttatttagacacctcttttttcccgtctaagttataaactaattaagagatggacaaagaataaggtaaaggaaggtcaaaatattaccttgggcagggtgcagtgtctcacacctgtaatcccagcactttgggaggccaaggcaggaggatcacttgagttcaggagtttaaaatagcaacataagaagaatctgtctctccaaaaaagaaaaagaaaagaaaaaaaggaggtgaggtggcacatacctctagtcccagctacatgggaggctagggtgggaggatcacctaagcccaggaggtcaaggctgcagtgagctgtgatcacaccactacactgcagcctgggtgacagagtaagactgttcctcaaaaaaataaaaataaaaataaaaattacctcagttcgtgaaaacagcaaagatgtgtggcatgactagctccattccctggaattaggaaatatcaccacacttatgatgaatcttacaaaacttaagccttcccactcagggagggccacatagacatgagaaagtagagcagaatgtggttgttttccaggggaagctggcttctaatgagaagggagggagggagggcctgggcttcctgtgcagattcatttcccttggttaccagcaggtcactcaccccacctccgtgggcattagccatgaggcaagaagtaagaggagtttagaaaaaaatccttgtttctggaaaccagagaggagggagacacggttcactcaatgagtaggaacttcaatggttaaatgtgtcttcttgtaacaaacatccatgtaactatttgaggccagaatgaattcttcctggtgtttctttaggtgatttctccaagggaggcctgtggtatgcaggggatttttaccaagaccagcgttctcatgagtccagaggctcatctgcccttagaggattggaagatttgcatccgcttccacaagctgctagcctaatcctctaaggttcaaatctgccagggatccataccatgaaggcagtcctcctgagtttgctttggagtctgacacttttcattatggacatcagtgattgacaccctgattgtacttagaatcacccagagggagcttttaaaaagtattggtacccaggcccctcctcaaactgagaaaactgaggactctgtgggtgagcctggacatggatggctttaccaagctctccagatgagtctaacgtgcaccctggcttgagaagcatggagtggcagtcacagaagcccaggttggcagctgtctcaggcaggaaatgtagaatggcagttaaaactgttagccctggagaagaatcctgatcccattccttactgagtgtttgttaagttacttaaacattcttagtctccccagggtgaccaaggccatccgtaaaaggaaatccactccagtaagtgagttgaagccttggtcttcatcatttatgatggtcaacggagaagtttccttttgtttgatgccacccttcgtgtctgttgcaaatggcaatgagccagaactctgccatgcagatgctcgggttatgcccatgccagagagtccagtgtggctcaggatcaatcaaaacagaaagtaccatcctaaagtcagcgtctggattttccccgtcaaaacattcaactcccatggtatatatatttttgcttattcaattcatattttgaattcatattatgaattagtcgaatttttagatatgcttagttgttggtccatgtcacagctatctagcctgtaaggaccatttcttcttgctcttatcttgagaaaatcacacactggtgcttagttaataaatagttcttgattatggaaataattatggccttggaagaattctgtttatataagcaagaactcttaggtcttaatcttgcaactgaaagggatcatagagacccaggtcttcaagttgaagggaaacttgccgagggccacacaggcactcagaggcaggcccagatttgactgttctctctccaagtccatttttcttccaactttatcatgttgcctccctatacaaccctctaaactacttctctctcttttctaaatccattttttttctgatttctctttctgccacaaatgttccgaatttatgaagaaagaaaatggagaaaagatttgagtagacatttctggtttccatgcttggattgcttcggaggattagttttactgttccagcttgtttctttatcagtttaaagggcaaaacaacttccacccttttgaggcagcaagaggtcagtcctctgccatcctcccccacggccaggcagagccaactgcagcccatgggtaccttccaccgccttcttccctgggatggagtcagacagacctgcagaggggcgaccactcagcttgggcagccaaggcaatacctgtcatcactgtagtgggcttgaagcccagtgtccttcactgccagccttgatggctttagctgtgaaaactctcctgacaaaggaggctctcacaggctccagtcatgggagccctacagccaggatttcaggaaactagggtggaatgggcagaacaagagtttgtccaacaactgaacaggacaggaggttcctactgcttggaaatctatttgtgtgttccagagatgtgcagaacaaagacctacacatggttattttggcaagaacaggaaggtttagattatccttttccaccccgtgaaagtggccacctaagatgtgagtgttgaaggaacatctgttttaacactaacagagcctcagtgagggtctcaccatggtcttcacttcacagacatagcacaagcaataagaaagct

SEQ ID NO: 1880417 - DNA, 4001 bp, Homo sapiens
gaatctggtggataagcagagcccatggtccattacatagaatttgaaaatgcctgatagtggttttatcagcctctcttgtagaaggagccaaggcctgtggccaaggctccaccagccagacacactggcccacaatttgagttaggaaccaatgactcaaggacaaagagactgagaaagccctcataggagatggcagcagctgcagaaagatggggattccaagggtgctggtgacagcgggttccagcagtgttagtatctgggacggtagcattggtgacataaccagtggcagctggggcagcagagatcccaccaattcgtgcaatgcgtgcactcttcttggctataaaccactaagccttcccaaacattcctggagctgtcaaagtctacacataaatccttcttctacttaaacccgccagagttccttgtgccctcatctaagagctgaacacaagtagtaacaagtgctcaatcaaaaggaaagccagacgaaggcatggagagtgatgagaggctaccttaggtaggtggccaaactcagcctctccatggatatggcttttaagtctctccagaaagcccgagagcaaggccacctgaagacctgagggaaagaactccagagagaggacacagtgcaaaggctgggcagtgacaagctggggggctgaggaataccaagaaggccagtgtagcctgagctgagacagaagctaagtcagaaggacaagccagggccacagttggtgaggctggttagattgtcgtgtggagtttgagtgtcatgctgcgtgtgagggaagccccagctggttttaagcaaggtgacacggtctggtagttgaaaagatcaccccggctgctgtcagaagaatagtctgtagcaagacaggagtggaagcagaaagatcagagactcttgcagaggttcaggagccaggtagtatgggtctgatccctctaggccgagggcgtttgagtggcggtggtgggaagaagaaagatgaggagtagattttgaaggtagagctgagaagccttgctgtgtgttagatgaagggtgtgaaggaaagagacagttcgggaccgagccgctctctgagatggggaagatgaagagaaaggcaagctggtgggtggagaagtcaggatcaagagtttggctttagatctagtgagtgggaaacaccaatgaggtggagtggagacagagtctgcagggggatgtaaggacctggatgaggtgggggcgagctgggcgctggaactaagtgtgtgggattcctcggcacggggaggaaatgtacagccatgaagctcaatatgctcactcagacgagagtgtggttcgagaagggggctcaggacagagcgctggggaaccagggatgaagagatcacagcgaggaagagaatccagctagggaactgcagggcgggaggaagaacacagactacggcgtcctggaagccaagaaaagaaaacaggggccttggcaatgaccctaggcacttccagaggatgcttgtatcaagcaggtaaggggactggggctcccagaggatgggccaccccgtttcagtgcatggcccggcgcctctttagaagaggaagcccctggattccagaacgtgctggctccacccaaggcagacggcagtgaggccacacactattcccagcccctttctctctgaaaagagccctttgtaacttctttgagaaggaaacacctccgtcaggggaggaacattatttgcttcctgttagaacagacttttacttaggatcaagctcggtgtcagccccatccccacagggagcaataagggaaagaggagggagggggccgcagacactcacttgtgggggctggtttcgcaggaacggctccggagagcttgaagaggggtaggctgcaggcccacagccgcagtctctctcagctagaaaccctcctccctcctctgccagcctgtcctccccgggctccgttcgaaaggcctgggagatagggagaaggctggtcagcctgggcggttagtggctggtttaacacttccttgcctgccagccctttcccaggaagactacagccaatcattcattcattcaaaagctctttgccaagcacctactctgtgctaggtctgtgcccagcatggggacacagtattaggcaaaaaaaaaaaaaacaaaaaccagacatcccccatctgccctgaacttacagtctagtgggataaattaaacaaggcacgcaaacacctctacagccacaaatgtgataaggctctaagtgaatatcgcacatgacagtggccctgctgaaggccaggcagaggttccttcttgaggaaggacgtctctgaatctccagaagccaatagaatctgtagcagcagaagaaagggtcaggtttctagaactgcccactacgactttagaagctgacgcatctctgttatgccgcggctgcgatgttttaagtccccaaagcccagagcacatcgtggagcatggaagtggttcactgagaagctgaatctagtcctggggctgctggtgtggagggtgtgttccgctcttggggcagcagcaacaggtgccgtgagaggctcagagcttttgaagcagaaatggcaatactctacatcttcagcaaatatttgggagtcttttgttaaaagaagagcagaataaatatctatgcctcttgtaaaacccaaaggaaagctctcagataggcttctttagggctatgactatctctgcagcttcactatactgagttaagtctgtagagcatctgtaaccctaggcatgtgtgtccacaacctccacacgtacacaaggacactcctacagaggacaggccgtgcggacagttaggggaggacagtggaggccgcttcagttcacttcggtgctttggattcaagtgtttttctgtttcattttctgggtagctgattattaagctaaacactcctttgatggttgaaaatacattagtcccttttcttgcacgaatctaattcaccaaagcctattaaagtgcttttggaccaatgaggaaatttaatgctcaagtattttattctgaattccaattttccttgtgttatgattttacctataggtggttgggttgattgtatggtaaagatgaaaaaaagcatatttggaaagaacatgacaattctcaaggtgtttatactactttactgtatttgatccttgcaactgccatgtgaattaggcaagaaatatttcagttttacaaatgagaaaacttctgtcctgagacattaagtgatatactcaaaggtcatataataatttgttttgtttttatcttgactaccatactcctctataccaccttcaggactctggaagtcagatatatgtgagttttttgtcaactaaattcatagttgtcttaatattcatcccttgctaaaattaaggtgcagaaataaaatctgtctaatagagaaatataaatccatcttttgtctggataatcaaattttactatattttgttttaatcctgagaatgaaattttacaaatagctcaggaggttttccctagagttccaaataaaagtgtgtggatcatatacacgttctgcttaatcacatgacggttccaaatttttaatttcaatccttcattacgatgaaaatttttgcgttttttttccaccagctctttgttttgtttttcaatggctcaggaaaggagaggggtgtgggagactctgtctcttttgacaatcaccagcgccatctactgtcaagaaataaaatcgtgactcattgttaacgcgtcaatgaacattagggcttaaagagggaaagacaattttataccccagtacttactgataaatataagttcatgtacacatatttttatcttatattattgtattcttaagcagcctatagggagaatacaatgaacttaatatat

SEQ ID NO: 1880418 - DNA, 4001 bp, Homo sapiens
gaggtgatgtttccacccaaaatctaactgtgattactgcaggctacaaacttatttggtaattgttttgcttcttgtaatttctttttataaaaccaggttctaaactcctctcacttcccatcatcaaattggttcagtttgttttagaaaacattttggtatttatagcttaatttctgctgaaattatactgcaccaagttagagtttaattcatttctttaaaggttgctactagtttaaacttcattatgtttcagaggtaatttgtccaccagatttgttttagacacattgtttttaaatcacaggtgcatttttaaaaatcaaggttttacataatttcaaaaaattgggtcatgttacatttactttttgtacacagttcagtttgattctccttgctatttctaaaaggactactattcaacagagctctcaaatcaatgcaactcattcagggaagaggtatttatgctctatcttttgcatccagctacaaagtagaactacagattgctacaggaatcataatactacagaacaattacattgatcatgcagtagatataactgggcaggtttgttgtttgttttgttttgtttttgagacagagtctcactctgtcatccaggctggagtgcagtagcaccatcacagctccctgcagcctcgaccaccagaatcaggtgatcctcccacttcagcctcccaggtagctaggactacaggtacactgcaccatacctggcaaattttttgtgttttctgtagagaagagatttttccatgtttcccaggctgatctcaaactcctgagctcaagcaatctgcccacctcagcctcccaaagtgctgggattacaggtgtgagccaccacacctggcctaattgggcagttttaatttcaaactaaaagttacaaatttcactaagcactaataaatgctaaaacagcaatcattcccaaaaccaaaactaaactattttaactaaaataacatctttttagttaataattcccctggctgtgccaaacaatgaaggatcatgcttgagaaaagagaagaagaaaaaagcactgtgatttgatgagatgtgtgctacccaactcaaacgcagttttgcctctttgctgtgggtgctggtgtaaggaaagaatccctctgggccccatgcatatcctcatatgtatcctcacaagcctggcccagatgatgttccaggttctttcctaatgactttttacaactattagtttactcttaaataaagagcagaattgggttcatttcagacctctgctttagatctgctgaggaggaagtttcttagtcacataagtatctatagctaggtgtattatcgccacatttggtattaagttgtgacttaataacataatgaaaatttagaatagattaggtttattaaataaaatgcatcggcctgttatgtcaagactgtctctgaaactgctaggattccgagcaattgtttgatggtatactcttacttgaatgtggaattgttcctgattggcttacaaaatagctccccaccgttcagagaccagggagctctattaatgtagctctgggaatgtgaaaggtcctacctgccaaggccttcactctgaccacagtaccttcactctgacctccatcggcaagatgctaaaagctgcacggagaactatgttctcccacttccccaggcacctctgataatttatgatctcccctagggcagtttattccatgcagcttatctttgttccaagtgtttttcatttgaaaattgcaaacagattgctaaactaacattgcaagtctttagggtcacttgcccacaccctaaagatctctaccattacttactggttattgctgctgaatgatgcctcctttatcttcatcctgctcttctgagtgagttttctgaaatcctacatcttgactagactcacttacccattggcaagtctgggctccccaaatcctccccttacagcctgtgcaatttgtaagcagtcaccctccctttatcctctttgcccaaagcttcatgtgacagattaaattcttgtaatcgcttttcctgtgtcattcctctaatccttttaccattctattttgcctttgtggtgtttatttctaccattttcaagttactttactttgtatggcaaatagcaacagatgcaatgttcaaataaggcagagacctgaataggaatttcagagactctgtgataaggtcagagctcccagtagcatgctgtgtgaccttggactagtcagatatgagataccttccaggattcacttcaaacctccctgtgtctttaaagaagcacagaacagatttctcattcatggaagagtttcacatagcaagtggtagatgcaaatgcttggaaataaatcgtaggcacttattccagccgtaattatttatctttaatagttaatgttttcaataaatgaccttatggatttctccatatcagagttgacttatttattgatcctgattattaatatgcattttggtatcagcatgtcatttccttgagggatcaaagcaaaagaaccccaataaatgtagactcattctcacaaccttgctgaagtccatcaaactaagggagggaagtaaaaatgtttaaaaaaatcctggaaaaattagtctgcttcatttgtctaaaaccagaaagaaaaaagtactaaagaaaaatgagagagaaagaaaaccatattgccatactgatcattcaaggttgtttaccagagctttcacacctgcctctaaccactgcctccctcaagccctccattttccagggatcagaggagggcaaatgagatcatatatttgaagtgtttggtctcctagtagggaaggggtcatataaatcctcaatgttgtcacttactattctccccatgcctttgaccttagctcactgaaagtaatttataactggttgtaagggctcctgagaacagcttcatccacctcagggggaaagaggccctagacagggagcacctggcaagtcacactcccttgaccacaggactcccactccgctgcttgagtaaacataattatcaagacaatagcagctgtgacttgtcttctggtgccaagaggtgagttattgtccgccaaggtgggaggctaaatcagaatgcaggcttccctccccacctgcccacgtttactccagaaaggggagtgagggggagtgacttgtgctgcttccgagtcctatcctataagccagctccacagaaaaatgttgctgccattgtttttattctttaggttcagggaggcaagaagggaaaacagatgcagaaacttcctttgagaaggctgataaaatgattaacaagcagtcaaattaaaaaaaacttagttatatcaattacctgcctcattttttgtaatcatcattttgttctgagtcatccagcccaaaaactccatctctacctatagccagttacaattctctatcagttgtgcctcctaaatagtatctaattcattcctttttttccgctgctgttgcctttactaggagcctagtatcctgattttaagaactcttcagaaaacttcaggctgggcatggtggctcatgcctgtaatcccagcacttcgggaagctgaggcaggaggatcacttgaggtcaggagttcaagagcagagcctggccaacatggtaaaatcccatctctaataaaaaaaaaaaaaaatagcagagcttggtggcatgcacctgtagtcccagctacttgggaggctgaggcaaaagaattgcttgagggtgggaggtggaggttgcagtaagccaagatcacaccacgcactccagcctgggtcacagagtaagactctatctccaaataaataaataaataaataaataaataaataaataaaaaggatcagcctagagcaaagatcctaatattggtacca

SEQ ID NO: 1880419 - DNA, 4001 bp, Homo sapiens
ttttttcatgaaatgttagcaaagctgagaatggctggagatggacagggcagtgtggaggggccggcagggtactggggagatgggagatgctcacatggaggctgtccaaagggggcttagatggagagctcctggatgctgtgtaaacaccaagtcctgtcaagatacacatcaccaagtcagtggctgctgcagaatgcatcttgtgccttcaccacttcagagtcagcttttggggagaaggtgaccctgggcccctgctcttggtcacctctcctgtcctttccttccttgacccccatgcaagcctgctcagtcctttgtctctggggagatcacatgagtacacgactgttgtccaaactgggaccttctagggacagcaagggaggcatgatgaactatgacgtgagaccgcagcaggagctggaccctctcaggcaaatacgcagccactgatttttgctccaacgtgagttgactccagtattttaatctttcactggaatttttcttttatagattttcttcatattactgcaattttaggaattagagaaaagatgaaaagatatgtttggtgacatagaaattccctctattccttagaagacaaaagaataatttccctagctctatcatgtatttatgatatgatttgcggaaattcctacaaactttctgtagctctatttcttcatttgcataaggcagtaataatactgaatgatactaacaagaaaagttgtgaatatttcatgagaaaattcatgatgaaggggctttgccaaatgtaaaatagctcctaaacgtctattgttttcgtcatcgtagctgtcatcattatcagcttctaactctaatgaaagctaagggacactctgaaactacatgctgaattattgatctctgttcatattcatttttaatgtcatcaaattgttgataatataacatttaacccttctaaacttcacttgaacaaagggtaacagggaggtgtgagttcagaaaagagtgggcacccaacatagactgacttacaatgaaatccacattccaatatttatgaggcatgaacattttccaaagagtgacatgggaaaatttgttttcttgattttatatgttcagcgctccaaaatctaacatggcaacagggtaagtgtgggggcatcattgaatgaacatgcatgaaaatgcatttacaatctcaaatctcaaaatacgacatgatgaagttgcaaatgggcaattgattctcaattatagaaagcgttggagagattttcttttgtgcttttagaatagcagagtggaggagaggtcctgggaacaaacactgcaggaggaggtctgtcctgggaatctacatcaacccacactttacgaccaggggaagtgatctcagacttctgggtgtcacgaggaaactggctgagctagattctctctaatattctttctaacactgtagcatcttgtgattattcaagaaaggaaacacgattaaacgtagagcaaaacacagcttaaaaccccatttaccatcacgttcttgagtgactgaggagggaaggagagcctctccattgtacgctcctctttcatgtcttaatgatgataatgtgacgatgattatgttgataaaacatgctgagaaaacctttttgtgtatagaataaaatgttttctatggcatttttctttcccagtgagaattgatttgaatcatgatgccttacacacaatttccttatctgtaaaatagtcataagaatgagatgagagatttggagtcaaatagaactagtttctatctgccagacagaactctgccaaattctagaaagtatccttattttctccatctgtaaaatgagatgaataccttatcgtggagcgcaatgtgtgatattatgtgcagagcacttaactggacgcctggaacacggtgaggcttcaggccacgcatgcttccttcattcaaactggcactcactgcggcacaccggccctttttgagcacctgggtgcaaagacaaaatgaacagtcattgcttttgctttcggaaatcttaaaggctagtgtaaggatattaattaaataatgacactaagttatgaagtcttctctgataaagttgtatttgatataaaatctgaaataaaagaactaataaagttgatgtggagaaagaatatgaatagctctgcatgcaagcagaataggaggtgcaaagatgcggggcaggaggtgaccttgggcaggatgactgaggcacagtgaacaaagggtaagtagcaagtgacaaggctgcctatgcctgaaccatgggtgtggttcaagtatgttcctgctctgttaaagaaagcagggaatgagctagctcagggattggtaaggtttttctgcacatggccaggtaatacatattttaggttttgcagacaatggtcctggtaaaaactattcaactctgccattgcagcatgaagcaacctcagatgatacatcaacgggtgggtggggcagtgttccaaaaagctgaatcttgaatttctgataattttcacatgtcaagaattactggtcttctcttgacttttcccaaccatttgaaaatataaaaattattcttagctcacagtctatagtttgctaaactgagccaactaattgttggatttttttctctaagcatttcatgttatgtccaagacacgccgaggacataggtgggagtggtaggggtgagtacataccagtgccagcctccactgtgcctgcaatctaagctctgacctagccaaaaagtctgaaagaattaacaactggctaattgaatgaaaaagtgaatcaaatatgaactgaatgaatgaatgaagtgagtggttataggaaagaaagtctgcctgcgtcctaggagcaggtgaactggattcaccttacccatcttcttgcacttacatttgctggacagtttttacaagaaaagcctcactttgcatagataattagaaacattttgtgacttaagagagaagagaggctggcctgaatgttattatggagcatggggacatgaaaaaggatccaaaaaaaaaggctgctggtctgtgctgggagaggcatcttccaatccccccaaaactgagttcagccaagttggcgtatgcaaaagcttcaccattttatctttcaaagaagaaacacgtcagggtaaaaacaagaagcctagcggttaaagataaacggaaagaaaacacacaattgctcttagtctgtcatttcccccacagagtagtaaataagagctttgatacataaaagcagttatcaaacagtaacaaattagttcttcaccatctgtgatccacgagagggggtgacagttttagtgcaagattttaaaatatgaaatcaacgatttatgaactgggttcagagtctccgtgtctacccggcctcttcaagcacagccacaagaaagcactaaggttttcagctaacaaaagccatcagtggtggctcctctctttaaaataggctaattactgcctgacatttgtaaacaagatgtttccttccatactgcagctcaccatactcaacatgctttctgttcctttagagaaaccagcttcacacaaaaggctggttatcaaaagaccctcaaggcacaggaagtgccgctccctggctaccttgatctgagatctggccagatgctccttgatcagcctggatactgcggtgccccaagtcttgctcttgggctcctcagtaatgctactggaacccaccaccttcctgtcaatcaagccaggcatcctcagttctccaggatcatctgtgttgcttggctgtggctgacttcaggcagggcccaggcaggcttgaccaagcagtgggtctcccaggtggcagggagcacctcatccccctctttctcccctatcctacctgaatcttccctggagaaatcaaagggtac

SEQ ID NO: 1880420 - DNA, 4001 bp, Homo sapiens
tgttcctgggagaaagggaagaatgaaaacctgtttcagcatcatggagtggaaggaatataggcttctgcatcaggcaaacctgcgtacagcttccaactcaagacattcaccatccaggggaccttaagcctcaggctcctcactgttaaatgccaaagagtcaagtgaaagagcttgggcaaagttatgggcatatggaagataacaaatggtaacaattattaactatttcaagagaaattaagtcaaggagggtagacttccactgagcagctccaagtgataactgacgtttatcacacacttactgtgtgtttggctatcttctctcatttactcttatttcatttactctgctcaactatcctatgacacaaacattgtcaatgtctgcattttccagaagacgactgtaaagcccagaaggattaagtagcttccccaaggtcacacagtaagtactgggattcaaacacagacaatcatccaacagaggccattctcccgaggaccaggacatatccaccccctccacagaagctggtgaggctcagggtttccatttgaggatctatcattccatggctccctgttgttgtttttcaccagggaagtcagagtagaagaaaagttgacaaatgtttatgaatgctgggaaaaattaaaaagtgccagagcaagagcggagtggagaattgtctgcagaatgagaaaacccaggtggcagcagctacctgcagacttgacttagcccagattccccaccaagcagaaactgaggccgacttagatgctaacgttttattgaaagatccaatccctgggcagaaacaatgagaggaaagggaaagattgaaagcaagcacaaggtcggtgtgtaaacacgtggtcattgcttcccaagccaccaagagatttaagggtccctgggccacgtggggcccctggaaacaggctgcacagagacctgccctagagcctgcccaggaggccaagggaggaagtggtctgccagctccctcatctcccaccttcgattagtcacagtcaccccacaggcagtgacacccatacttcccagggggtcatctagcctctccaggtagctacaggggacacagatccccctctgaggcatttcaccctggccttggaggggcaggggtcaggggccccccaagcctagtgcagcctcagccaccagagtatgagagtggccatgtggagtctgtcatcacctccaggggatcgcggatgcaggagggtagcagctacctgggtgcttcacaagtaagaacccaaggcccctggagacaagtgaggcccagagaactcaaggacccaagaggggccttaaaattgtgcctaaacaggacctggagtccctctgagaagtcatgggccaggcacaggaagccttgccaagctgcagtcctgggctaactcacaagtctaggggcttggaggggctccgtccaagaataccagagcttcctgggcacccaaagccgtagagtcaggccagctagggcagcacacatggctgtccccactcttaagactgatagaccagagcccaggccgcccccagagccaggcaggaaccattctgaccaccggcctggggaaggccactcttcccaagggctggtgtaaggaagaggctcctggactcggaatgagaagttgccaattcatgacctgcccggcctcctactagctgcacacctttggatgaggccttgaacctcttctctgcaaaagcaatcctagccgagccctgccagcctctggaacctctgtctcctcacctgtaaaatggggtaagggtccaggctggtccaactcctggggctactgtgaggatcacggggctttgccgatgaaaaccctactgccctgccctgccctgcaggcctgtcctgcatgcccctgctcatccacggggcccatgggcctgaggtcagggcgaggcatggccaccctagctcagtgtcagcccaacccttcctatcagagggaagcagaaattgccctgtgcagcctgcttcctgccccatgacaaggggcttccccttaagatgattttgtttgtcacagcccataaggggaagggtattccctgaaccagcacagccctttgatgggaccagggggcccctgtcctgggtccagcactcctatcatgaagagagggacaggagagtcgatgggggagggcacgagccttcccagggagacctgatcccatccacgccttgtacccaagcccccagaattcctagcctaaatgtctccaaacctacttccagggcccaagtctgatcccctggacatcccagagcctggggaggcccaaggcccacccctgtgggtggagcaccctgacagggaagagtgaagtccagggagggaggagaggagatgtgagagggggaagggaggccgagggcagcaggggctggaagcagcttcctccaaggccttctgctggcctgaagtctcaaggagtctgaattccaaattcgaacctagccatcaaggtcaaggtagtaggagagaaaccattttactcaacaatgtataagcaaaatgtgtcattttttaaatatgaagatctttaccatgtgggccccattcgaactcttgctctggggacctgcccatgttcaggagctatgtcattttactcagcctccttccagcaacttccaccctctgctgccccaaatctcaaagcctcaggtgcagtattcttctaaaacctggatactcccttctggtccacagggcatctgttctaaggcatcccccttgccttgatcatgaagggaacgtcctttgaaaaggctgccgtccaaaatattccctgctgtccattcattcactcattcattcctttattcaacaaatgcttgagtatatccttctgtgccaggccacactctggagatagtgcaatgaacaacactggcagaagcccctgccctcatgagcttctatcctggtggacaaagacacacagcaagccggtgagcatgtgagatgaacagagcatcaggaagggccaccagcaccctgtgcctgcacacccactgtgactgcccatggctgggggcctggcccactgtacttcacatggtggacaatgaggccctgtgaggctccttgtggcccctaactcctaagtgaccgggctgggattcccactcagatggtgctgaggtcaaagatctcaaaggctttccaccgccaggtccctcctgagtcaggactagcattaattataataacagtatcaattagctcctcttggctccaaaatataatggctgcttcctctggtacaatattaggagcaggcaccagatgaaaaagcaaacggatcgaacaccacccacagagataaactggcctcgtgatcaatgatggtggatttttttttcaacacagataaacaggaaaggagttttggttttgaaactcaaacgatttccttgctgtagccgtatctaggttgggtatcgaagaaaacaaaaataattctgggcacagaaggaagatggaatatttctgcactcaacactgggccagtttggctcattcccagacataaagaattctggtgtccatttttaaataaaaataaataaagcagttcaacccagatgggggtgccagcagatgtgacagaaccatggagagtgggtgggtggtgtgcagcacttggccattgctgacagcagccctgttgtgaagtacacagctgggaggacggcacaggtgcgctcacatggccggcattcccacaggcccgcccactgccttgattgcgggccacggctgacggctgaccgcagaagcctcccaaaagaggaggcaggtgtgggagggtggctgctgccaggccaactcccctgcaagggtcagtccctgctctctctgcaaggtcccctgcccccagcagccctggctccccttcaatccaaggctcagct

SEQ ID NO: 1880421 - DNA, 4001 bp, Homo sapiens
tcttttccaaaatttgatacctattttgcgtaagtgtacagtaaaacaaatttaggctgtcatgatggagtctactttcctctctcttctactgaaatctcctttttgtcatcttcttgaaatggtcattttaagtcacacataaaaaaacaaaacaaaacagcaaatagaagttttatgggaatggaaatgattcacggagagctggttgcagcagggaactgggcctcgcttgcatctggagatcagggctctgtagagccagtacttgcccctgacccagccccctttccagcagtgtttatatgctttctctgcttcagctgatcagaggatattccattctaagcctttcatgggacaatgtttatgtgattttttttttcttcttctttgtggggaggattcctccctgcctcttggagcttagcagcactaagaaatgtcatcctaaggtcacatttagattaaaacccagtaaaacctgatggacttgttatagcaagtgactgtgagggacactcacagtatgatgactgtggcttgctagtctaccatggggacaggaatgagggtgggtcacaggaggtcctaacggggaggcaaatctgctttagcagcagctcgtttcaagaggctgggtgttgcggcattaattctcctgggttgggagcctgggcagggtgggtgtcaagtggctctggcaactggaccccttcggggttgccctcaggatcaggatgaaaagggggaagtcaggctggagcagcagcgcggttcacgcagagagcaccccaggcagccacgaactggcttgctccgttcagatttctcttaaacagcagttttccgtttctgttctatggcctctgagggaatttcccaaattaaccttcactaagctttcctgagggactgtttttgagcgctgatgggggaatttcccccttttgaccacactgttgcccggagacttgttgctgctcttcatctggggattttctcactggcattttgctacttcctgtttcccaagagtctctgctctctgggaactgaagatttatcaagagaaggggacaaacagcctttaggaaaaaggggaggagggtgtatttaatacagtggtgcttttcttcccctcctttagttctttgctacagtaacattggatttgaaaatcaggcccagggagcttgctgagagcttcggattgattacgctaaacattccacaggaacttgagttgtacggtgtaatcacaaatcacataaatgattgttttattagaatatctatcctctatttgggatggatagaaacccctgtgttaaaagaaaccactaaagaaatcattactccttttacttagtgaaaatgcactaccacttgttgaatgtttcctgtgtgtcagccatggcactggggctttgcatacatttctcgtctgatgctagcaacaacctggaggagtagggcttattcagactcatttaatagatgagcgaaccaagcctcgaagaggctctgagaggttaactgacaaccacattttcccggctggtattaagcaaagctccaattctgtggattcctaaagcctatgctcatatttactcagctataaatttgtattgaactggggatttgtttcatgggtctcttaggtgctattaccaggaaagcagcaggagagaccccgagaagaagcagatccccaaaaccagaggtgaaaatattttagggagcagtattgatagtccttggcttaaccctgtgcacttgccaggcccttttgccatgtcacctggaaaaagctgctgacttgaaaggtgacaggaataaatatatttaaaaagcttcaattgaacgaattcattagttctttctcttagagaaactttccacctaaccactgctgtcaccttgctacttcctaccctagctttgtacattttatcaagggtattagaaataattcccctggggacaggtcccagaatctctctggccctgctctgtggaagttgacatctagagaaaataatgttctggaattgctctacctccttgactcttgatgctcttaagccagatgagtgtctgtgcatgcatgtgtgcacgtgtgtctgtgttcttgtggtatgaggttcttgggggatggattattagccacagttgacctttgcaaagttctccaagtattaaatattttcacttccactggaggagtgatcagcatacacgagggggtgctggaagcagcttggggagtgacctggctgttcctgggagttcctgaggaaagggggtgcaaaatctgcattggtgccccctgcttcctgcacactttgcagcagctcttcctctccagggtttgtctaggagggctcctagctgtattgtcttcatccacatagtgaactctgataaccaccaaatgttgagagttgactagttgcctaatagtttacctgcattgacttaacttgatcctcacccatgaaggtaggcaaaatgattccgtttaaaacaaaacaaaacaaaaacagtgagaagaccaaggccctggaaggttaaaatggcccaaacctaccggccgggcgcggtggctcacgcctataatcccagcactttgggaggccgaggcgggcggatcacgaggtcaggagatcgagaccttcctggctaacacagtgaaaccccgtctctactaaaaatacaaaaaattagccgggcgtggtggcgggcgcctgtagtcccagctacccgtgaggctgaggcaggagaatggcgtgaacctgggaggtggagcttgcagtgagccgagatcacgccactgcactccagcctgggtgacagagtgagactccgtcttgaaaaaacaaacaaacaaacaaacaaacaaaaaatggcccaaactacctaactagtaagtcaaggggttgagattcaaatattggtgggtctgattcatagctgtagctttattatggccaggggtgggtgagtggagtaaatcttatttattttttaatcactaggaaactatatcctagccttgaagttgcaaatatacaggctgttatcatttcaaataatcaggtggtagaaagagagcaagattctaatcagcacaatgcccaggccagggaaggaacgtggcgcgacccagaggaccctggcttgaccaaaagtggtatttggaaaagggggcaccgatcctcttttgtgctaaaggggacatggttttcttatcttcactgtttccaaggcatcttcttagtggtggctctgcaactagagagggctaaacaagcaacgccaggtttaggctttcatcccattgtgcttgagaaaaaaacaagtcttcccaaatctagtactttacaacacttcataattaagcagccaagaatctgtctttcagtgtttgtgcccagtcactggtacacattataatcaaaatcccttttcccttcaaagcagagcatcactgcctttcccactattctcctgcagaagagcaggggaaggaagcaccagggtccatcatggaggtaagagaaaagttctgcttcccatgcccactatgatgtatgcctctcatgtatcacatggggtccaggctgaaagatgtaatgtgcaagaacctcgagaaaagcacagctgtgtcttggtggaaagaaaggcacttctatcaggagtctgtccaagttctaatcgttacccttctctccaagtgccacatcttaatcaatttcaatcccttgaatgttgtccctgttcattttgtgctgctataacagaatacctgagactgggtattttataaagaacaggtttctttcagttctggaggctgggaagtacagggtcaggggcctgcaccgggcaagagcctgtgttttgtgttatcctatagcagaaggcagaagagcaagacagtgtgagaaggagagagggtgaggaagggggcctgtctcttaaagtcatctctt

SEQ ID NO: 1880422 - DNA, 4001 bp, Homo sapiens
cttgatcaattcagctgttgatacttgtgtttgcatcacgaagttccccttatgtgctttatagttggctccggtcatttatgttcctctctaaactggttattctagttagcatcttctgtaaccttttaacatggttcttagcttctttgctgacagaagtagggttcagaaggtgggtaataacaaatttcacagagctaaaggagcatgttctaacccaatgcattgatttctccacctccctttcagggatgccagtgatttgtagaattggcctctatacataaccccatacttattggaggttttgttccttccgttttattcttttttatttttgtctgtcttattttagagaaccaatctttaagttctgggattcgttccaatgtgttgggttagaacgtgctcctttagctcagtgaagtttgctactacccaccttctgaagcctacttctgtcaattcatccatctcaacctcctcccagcactgtgcccttgctgtagaggtgttgtgatcatttggagtaaacaagccactctggccttttgagttgtgaggggtttttcattcctttctcatcttcatgagtttgtctcattttgatctttgaggctgctgacctttagatgaggttttcgtggggactttttggttgatgttgttgttgctttctgttttcctttgaacagtcaggcacctcttctgtagggctgctgcagtttgctggggattcacttcaagccctacttatctgggtccctcccacacctgaagatgtcaccagagagtgctggagaacagcaaagatgagaccccactccttcctctgggatctctgtccttgaggggcacccacctgatgccagtagaaatgctcttgtataaggtgtctggtgacccattggggtgtctcacccagttggggggcacaggatccaggacttgcttaatgaagcactttagttgtccctttgtgaagggggtatgctgtgctgggggaaatcccactcgtctgggatgcctggattcctcagagtgagcagggggaaagaataagtcttctggtttgtggagacaacagccagccacccctcctgctagggactcagacttagagagatcagagttctctccctaattccctggcttgagttgctggagttcctgcagggatgccccacccagtgaggagggatgggtgagggtcagcctaaagaggcagtctggccatgatctgccacagccagtatgctgcgctgtggggaatacctcttgggaccaagccgtccagtctccctggcatcagcaaaggaaaaacagcagcctggctctgtagaaatggctgccgcccttcctccccaggagttcagtgtcttaggcagctagcagccacagtgatggctgctgtcccttcttggggagctcagtttcctcaggcagcaggcagctgcagtgatgatgactgcccctctcttgggaagctcagttgtcttaggcagccagcaaccacagtgatgactgctccccctcccccagggaactcagagggtttaggcagcaggcagccacagtgatgatgacaaccctccccaactttttaggcagactccagctgagtggctgttgagaatctgcatggctctgtagttggcacccaaggccctggtggtgtggtctcatgagtgggatcttctgatctgtggattgcaaagatccatggaaaaagcagtttcccaggctgggtagcatgctcactcactgcctcccttggctggctgagggtgagggctccccttgccccatgtggctcccaggtgggccaatccaccagcccatctttccttgttctctatgggccatgccaactacctagtcagtcctgatcatagaacctggatatgtcagttgctggtgcaggatttgcacactgttttagttcttctcagtgggagcctcgaattgcagctgcttctagttggctatcttgcccctgcccccttgtctttttgaaaaattattgttcatttgaaatctgttttgtctgaaattaggattgcaacctctgctttttttctgttttctatttgtctggtagattttcctccatccttttagtttgagacgatgagtgtcattatgtgtgagatgggtctcttgaagacgacataccattgggtctcgcttttttttttttttaatctagcttgccactctgccttttaagtggggcatttgtccatttactttcaaggttagtattgatttgtgtagatttgatcttgtcattgtgctgttggctggttattatgttggcttgtttgtgtggttgctttatagtgtcactggtctgtgtgtttaagtatgtttttgtattagtgtgtagtggtctttcctttctatatttagtcctcctttctaaaatctcttgtaaggcagatgtggtggtaatgaattacctcagaatttgcttgtctgtaaatgatctcatttctccttcatttaggaagcttagtttagctggatatgaaattcttggttgaagattttctttaataatgttaaatatagtcccccaatcccttctggcttgtaggatttcagctgagagatctgctgttagcctcatggggttccctttgtagatggcctgcccctttctctctggctgcctttaacattctttccctcattttgaccttggaaaacctgatgtttatgtgtcttgaggatggtcttgtgtagaatcttgtaggagttctttgtatttcctgaatttgactgttggcctttccagcaaggttagggaagctttcatagatgatatcctgaaatgttttccaagttatttgatttctccacctccctttcagagatgccagtgatttgtagaattggcttctttatataatcccatgctccttgaaggttttgttcattcttttttatttttgtccatcttattttagagaaccaatcttcaagttctgagattcattcctcagattggttttttctgctgttaatacttgtgattgcattgtgaaattcttgtattgtgttatttggcgctttcagatcagttagtttctttttttattataccagctactttgtccttcagctcctataacactttattgttattcttattttccttggattgggttctgccattgtcctgagtcttgatgattttttttcctatccatattctcaattatatttatgtaattccagacagttcatccaggttaagaactcttgttggagaactggtgtggttgtttgaaggacatatgacacagaggccatttgagttactggagttcttgcattggtttcttctcatttccacctatgggttttcctttaattgcagtgtagattgagtacagtccgtagacttattttcagatgttttcaccaggctgaggctttgtgcaggttctttatttgaagctgacttctcatttctggtttcagaggggagtatattagtaaggtatttttggtgctgaagctttgggatgtgatccagtaggtggcacttgggcttactggtcagttggtagagtcttgcttggtcatgtggctcccctatgtttcctcacagttgcagccatgttcactctcaatgatctgaaaatgtgcttctctcctccttgagtgctggctgtagatcatggcttggcactcctaggctgcccactgcagctctggggcaatctcagtgtttatatttcttccctaactttggggaagaagaggaagggacattagtagtggttgtagccaagggtcttttgtttgtctcctcagggttctacccccggagaatacaggtcagcaactgtttattgcaatcagcaagcaggatggagaattcatgctgtgggggccaatccaggggttccctgtctgttatgagcagtggggagtgtgtaaaacccgtgggagatgggctttggtcaattaaagcttgttgaaggtgt

SEQ ID NO: 1880423 - DNA, 4001 bp, Homo sapiens
ttgctgcagctgatctgacaggaggcggagctcaggcagtaatgcaagcaatggggaggcagctgtaaattcagatgaagcttccctcacttgcccaccactcacctcctgctgtgcggcctggttcataacaggccatagaccagtctgtggcccagggcttggggacccctggcataaagcccttgtacaatggctgcacatgtgaaacattccatattcattagctgtgtacccactaacccaccttaattctttcaggactcaacttaaacctatctattttcaaattccaaaggagagactctcagaagaacatagtgaggactatgtcaaaagaagaaatatgaaaacatgtttggcaggtacacaaagtaatagactttttttttcttttttattttttaatttaaaacagccaggcagggctgagggaaagcaccgccctcctgggccataaatgaatggattttaatgaatcaatttaaagaatgaagagatttaaaccagtattaccagaaaaccagtatcactttacaaacaaagaacaccttggcattcccaaaataacccacacttggtcacgatacattatgatgtattactctttgcataacattgatattcaatttgctaatatttctggaatttttgtatctatgctcattaaagagagagtggtctgtgatttctcaaaatgacctggtcaggttttggtatccagtttagtgtggacttgtaatactagttgaaaagtgtttgcaatagcacttttgaggtttgtgttttttgtttttgtttttgtttttttgctttgagaccgactctgtctcccaggctgcagtgcagtggcacgctcactacaacctccgcctcccgggttcaagcaattctcctgcctcagcctcccgagtggctgggactacaggtgggagacaccacgttcggctaatttctgtatttttagtagagacgggtttcacgatgttgcccaggctggtctcaaactcctgagcttaagcgacccaccctcctctgcctcccagagtgctgggattacaggcgacggccacccagcccggccaacttttgagattaaacaatgcagtttaactgctttactctggattttaattgttggcattaataataaattctactctgctcaactctgtacatataattacctcatctctactgccattgtccttagcttctgacatctcatcttccccatcttctacctcctttggggaaagacttattttcttcagttcaccttgaccttttttcctgctcaaaatagacaagattattattaggcacatgacaaggccttcacacattccaagccaggcacgttttgtctctggtatttccaacagtaaactggcatttggaataaacttatgttaggcctcatcttaacttttaattttcatttggtatcttttactcacaccagcgaacagaaaaacaaatacaaaaggtgatttttgatgttgtaggtgaggtctcccatacctcttcttttgccacaatcgataagtggaaactccttaagaaaaaaaaaaaaaaaaaaaaagacaaattcccaggaattccttcctattcctctcattctgatccgtcacgtgttttcaagtaactgtttaaaaaatatatatatagttccactacagactactcaaatggaagcacattgggccaaaatacaggggacaaagggccaaaaacagtacctgcaattcaagtacctttacttcgccagtcagataattctgtgaactgggtcagcgtccatcactacccccaccagaattcagaacacacatgagtctataaccctcgctgcccacagcagcccttgtccctaacaggttttcctttaaggctgtcgcggtgcgcccctgcaagccaccgcgcgtgacggacgcgggcacgacgcctggggacagcccgaagaaaaccgcaggcgccgacacgctggtgacgccctctcagctattgccccagatccaaggcgcgcggggaagacggccacgtaaagatacggcgccctggtgactccgcctcgcccaatcagagcccgcgcaacccctgaaccaatcctgagccgcgaccctgggaggggcgggcggtgcgggagcctgggggcgtgagtcttgagccggggtggagggggggccgcacgtgctgcgcctgcgcgtggagcggacattttgctgcggtctagcgcgggaggcggggttttgggttcgctggtccaggtgcgcgcggtgtcccaggtcttcgcgccaggttggcgcgggagaaggccgaggtgccccagagttcgaggagttggtgacggtcacgcggtgcgacgctccatggcggaggggcagtcggaaagtgaatagcactcgttaaaagcgaccagtccgtaagggcgcgtgtgtcggcgccgttacggaccccagcgctcggggtcgttaaaccgtttaagtcgcgtcccgcccagtgagggctatgttagcgtcctcgccgtttccagccgtgaaggaggcactgagacgacagctgagggtctctccgttaaggctgtcgctgctgtaggggccctcgcccgctgcgtgtttgtgccacccagcgtactgggtgctttttcaaaattttatcatggacgtctcaaaacacacgtgtgacttagatggtaaaagtttcatttttcatttaaagaagttgaggctcggtagttaaggtttaattctccatcacttaatactctcgtagttttttgagttggactgtcatgaacatgtgctctcacaaggcctcatggccattaacaccagtagccccagtaggaggatcaagctcctcggagttagccccatgttggaacttgaacagtgacactttggggatattgtgtgtgtttttaggggatagggaagggtgatcttgagtaaggagccctggccttatcctagcttcagaaagacccaaactgggaaagaatgagaatagaaaaaacaatctgcctacctgttttagatttggtacctcaccaaactcttgttacctagctaactttatgagattagcccaaatattttaagaaaatattatatatatctgatcaagaacaactgaagaaaaggcaaaagcccatttcatttaagaacagatgcagggttcaaataaagtattagcaaattgaatcaccactccctgccaggaagtattattaaaatcaataacaaggacaggataagtcacaagcaaaatccataaatgtgccaaaatatggcaccttggcagttgagaaaaccacagaagcaaggtctctgtaagtaatctgctccctcccataaagcagggtcataaaggaattcactggcctacctcatgtgaagtaggttgtaagaccctcattccagaggagtcttgtgccatacctggggaggagaagtgtcatgcagagacgcaagaaagaatctgagcaaacgggccatgccgaagtctcctcccacccctatgtatgaccattagatgatgccccttttgtccaatcatgtttctgcacaactatctacttctttcatcagacttagcataaaaatacagttttctttaggtcatggggtcttcgtttcttaaggttcctgtgtcacataagactttaaatttgttatgcctttctctcattaaccttgttataggggtgtcagccataacccttaagatgggagaggaaaatattttctcccctaccaacgaaatgatgacagatttgaccacattacaatttacaactgctggatgcaggagtttctataaaccagtttaaaacataaggaacaaattagaaatatttgtaacatatacaaaacaaatttaatattgtaatatgaatgaaatacaaatcaagaaaaaaacaaaaatggctgaaggatatgaaaagccattttcaggagaaatttgagtggcaaagaatgaagacatgctcaactata

SEQ ID NO: 1880424 - DNA, 4001 bp, Homo sapiens
gtgggtgctgaagacatgcctgacacctgcagctggagtgtgcacatgtgtacttgggaccctgaaaagcaggataggggaagggagctgactctctctgcacccctttttggttgaattctgagatgtttgagaactccaaattaaaatatgtccttccaagtcattataaaggaatatctgtcaagatcaaagcataaaacaaattttatttaaccatttctttgcttgatttttaactttgaaatatttagatatatagtaagcaggcctctatatgtactctggcctggagctccacaaatgttaatgaagggcctgcttccatgtgttttactgaaaagcttaattaagtaaaaacaaacaaaaagccaatatctctcagatatatgtgtatttatttatataatagtctggaaggatatacaaaaaagttaacagggttaacttctacaggggtgggattttggatgattttttttcttcttgcttatttgtattttctaattttttggagataaacatgggacacttctgcaatttattaaaggaggagggtgaacattaatcagagcatacctatctgaagaaatcaccctatgtcctactgataatgatcaggggaatcaacttcatatgtaaagcacattctagtgctgttcgtgtgtgtgtgtgtgtgtgtgtgtgtgtgtgtgtgagagagagagagagagagtgagagaaggagctggagctgttatggcataagcatgtcttctgaccagacagctgtaaaaatcccaagacagcttttatcaaccctggcaccagatatcctctaggccaaattgattcagtaaatagagtgatgaaggacaagactgaaagatattctgcagcattgtttctcaaaccccagggttctgacccccatgggattacagaaactggagccaagttgctgcatactcctatccagggactccaccagcccctgggaaccgatagaccatccacaatgcccctttctcttgatcataacaataactaattgtacacagttgctcacatagtacttcacatacatcatctgataaattcagtctggtctgtagggtgggtatttgcatttttatagctgaggaaattggggctgagaggttcaggagctcaggtgtggtcacagctaggaggcggtaaagctgagacttcatccaggtcttctaattctctgacttcatcctagtcagccacttccccatttcatcagttttttgttttgcttttgcctgttactccccatcctctttttctttccttttcttagcaccaacctgagaaatcctaatgatgggaacttggttctttctcgtttacttcataaaaatccatcatgttttcttctttatcccttcccttatcaccacttgccacccagaaatggggaaaaggttgctatagaatgaaaatgctaataaacattttggtatcacagcccagcagcactgaatgtcatcaggcttctgagtggggcacagaaaaggttgtcagtgttaataatcaaatggtttcgaagacactcttgcttgcatcatgtttctatatcatttatttttaaagcactttatatgcatcttctcaactggtattgtatataacacccctgtacaatatggatcactaacaggctacagataatggaactgaggctcagacattaagaaacttcttcgagtctcacagtaatagagtcttcaagaagcacatctgtctgtgaacagcgctgtgcaataatttctgtgtgcctatagatactgatgtgcatctgagccctcgatctggaaaaagttagcaatgcatgggttagatccttaacaacattaacatgatttacccccccctccccctttctggcaataacatcacaaaagattagaaaatggctgatacttaccgttcagaagaccactttaataatatcagttttctgcctcgtagcccttggcaggactctcttttcacagaacacaatgttggcacagggccaagagatggcgaagttgactcagaggtcactgcagtttataagtcagaataataaaaaggaaggcagatttgacaccactggcaagggaaagattttggtgttgtgctaagcaaacggattacagctagctctgagtaacataggaggagtaaagagctattgaaggggaaaaagtccacgtaaaaaggcaaaccactatagtgagagcttgcaaatgctctcaaaactgaccattgttatttatcctaacatcaaagaacaaaacagaatctgctcaagcgaacacttctatgaaccaaggtgaaagagacaagtgctttatgataaagtatcgagaaaacatacacacacacaaactgatttttgaattggctttgctgaaagctacatatctagagtaaaaagcacctctttcttcactaagctcctgcaatttaaaaaaataagaatagaaaaattccaagataagctcggcttttaacccatttatgcttagtgttccattatcggaacgctaagcgtgtgagagttatttatattctactgctcaaggtcatcaccaagctctgattgcaaaaattttaaaaattgcaacctccggcataaatgggttaagttcacttggtgaaaaccaaatacagctacaattattattaggccttggtgtgtgaaggactccaagagttaaaagcaaaccagcaccacctttagcccataagggattactcttttattagtatagtcttgggattagtggaaatgtctgtctaatgaatgcagctactatatttgagcacatgcctgaataagctacttgttgattgaaacgtatctatttataagcacttctgcatgttgtgaaaaatccatctgtattaccacagcatggcacccaccatttgaataaaggctctttgccatttcactatagggccttttgaatgaataggcagaaaggaagtgtgttgcatccacttaacagattttattcctcactcttggccagtaaagtagagttaccttatctaaacagcaatttagattgatgtggatgttacaaaaacagcaatggaaaaaaagaaatacttttcatcagactcacccagggtttttagctagtaaacctactataatttggacaaacgttcacaaagcctaaactaaccagacctctgcttaggtcataatctttgaactaagtctggaaagtaggtggatttactacacatacttcttgtcatttcttttttacatttctgcttatgaataccacactaatggcatgcccaagagaaacaagtacagcataagaacagtcttgataacacagtcaaataagtcgatgctttcaatggctgtgtcctcatctgtgctaaggctccatcctaggtgggtccaagccttccacccctaaatggggacttcaacgtccactctgggaatctgagctctgagtcccacctgctcccacctctcaacacacggccactgctctgccttccagtctcaataccatcgctgcaagcttcttgagtttgcatttaggtattccactgaagcctatcttctctcttttgcagttaggggccccatttactatgcttattatgctacctctggggaaaagctggtgaggaatttattaaaactttttattcaaaaagagtaaattacatatatatatatatatatatatatttttttttttttttttttttgaaatggagttttgctcttgttgcccagactggagtgtagtggcgcaatctcggctcactgaaacctccgcctcccgggttcaagcgattgtcctgcctcagcctcctgagtagctgggattacaggcacccaccgccatgctcggctaatttttttgtatttttattagagacagggtttcaccatgttggccacactggtcttgaactcctgacctcaggtgattcacccgcctcggcctcccaaagtgctggga

SEQ ID NO: 1880425 - DNA, 4001 bp, Homo sapiens
aaacaaacaaacaacaacaaaaaagattctacagctagtaaatgatatagttggcactgtaacccagatccctctctgtctctttctgggtctttttaaactattaaactgcccacaccatgactcattcatttgacagatatttattgagaatatacagtgtgttattcattggtctaatcactgcagatccagtagtgaataagaaaaaaaaaatcctgctgtcataatgcttatattaacaaatataaaggtagggcatgatggcatgcgcctgtaatactggctactgaggaggctgaagtgggaggatcccatgaggccaagagttggagactgctgtgagctgtaattgtgctactccactccagtctgggcaacagaatgaaaccccgtatcttaaaaaataaaaataaaaaggctgggcacagtggcccacacctataatcccagcacttggagagtctggaggattgcttgaggccaggagttcaagatcagcctgggcaacatggcaagaccccactgtgatcccagctattcgggaggctgaggcaggaggattgcttgagcccaggaagtcaaggctgcagtgacccgagatggttccactgcactccagcctgggcaacagagcgagaacttgtgtcaaggaaaaaataaaaccaaccaaccaaacaaaaacaaatataaggcaataatgctattgctcttgccttaacttggaaaacatgtgtctctgcttagagtacctctttcatttacgatcacttaagattttgtttcttcttttaaggggttatgccagcagtaaactgtggagtgcggtattgctctcacttgatttgctggtttgttttatcccagatgtcggaaaaaggtgactgaaggtaggcacgtcctcctcaagagctggggttaacctattcacaattatacattcctttcttacttttctagtacctctcagtcttttcaacctctgctgtcctcactggcagctggttccagcacctcctcattgagaagaatcagtactccctaatgaacatacacatgtccaggcaaggcggggccaaacagaccacaagactctgttgtgagtggatgtgatgctcagagctgctgcaggatgaagcccacaaagagaagaggacaaatccagaagccacagagaagtggaaccagaagcccagtgtgccttgggtgaagcacggctacttaagcatttgttacgcaagataataaatctcctcttggcttaaccagtctggagttggatctgcagttacttgcaactaaaagcatcctcactgatacagcattccaaaggcccctttgttcttaagaacatgtgtgcctgggaatctctgctataaactattccatttccaagaaggattcttctacaagccaatgaaattctcactctttgtggtcgaatgccctctgtctgccctcttcttttcttagctttatttccttaagggactactcaaagacacttggtacgctgaaataactctagcattaccaaaagcatttagtaaagctacgtgatgctgactggagacacttgaagagaaaacaatgctttgaattaaagcacgttttctagtgtcgatgaataacacataaataggacccacttagccatctatccccactgtgttattcatcttccggctgctttggtgagtgccaaaatgcttctgggagctttctgagcacttctttcctttccattcctttcctggattacattcaaaagatctaaaaacaaacaggcatgttaattactaagggttattattttcttcaaagcctcaaagctctaaagaatcaacactatttattttctgaattcactcaccacagtttcaaaccagccaacgtggagacaatcttcagtacttgctgaaaatgtgctttcactgtaagcttcagtgccctggagcagtgctgtgagatccttctatgagctctaggcagcaattaagtctatttcaaaagatgtgcaggtaagattgcttaggagtaggaagtccagtcaattccaaaaataatataatgttgaaattttccttgcttaccccaggaggaaaatgttctctgctttgtcaattctataaattacattttttcacttttggaatggtaggtccagaaagcgcagaaaataataaaaacaatacccatatagtagccataatgatttaacaagtgctaacatttggccatatttgcatcacatgtaattaatgatggatatcactatttgactcataaaatgaattgttccattaaactagtcccctttccatttttctctttaagagacatttataattaagcctttaaattctgagccttttgcaaccatgatttcagaatagaagagtaggggccaggaatagaccataaatgctccaaatgggacttcaacaagccttcattgctacctggagttgggtcatggctggtgagagtctatgtgggatattcacatgggacagttagaagatataaatgttctgtaagcaccaaagttgttagatctgaatatcttgagcttcatggagattaaaattctaaagttactcaggtctgtgttttgttgatttcgttcaatgcacgcatattctgacatttcattttacaatgatcttcatttttattttgattttttactattttacaaactgacatcaactctttattaaaaaaaaaacctttttttataacaaaaaagataagttttttccataataataaaaagttggaatataggccgggcacactggctcacgcctataatcccagcactttgggaggccaaggcgggtggttcactgaggtcagtagtctgagaccagcctggccatcatggcgaaacctcgtctctcctaaaaaaaaaaaaaaaaaagtatatatatacacaaaaattggccgggcatggtggtgcatgtctgtagtcccagctacttcggaggctgaggcaggaggatcacttgaacctgggaggtggaggttgcagtgagctgaaattgcaccactgccctccagcttgggtgacagagcaagactccgtctcaaaaaaaaaaaaaaaaagttggaatatatacaatgggtgaggctgtccaaaacctgccccataaagtaagaaaaattttgacaattaacaaagattcatttttcaaaggcctattaatcatagattaattaaacaattatcactcaaaaggtacctacagaattttcacctcaatcttttatcgcaaaaacagtggaaatctatagtccagagaccttctttaataatgagccactgataaacacaatatatatatataattcatataacatttctttcatgttgtaaatttttttcaagcattatacaataatgaatttgcaacaggctttcaatattatttacaatatttccttccagtacgagttttcacatgactttgaaagtaattgttaaaattgagaacttttctgtattttccacactactcgggatccagtcaggtgtgattctcctgtttatagggtccatcttgtgtgcatgatcacgcgtctatgaaaggatatgggaaaagcaaaggcattcccacatctcatacattcacagagcttctctccagaatgagatattttaagtcagcaaatgcaactaaaagaactaaatgggccaggcgtggtggctcatgcctgtaatcccagcactttgggaggctgagacgggtagattatctgaggtcaggagtttgagaccagcctgaccaatgtggtgaaactccatctctaataaaaatataaaaattatccaggcatggtgatatgtgcctgtagtcccagctacttgggaggctgagacaggagaattgcttgaacccgggaagcaggggttgcagtgagctgagattgtgccactgtactccagcctgggtgagagagcgagactccgtttcaaaaaaacaaaatcaaacaaa

SEQ ID NO: 1880426 - DNA, 4001 bp, Homo sapiens
aagaatcacctgagtctgggaggtcgaggttgcaatgagctgagatcacaccactgcactccagcctgggcgacaagagtgagaccctgtctcaaaacaaacaaacaaacaaacaacaacaaaaaagattctacagctagtaaatgatatagttggcactgtaacccagatccctctctgtctctttctgggtctttttaaactattaaactgcccacaccatgactcattcatttgacagatatttattgagaatatacagtgtgttattcattggtctaatcactgcagatccagtagtgaataagaaaaaaaaaatcctgctgtcataatgcttatattaacaaatataaaggtagggcatgatggcatgcgcctgtaatactggctactgaggaggctgaagtgggaggatcccatgaggccaagagttggagactgctgtgagctgtaattgtgctactccactccagtctgggcaacagaatgaaaccccgtatcttaaaaaataaaaataaaaaggctgggcacagtggcccacacctataatcccagcacttggagagtctggaggattgcttgaggccaggagttcaagatcagcctgggcaacatggcaagaccccactgtgatcccagctattcgggaggctgaggcaggaggattgcttgagcccaggaagtcaaggctgcagtgacccgagatggttccactgcactccagcctgggcaacagagcgagaacttgtgtcaaggaaaaaataaaaccaaccaaccaaacaaaaacaaatataaggcaataatgctattgctcttgccttaacttggaaaacatgtgtctctgcttagagtacctctttcatttacgatcacttaagattttgtttcttcttttaaggggttatgccagcagtaaactgtggagtgcggtattgctctcacttgatttgctggtttgttttatcccagatgtcggaaaaaggtgactgaaggtaggcacgtcctcctcaagagctggggttaacctattcacaattatacattcctttcttacttttctagtacctctcagtcttttcaacctctgctgtcctcactggcagctggttccagcacctcctcattgagaagaatcagtactccctaatgaacatacacatgtccaggcaaggcggggccaaacagaccacaagactctgttgtgagtggatgtgatgctcagagctgctgcaggatgaagcccacaaagagaagaggacaaatccagaagccacagagaagtggaaccagaagcccagtgtgccttgggtgaagcacggctacttaagcatttgttacgcaagataataaatctcctcttggcttaaccagtctggagttggatctgcagttacttgcaactaaaagcatcctcactgatacagcattccaaaggcccctttgttcttaagaacatgtgtgcctgggaatctctgctataaactattccatttccaagaaggattcttctacaagccaatgaaattctcactctttgtggtcgaatgccctctgtctgccctcttcttttcttagctttatttccttaagggactactcaaagacacttggtacgctgaaataactctagcattaccaaaagcatttagtaaagctacgtgatgctgactggagacacttgaagagaaaacaatgctttgaattaaagcacgttttctagtgtcgatgaataacacataaataggacccacttagccatctatccccactgtgttattcatcttccggctgctttggtgagtgccaaaatgcttctgggagctttctgagcacttctttcctttccattcctttcctggattacattcaaaagatctaaaaacaaacaggcatgttaattactaagggttattattttcttcaaagcctcaaagctctaaagaatcaacactatttattttctgaattcactcaccacagtttcaaaccagccaacgtggagacaatcttcagtacttgctgaaaatgtgctttcactgtaagcttcagtgccctggagcagtgctgtgagatccttctatgagctctaggcagcaattaagtctatttcaaaagatgtgcaggtaagattgcttaggagtaggaagtccagtcaattccaaaaataatataatgttgaaattttccttgcttaccccaggaggaaaatgttctctgctttgtcaattctataaattacattttttcacttttggaatggtaggtccagaaagcgcagaaaataataaaaacaatacccatatagtagccataatgatttaacaagtgctaacatttggccatatttgcatcacatgtaattaatgatggatatcactatttgactcataaaatgaattgttccattaaactagtcccctttccatttttctctttaagagacatttataattaagcctttaaattctgagccttttgcaaccatgatttcagaatagaagagtaggggccaggaatagaccataaatgctccaaatgggacttcaacaagccttcattgctacctggagttgggtcatggctggtgagagtctatgtgggatattcacatgggacagttagaagatataaatgttctgtaagcaccaaagttgttagatctgaatatcttgagcttcatggagattaaaattctaaagttactcaggtctgtgttttgttgatttcgttcaatgcacgcatattctgacatttcattttacaatgatcttcatttttattttgattttttactattttacaaactgacatcaactctttattaaaaaaaaaacctttttttataacaaaaaagataagttttttccataataataaaaagttggaatataggccgggcacactggctcacgcctataatcccagcactttgggaggccaaggcgggtggttcactgaggtcagtagtctgagaccagcctggccatcatggcgaaacctcgtctctcctaaaaaaaaaaaaaaaaaagtatatatatacacaaaaattggccgggcatggtggtgcatgtctgtagtcccagctacttcggaggctgaggcaggaggatcacttgaacctgggaggtggaggttgcagtgagctgaaattgcaccactgccctccagcttgggtgacagagcaagactccgtctcaaaaaaaaaaaaaaaaagttggaatatatacaatgggtgaggctgtccaaaacctgccccataaagtaagaaaaattttgacaattaacaaagattcatttttcaaaggcctattaatcatagattaattaaacaattatcactcaaaaggtacctacagaattttcacctcaatcttttatcgcaaaaacagtggaaatctatagtccagagaccttctttaataatgagccactgataaacacaatatatatatataattcatataacatttctttcatgttgtaaatttttttcaagcattatacaataatgaatttgcaacaggctttcaatattatttacaatatttccttccagtacgagttttcacatgactttgaaagtaattgttaaaattgagaacttttctgtattttccacactactcgggatccagtcaggtgtgattctcctgtttatagggtccatcttgtgtgcatgatcacgcgtctatgaaaggatatgggaaaagcaaaggcattcccacatctcatacattcacagagcttctctccagaatgagatattttaagtcagcaaatgcaactaaaagaactaaatgggccaggcgtggtggctcatgcctgtaatcccagcactttgggaggctgagacgggtagattatctgaggtcaggagtttgagaccagcctgaccaatgtggtgaaactccatctctaataaaaatataaaaattatccaggcatggtgatatgtgcctgtagtcccagctacttgggaggctgagacaggagaattgctt

SEQ ID NO: 1880427 - DNA, 4001 bp, Homo sapiens
atccctttctcctgtccccttccaattggtggcagctgccactcagcatctttggttttaaacagtgaaatggcttcccagatgtcaggggggaaaatcagtgcaaggcctagactcggaattccaagtcgccccatccagatagctgcaccgagaagagagaagacacaggaccgttttgtcgttttcatttccgttttcttttactaggaaattgaaatcgggtttctggtctccgcactacgggctcagagggttctttggtgttggggaggcatcgagcctttggtgctgcacacaccctaaaccctggctccacccgtagatgccaagagccccctccagctgcgatcgccaaaaatgtttccagactttccacctacctccaggggcaaaatcacctaggatgagaaccacataattcaggggcgtccagtcttttggcttccctgggccacattggaagaagaattattgtcttgggccacacataaaatacaccacactagcaatagctgatgagctaaagaaaatcatagctgagaaatctcaatgtttttaaaaggtttacaaatttgggttgggctgcattcaaagccaccccaggccacatgggctgcaggttggacaagtttgaaataagttatgctatggcaaacaataagctgatattatacaaatattttacttacaaaaaaataactaccataaaaagatgtacgtggaggcgtgtgtgtgtgtgtgttgggttgtgtgggaaggggtgtgagcatatgtgtgtgttgaatgtgggtgtgtgtgtgttgggttgtgtgggaaagggtgtgagcaagtgtgtgtgttgaatgtgggtgtgtgtgtgttgggttgtgtgggaaggggtgtgagcatgcgtgtgtgttgaatgtgggggtgtgtgtgttggattgtgtgggaaggggtgtgagcaagtgtgtgtgttgaatgtgggtatgtgtgtgttgtgtgggatataagtctgtgtaatgtgtgttacatatgatgcatgtgtttatgtgtgtagtgtgggtgttggtgtgtgtgtatgtatgtatctgtgtgtttacatctgtggtgtatgtgtatgcatgtttgtgtagtgtgtgttagtgtctgtgtatgtgtgtggtatctgtgtatttttgtgtgtagtgtatgtgtgtgcatgtttgtgtagtgtgtgttagtgtctgtgtatgtgtgtggtattgtgtgtttatgtgtgtggtgtatgtgtgtgcatgtttgtgtgtggcatgtgttggtgtgtggcatttgtgtgtttatatgtgtgttgtgtgtatgcatgtctgtgtgtatatgtgtggtgtctgtgtgtttctgtgtgtggaatatgtgtatgcatgtttgtgtgttgcatggtgtgtgtatgtatgtgtgtgatatctctgtgtttgtgtgtgtggtgtctgtgtattcattttgtgtgtgtggtgtgcacgtgtgtggcatgcgtgtgtttaagtgtgtgatatatacatacacacgtgtgtgtttatgtgtgtggtgtatgtgtattcattctgtgtgtgtggtgtgcatgtgtgtggcatatgtgtgtgtacgtgtgtggtatatacatacacacatttatggatgggggtgtgtgtgtgttgtgtgggatataagtctgatgaggtaaagaagctccaggagattctctttggttgaatctcatgccatgagacttggcttctggccacgatggagtgagaagcctggactgacctttctgcctggagcaagggaacaccgtgtagaaccggcacggcgcatcttccagacggcagtgcccaggctgcttggcaggcacccctgcaggaggggtcagggaggtgggcacccagcggtccctcagcacccgtcccgtgtggcacagtccagccgcctcccagggccgaggaggggagacgcaggctcctgggctgctcccacccaggcccctggaacagcgcatcttctgtgaccgtggtgaaggaaaatctcagcctctgcttcccacctcctcagcccctgcctcaacaggaagcccacagcgcaagagacgccattctagggccaggaaggaagagcctcagaccctggaattgccatgtacaaactagacgtgtatttatggtgtgtctgaatgtacaacaatttcctgtttcggagaaaatagttccttcctggaagggctgttctgtatttgcacacttttcccatgtgattttggggaaaagtacctgactttctgtgaatagacgcactttttcttaccgaaaataatgatagtttcaatctggctataatcgttcatattcatgatttttttcggatgtagaaatcagcagttttgcattgtaagacctcacccatccaccactcaccgtccccacacccctgggaacaggaggaacctcacagaagaagaaggtggattttactacctacttgccacacctcaatctctctgtctgtaagcagagagaatacggtaataataatattaataatgataataataatacctttctcacaagttcgcagggagggatgagttcatgcacataaaatgctcagcccagcacagctgagcacacgattctcagcactattacttgcattcttgtcactgaaaggaagagggaacggagtgtgacagcgcaggttagacccccggcgcagccatccacctgccactttgtcacagggactccacgactaactgccgccctattttcccataagcaggcaatggtgatgataaaatcattctcaaagcttagggaggccaggacccaacccagggccgatcaacgcaaagcccttgctgcttcctatcccataaaacccaattatttatgaatgtgaacctaaagccgcatcctaatttagaaggcatggagataacatggccaagcagccgcctctccaggcagcgagatgactaggtaggtcccagagccctgagcatgtcccctagaaaacaactcaagacaagtgcatttgcatgccttcttctgtctctctgaaatcactcagttatagtcactcagtgtgtgctcacaaacactgagtctcccctacacgtgatgcatttcagtaccagggcaattcgagtgagaaacatggccatagcccccagcctcttggactatcagaactcttaggaagtacaaggattgaaatatgtggtctaacagcagagcggtatttttctcattgtaccaccttgttgtaaaaaattgctggagcctgaaggaaaccacctatgggaagggtgtgagtcaatggttccccacttctgcagagttccttctgagcagctcagagcccaccccgtgtggacacatctcttaccaagatgaccttcccctagcgggaaacggaggaatgagcaggcggcactcacagtgccaattacagcaaggggatttgcataggagacctaactgcctgtttcaattaggagcagcaactccctccttcttccttcccaaggagccaggaacaccaggcatgtgggtttggatttgtctgggaggaggcatgactgtgcgcaccagagtgaaagcctccccactcacactgctcacctggagagaggctcagggatcctggcaggcgcaatgtttgagaaatgcccaggcgaagaagatgaatgcttcctttcaccgggccctccctggctttaactcttcttagtcctgtctctgggagaccctggcagcccctcgcagctgtgacctctctaaactgtcagcctcagattaactgatacttcatcaattttgcctgaactgcatttgcaacccggtctcaagaggacagccaagtgcatcaacgctgggcattaaccccccagaaccagattgccttcaaaacgagggggacttttccaatattctcacagcggcccgggcaacaagcctagggggactttggccagaggggagagaaggggcctctgattattcctt

SEQ ID NO: 1880428 - DNA, 4001 bp, Homo sapiens
cacattgtaaatgatctccaggacagtgtggggctctccctgcccatttttgccctcgacacatttcagatcagcattgtgatctgaagccttccccaaccaaccctcctctgtcactttttatctttcaaaaatgtctctcctcaggaaccctcttgcatccccaattccattcctggatctgcttatcagaagacctggattgatactccaggcccagagacccttgccaacatcagtcatgctaccagggcccgtcaggaccgctgcccacgtcctcccaaaggccggctcacactggtgtgcaaccccaggcctgaggggctgccaaaatgctgtgtacacgggaatggtcgatcttagccatgagcctgggctatccacacacgtgccacagccctcaggctgcaaagtgcttcctcctggagaaggagaaccggcagccagccagggggcagggccagctttccccacacaacacattcccgatggaacccaggattctgagaattctaaatttgaatctggcctttcaaattgtcagggtagaaggatgggacacagtgtatttaacggtttgttagcgtgattgatgactttcaggaatttattttaaacatatgaaaaggggacctcctttctagtctcgtcctgggctatgcatttgttaggagtaggcctggcctggagattcatttatttgggtaaatgggatatactgatgcatttcaaaatcactttcatcagcttgttgctagccatcctggtggaagagtggtttctagaaatcctcctgaggcctgtggtgcccactcaccaggcatcatgacagaaagtgcagtgctcaaagtcacactgaaacaaatgcattctggctgtaaaaggatgggtttgtggggatgaagcaaggcagggcaaggttgaaggaaatgcttccaatcatgaatatgtaatggcaattgcaagcagagaatttgcttgtcattgatacctagttgaagccatcaataataaaaaacaaattttgaccaactgtgctaaggaaaagactgaattaactttataatctctttatagaaacagaaaatactaccacaaaaccattgccataggaagaagctactaaaatgcatgcagccaaaaaatgtaggaaaaaggtattagaagcatagaagacaattaataaaatgtagtacattatttttctagattttgtgatatttgtagtatttgttcagtttttcttttttcttttttcttgagacaggatctcactctgttactcaggctggagcacagtggcgtgatcacagctcactgcagcctcaacctctcaagctcaggtgatcctcgcacctcagcctcctgagtagctgggactacaggcgtgtgctaccacgcctggctaatttttgcattttttatagaggtggagtttcaccacgttgcccaggctggtctggaattcctggactcaagtgatctgcccgtctccacctcctgaagtgttgggattataggcatgagccactgtgcctggcccagtttttctttttaattgtaatttgttgtgatttttttctcctaagtaaatatccccttttatatttgatgtgtttgtaaatttgtattcttctttcttaaaaaggaccctccacactgaataagcttcaggccccacaacacccagatccactcctgaatgaatattattattactagtcaaagtattattttatcacatccatgagggagatagaattgcctctgttttacagaaaagtaaaggccaggagatgaagttgcttactcattctgactctgaatgcttttcccgctagattctggaatcttcaggcttcttggcgctcagcctgttcgttgatccccctgctgcttctaccacccagatcccagcagggaaagccagagggagactaaataggaagaagaagcctctctgaataagctgagaaggttccataacgtcccactcttccgcagcccgtggtcagggagctggggtgggggtgggagtggccgcacagaaaccaaaaaccaactggcccaaacaaccagcttttgcaggaaggcagaacaggcagttaggggctccggatcccaggccaggaccctcggacctcagttaacggctagtgtagctgaagcctgacgtcaccaacagagacaaggaggagagtagggaaggattacatatctgtggttctgatttcctgaaatagtccagccctgcatgaaaggtctctgtgcagagtcggagtctaatccaagttcaggatggccactaagggcacctgatttatcacttatctttagccatgggccatgaacattcctttgctaatcaaggctgttaacaaccccaaaagcgttgcgtcttagagcagaaagaatcccaagatcactgaatccagggattcttaggtccaccctgaagaaacagagaatcaatgagtgacacttccaaaagctcaatgcatgcaatttaaactatcattttggccaagatatatatttttctgttgttaaaatgtcttcagtgaaatgatggaaataatggtggtgatatttgctagtatttattgagtgttgccatgttctgggcattgtgttaaaaagccttgcacagtgtatctcaatcaccataagaaccttaagagaaagacacaattttggttttttttgagacagagtctctgtcacccaggctgaagtgcagttgcgggatcttggctcactgcaacctccgcctcctgggttcaagtgattctcctgcctcagcctcccaagtagctgggactacaggcacacaccaccatgcccggctaatttgtttatttatttatttatttattttctggaatggagtcttgctctgtcacccaggctggagtgcagtggcgtgatcttggctcactgcagcctccgcctctcgggtttaagtgattctcctgcctcagcctcctgtgtagctgggattacaggaacccaccagcacacccagctaatttttgtattttttggtagagacagggtttcgccatgttggccaggctggtctcgaactcctgacctcgtgatctgcccacctcagcctcccaaagtgctgggattacaggcatgagccactgcgcctggcctaattattaacccactttttcttctgaataaactaaggctaggggagatcaaactggtacaagtcacacagcagcatgtcacagagttgggacctgaactcggcaggtctgatttccttgtgcccgctcttaactgtcacatcgccctgcctctgtagattaaatgcagttttcaattctgacatcctgatctccccaagtaaaagtgtggtggccgggtgttgcagctcatgcctgtaatcccagcattttgggaggttgaggcaggcagatggcttgagctcaggagttcgagaccagcctgggcaacagtctgtgaatccctgtctctacaaaaaatacaaaaattagttgggcatagtggcatgtgcctatagtcccagctcctcaggaggctgaggtgagaggatggcttgaacctcagaggcggaggctgcagtgagccaagaatgtgccactgcactccagcctgggtgacagagcaagactctgtcttaaaaaaatagaaatttaaaaagtgtggcaaccctgggttggaaccttgtgttttcttaaagaacttatcctggcctagaagtctggaggcctgaatgccattggtgtaacttgtcagattcatctgacacttgcttggggagatgtacttgagttacccaatgtcatccagcaagttggaagcaaaattagacagggaaaagacctggccgagtagaatttcagcatctgtgagatatgaaaatttgggaatttcctttggtttggacaatggctgactacaggaaaggcaacctctagaaataaattcagaaaacaattctttcaacctatgtttccccaggg

SEQ ID NO: 1880429 - DNA, 4001 bp, Homo sapiens
ttctccttcctgtcctgtccctccacacatccacacatctggatgcccctcaggtcaagcagcggcctggctaagcagccagaaacaaggcttggattccacagggctgcaacttgggtacagctgcaataaacttatctgctaaaggaagtcaagactcaagttcagggaaaccctggtctgaacacctagtccaaagggctatagagctataagtgtgttgtcaggcttctgccagtcaaaacaatagaaaattcaggagcaggccgggcacggtgtctcacgtctgtaatcccaacactttgggaggccgaggtgggcggataacctgaggtcaggagttcgagaccagcctgaccaacatggagaaaccccttctctactaaaaatacaaaattagctgggtgtggaggtgcatgtctgtaatcccagctacccaggaggctgaggcaggagaattgcttgaacccaggaggcagaggttgccgtgagccgggatagcaccactgcactccagcctgggcaacaagagcaaaactccgtctcaaaaaaaataaaaaataaaagaaaataaaagaaagtttgggactgaaaggaaggttctgagagtgcagctctttggtggtggcaggtttctgaatgggctggtggcaggatgggacacctaccaggtaagtcttcccctgtcttcctgtgtctcagcactgaccatgttactgccttactggaaaacctcaatgcccctcattccccatccaataaaggcccctcatgttctggcactatgtttcctttccaatcttatctcccattattcattcatacaagccctgaacaaaatttgttaagttcctaatgtatgtcagtttcttaagtgctagagtcagagatgatcagaagcactgttttcatcttcccaaaatccacaactagaaggcaggcagtccagaaaccaatcacttgggtgtctaacaggcgtcttgaaattacatgttcaaaattgatttgatcttccctctcaaacctgttcttcccacagcctttcccacttcagcaaatgacaatggtcttccttccatttcttcaagtcagtcttggagccactcttgactcctttctctttctcttacagcttgtttcagcaagtccagctggctctgccttcaaaatacaaccaggatctcatcacctctcaccaactcactgccaccaccatgacccaagccaccatgctcgtttcctgggttactgctctagcctccaaactgtctcccagcttccatccctgcccctctatagtaaattttcaacatggcaagcaaagcaatcctttatattttaatataagacaggtcacgtctgtagcctacctgctcaaaatcttccactggcttctcatctcattcaaaatgaaagccaaaggcattcaggtcgtgtctaggaccatgcatcctctggcccccacttcttttcccattaaaagtacttattgtaccaccaccactctccctcctctcactctgctcccacgggtgtgtttctcaaacaccatcatgtcccacctctggatctttcctccagctgctccctctgcctggaatactcttccctaggataggctcatggttcactctctcacctcctttgggtctctgctcaaccatcaccttctgagagaacttctccaaccaccttgcacaaaataacactatctttcccaagcactccctactttccttacttaatctgatttatttttcaacattgtacttattttcatttgacataccttctatttgtgttatctgttcattgttcatcttccccatttgaatagaagacacaggagttcagagactttgtctgctttcttcactgctgtctcccctgcacttagaagagtgcctagcatgtagcgtgctcagttaatacatattgaattgattagttaactagcatgaatagagaactgttttcttttccttccaattcctggattcagtaaaatcctattcatttagtaaaatcctacttgtctttagtctcagtttaaaggtcacctcttcaaaaagctatacctgactcaccctagagaatttggttcctctggcgtgtgctcgtgatacttcatttgctggatggaacatgagtgaatggagtggtggcattcctgtcggcctccatctgccagtgtgtcatatttccacctctattactcatcatggttcttctggcagccagtgactaaaccaagtcacacagccaacttgctttcagaacatgaagttccacttcagtattaggctactgttgagtctccccctcactccatcccagcttgtactacccagccctcctcctggccccaggcagggagctcattccacagttcttcactctttcccctgacagcccgacaattcctcccttcaccttccataggtcttttcccatgaatttcttaaatgaaacatagtgaggttattgttcactatattggcttgcttatagacattttagaaaacctcatattgcatactaagatagtcacttagatatgtacaaatatggcatttgaaatgttcctacagaattctgggcaacaagctcatggtccctaaaatgatccactgtgaaatcaatggtgacttaacactttttatctccagttcttttgccagaagcataacatattacaagttcaacaagagccacttgatgagcatggtagccatgcctgtaaccccagcactttgggaggccaaagcaggagaatcgcttcaggccaggagttcaacatagcaagaccccatctctacaaaaacaaaacaaaacaaaacaaaacaaaaaaccattagccagatgtggtggcccgcacttgtagtcccagttactcaggaggctgaggcatgaggatcacttgagcccaggaggtcaaggctacagtgagttaagatggcaccactgcaccccagcctgggtaacagagccttaagaccccatatcaaaaaaaacaaagaacatttacttaacctcaaaatccgtctctctaaaagaatagttcatcaatgaatcaatcattcaacatctaatgtgtacccaatgttgggttatatgtttctcttattagaggaaaccaacacatgtgaaacaatggacagtgtagtggacatcacatgatttgttctgcacagaatctgttttcccttctggtttcccttcgggaaaacacatgtctcctccactctcagtccacttgttttgggtagaattgaacctatgttcagtgtacgagtaaacagcgatccaagcctggccagtcagagcatcccagccatggccacagtaattggcccagggatgggcatataatccaaaccaacccaatatgagtagattcaaatacagtatagtagttaagcagaagactacctgggttcaaatcctagcttcactaattaccaggtgtaagaacttggcaagttatctgctctttgatggctccagtttcttgggtaggaaattgggaaaataatttctagccataggatggtgagacagtttaggtaagacgataaaggcaaagtgcttaaaaccatgcttggtacatattaaactttccatgaatgctaatcaactccatttttggaacttttatgaaagaggatctttcttctggggccatcttgctaacacatggcaagagcctgcctaagtcaaaccatagaggagaagcagcttaggagaagtgatgaatcctggccacatcaattgagtcccaagatctagatgtgcctgatatcaactaccccctggactttttgttacgtgaacaaatacattctctttttttctgaagtaggttaatttgggttcctgactcttgcctgaaagagctctgcctaatacaggcagtggttctaggcaatgtgtaattaagcgctaaatgggtttcataaacagcagaagagagcagaatgaggcaagttcaatatgggcta

SEQ ID NO: 1880430 - DNA, 4001 bp, Homo sapiens
acccggctaatttttgtatttttagtagaggtggggtttcatcatgatggccaggctggtctcgaactcctgacctcaagtcatccacctgacttggcctcccaaagtgctggaattacaggtgtgagccaccgcacccagccacaaagtaaaattccttaggaagaactgtgaggccctgttcttacatctttaaatgaaacaacagaagtcagagtcttggcaaagatggggctcagcagagcctgtgtgtaaatgagtaatgtcctagccaatgtaacgttaaataggaacctgtagggtgaagtgcagaaaaatcattgtgatttgaggatgcattgatggagctgtgacacctaagatgaaggaagtggtccacttggtttaataagtctgcccccaggaacattgtgcacagtgttgctttcaggaagagaccaagtggaggacacacagtgtagtagtaggcccaggaagtgaagaggaaaaatggtggaaagccaacaacaatatgagatgtttctggaaagtcaactgggagaaagggggatgggagctgtcctcatttattcaaagtgctgtcctgagagagaggacctggatgcctgtgactaagggcagtattgggacacgtggttggaagctccagtaaaacagatgtcaccttgatctaatgaaaagcctctgccatggaacatgttgggtgagttctctgtcaccagagtgttcagcagacccttctgtgagaagcagagaggggaggtggactaggcgacttctctaaccttgagactcttggaatcctgtgaaggagtcaataaaggggggattttagtcattgttggggagctgggggagatattgttagattaagggatcttcttacctatgaaattgcatccttaaagctcaccccattactctgttctttcctgtccacatagccagtttgggaggctaagatatagaactgggaaccagaaattctgagttccagttgcagcttggcaactaacttgctgtgtgaccttcacataatcacatctcttttctgggatttcattctcctctcatttaaataataaggctgaaccagagatttgcaaactctgctctgtggaactttaagggtcaattaggttctctctgttccaaaaaaaaaaaaaaagaagagctggaaaacgtctatccaagatgacctacaggtcgaacccaatctcagaatgcagtagatgggtatcctcttctccagattatctcagctctaggagcccctgcctttgtgatgtctccaagccctgagttactgtggtcttggcaggactgtactccacccaatccctgaagaagccacagtcttaccacactcagcttcctgatgatccaggcctgtcctcatggacccttaaccccttggtccttggctctccaaggtatcgatcccaccattgctttcctctgccaatccagggtcaagcccctcttgcattttctgaagttctgagccttttctttatcacctcattcaagtcgctagtgaaagtatggttcactcccctgccgtatgcttgcactacagtttacaaaatgctttcacacccatcacttttttgacccctccaaggttaggaagacagggcaggtattgctttatctgctgggaggataaataaacgaaggccccagatgttaaatgacttggttgaagtcccagggcttgttctaagacctgtatcttcttattcctctgccagaccttttcccactgctccaagtgacctttccacagtcctgagcagtcactgatcactttgtttttaggatcattcccatgcaggatgacacagacccatatctcctccagtaacatgcgctctgtgcaactaagctccacacactatcacttgcagatggaattagaagccctgctaacatgcagcttgaggacattcatgtccatactgtttgggacctgcacagtcacagtgcaatgatgccactgaaggcactgaggctcacagagcactctcatatgccagctcacgtgaccatagacagacatcataatgggccactgtgatgcacttttctcagagccttctgctcttctggcctccacctttcctttaatatgtctttgaaatgcaccaaaatgaacttgtttctttagctatttataatccatgtcaagtggatctgctgatgataaaagtatgccttaccactcattgaacatgactctgccaggctctgccctatgctaatgttttacaggtggtatttcctttgacctggctacaaccttaccagatggggatggttatctctgttttcaaatgagggaaccaaggcttggagaagtgaagtggctgggccagcccatgacctgacaactgaaatccttaccatcccactagatcccctcttactggccttcctggatagcttcttcctcatgtaaacatgacctgctgcttgcccagtacaggtgcacaccgcctacaattggttataaaggacaaactgacagcttgccttatgagtgtccttggttaggtctctgtttgataaggaagtacattttgtccctgataagaaatagagactattttgttgccccaatgccttttgcaagctttcactttcctaactgaggcgctgcaggcttggagaagatcactgtactctgaggtggggtggggctctgattatatattgacttgagtggcatttcctacttttgtttggtcagcaggatttctccatgacactcctccatcttgggatgacgcatgtcatgtatagaggtgaatggttcaatgtcccattgactgtgatgtttcctatttcttttgttttctttgtttagagatagagtctcactctgttgcccaggctggaggacagtgacatgatcatagcttactgcaaccttgaactcctgggctcaagagatcttcccatctcagcctcccatgtagctgagactacaggcatgcaccaccatgcccagcttgttttaatcttattttgcttttgtagagataggggtctcactgtgttgccctggctggcgtcaaactcctggctacagatgattctcccaccttggcctcccaaagtgcttggattacaggcatgagacactgtgcctggatgaatatttctttctttctttcttttttttttttttttgagacagagccttgctctgtcgtccaggctagtgcaatcttggctctcagcaacttccacctcctgggttcaagtgattctcctgcctcagcctcccatgtagctgggattacaggcacccatcaccacgcccagctaatttttgtatttttagtagagatgggttttcaccatgtcggccaggcttgtcttgaactcctgaactcaaatgatcctcccaccttgacctcccaaattgctgggattacaggcatgagccactgtgcctggccccagctaactttttctgtttctgagaattctctcccactggatcctgtttgctgtttctttcctagcatacccttctttgaaaacaaaagacaacatagcttagtggtttggaggtttgggctggacttccagggtttaaaagctctgacacttgcaagctatgtgacgttattcaagttactttacttctttgtgcttcaattacctcatctgtaaaatgataatatccatttaacctacctcatagagttgctataaagattaaataacgatttaagtaccttgctacatatatcagtgctttctattaaacaagcagacaaaacaatccaaaacaaagcaagcacctgcctcctctccctctcatccccatcagatgccctccacatgccctggaaaggaacctgggcttacttttccacgccagcccagtccttgtcctgggcccacatggtgaacttcaccaagaacaagcctcttgactggctatggctccgcaaccactatcacatgagttggcctcctatactcag

SEQ ID NO: 1880431 - DNA, 4001 bp, Homo sapiens
tatctaatctatttcacattttatccattcatccaactgagggactgagagggacttaggtggattctatatcattgtgaatagtgctgcaatgaccataggagtgcagagatcgctgacattctgatttcctttcaacttaatcaaatcttgtttcccgaaaagggtctatttcatggctgataaggcttaagtactaagggacttggttccatgaaaatatcaagtgtggcctcacttcatagaacgaaggaggtagtttcggccccaggagacccagcattctggctggggttacctgtgctcacctccatgtagttcccttcagagaatcttcctcgaggcccatgtgaaatagggacaggacatggtatagttgtaggtggtttcttcaccagcttccatgaacccagacacctcgatgttcacactgagggaaaaccatctattatcctggaagaagggcaagaaagcaccgaagtcccagggaagatgaggcaagaatcaaatagggaggtttggcccagtcccacctggctcagtgggactgaggtacgggtctcttgttagtagacagacggctggaggtgtgcagggaagggagcatgatgaaatagagcaggtagagatgcacagaagagacttaggatttagtgatctgacactaatctcacctctgttctgttgaagtgctcctgctagctccctatacctttgaacccctaaatccaggcatagctggggccccagtctccccgtccaccttgctgacatcgtagccaggttaaaccctgctatcccacgagtctccttctgattgctctcatctgcagttctaccccatgcctcatctgagcgcaaggtgcctgcatgcggcttcctctaaactcctacagctttgggcctcctgccacactctggcagttcccagctgtcagttacagccacctggaaatgctctttttttttttttttttggtccaccttacaaaggtgatctattcattagaggtcaatcctggcaaggcaaagatggaactgtggtctctgttcttagacacaagaggactctgcagctgtgaagacagcctgtgccaggcggaagcgatctgcatccaggaggggatgctggattccccaaatgtcctcagtgctgagggcagggccagatttcttccatatgaatcttggacacctgtttcctgggcaattgaacaagggcatctcagaagcttgctcacctggttgaccacatgacaggccagtacagaggccctgaaggtttccccaggcgtcttcagacaacacgtagccacagcgtggggccacgggaggtgcggcagctgggcatccaggggtctgcagtggaaggagtatggtcacctgccagcctggaggagcctgggggtcctcagagtccctggcaccagaatcacttaaggcaacgctgagggctggtcccagggaagcagacccagggcgtctcatagcgggtggggacaggcagatgggtgggagaaccgatgctgggcggcaggctgtggggggcagctgcgcgattctgtatccttgctggaccccaggcaggccagtctttctgggttgggcgggctagcagggaacctgggtgggctgggggtcaggaggttgttttggggacaccgggctgcaaaaacccatgagtccttcccctgtcaccagtaacttccgcgtagaaggctttgttgtctagagagcctcatccggaagatgccggcggggcagctgctctccacgaagcctgtgaagcccgggtcggttcgggtcagttagagaaggcgcggcccctccctgctgccctgtgggaactccacgtgggaaacggggggcttggcgggcacttgcatcccatccttcactgacctgggcggagcgagagggtcgcttgagcgccgaggccggggccatggcgacaggagcagaaagaagagcctaggcaggagaagcgggcgggttgggcacggcgaggaggagcaggagggggcggagagtgggacgaccgggccacacctaccctgcaagcaaggggcccgcggcggggactccactactgggctggggcgggtcacgcgctgcccggggctttatccgcgaggcctcccaggcgctccaccaggtgtggaagccaggtcaggtgcgctccgcccgggtgagctgcacttcactgcggtaccccagcctcaaaattccccgtacagttctgggagcccttcacggctatgccctaggtggacttcacacttctgggacaaattaagagtgtcctaggattcttggattcagctgttaaaaagaaaaaataaaatcttcggtttttcttaaaatgtgttttaagcataaaaaatacataatacaaatgcacagtttaaggaagtgattctacagcaatcacatcatgttcttgatcacccacagcgaagtattgctggcacccctaaacctcccctgcctcctcctcagtggtcccgatttattcaactagccttatctgttctcccggttttaacatcactttcacggctgcggaacttctgtgcagaattgttcccattctcttgaaggcttaggttgtttgcactatttagatgttataaataatgctgagacaaatatttgttcacaaggatgatttccttaggataaattctcagtacagatgaggaattttcagccaatagccatctttattttcaaggttcttggaatatgttgccacagtttccccccaaagagttttgccaattaaccatccatcggcaagtcaaatcaataagtgcctaccctgagccagtcccagggaataaatggcagatccatgtttaagtctcagttccatcacatccttgccagcatttggttttagttttctgagattaaacaaattttttagtttgcatctctctgacgttagaaaggcaaaactcccacgtgtgtctgcttgctaattagagcatcttctaattgtatgtgtgaactgtccatttacttcttgggatgttgatgttgacctgaggcacttggatgtattctttatgtggtagagatagttgccctttgccatttttgtatgttttcagagctgagtgagacctggaattcacgtggtccaaactccttaccatgggttgaaccgtgagcctccctccgctcccctccaccccaattctgccacaaagatatgttcattacctaacctttagaacctgtgaatgtgaccttatttggaaacatagcctttgcagaagtaattgggagtctgagaagaagagttcatcctggatcatctgggtggatcctaaatccaatgtaagtgttcttttaagagaaaggcagaaggagacttgggatagaagagtggacagcagtgatgtgaagacagaagcagagactggagttctgctgccgcaagccaaggaacacctgcattcaccagaagctggaagaggccaggaaagattcctcgaggctttggaggccctttccacaagttggtgtcagatttctggcctccggaactgggagagaataaatttctgtcgtttgaagtcaccaagtttgtgatgctttgttgcagagggcctagaacagggatacagcctccattttgcaggtgggaaggacatgagggcccaggcttattcagggtcattactaagtccagagttgagatcctaacccagggttctttgtctcctaggccatgagaccaggtggaacattttcccccagatgcctctctggtgtgcaactgagacttccacggggaactctgtagctgtaggaatggagtgggtgaagtgagctcacacactgatgagctcagaccgtgagtgcaaggacctaggctctagttctggctctgccacttattaaccttgtgctctcaaatgagttatgtgtgggcctcctaacagtctgaatagcatcctgttgctgcagctccatggtctttgcttagtgcc

SEQ ID NO: 1880432 - DNA, 4001 bp, Homo sapiens
ttataatgatggaaatttaaatatttgaaagtaaaaacagatgccacctttttgctagaactctacaaggcaaattgctataagagaggcagaggaaacacaatatatatatccaaaatataatttgcagtgaaataaatgaaagcacattataaataaacttacctgattttacaaactaacctgtaaagggatttctactaatttttctattgcctgcattgccctttcttctacatccaatttatatttttgtacttcaccaatgtgtcttcaccaatgtgcagtttccatgttttttaagatttaatattacttcttccaacatctttttatcctcctcaagttttttatattctggttgtacttttttcatagataataactcctgttgaataacttcttcttagtcaaatagacatattttgaagatacagcttccagctttgctgtaagatcatcaaactacattaataaaataatatagcttgataatgaaataggctgagaataatctcatacaaaaccaataacaaattctgaaatacatttacttgcaataaaatgttatctataatgtagattctttaaatgttaactcgtactcaaaaattcaagaacaaagtaaaagccaccatgagtcacaaacatatattctttactctcatcatctttgccacagaacttttgcacttgatcttacttttatatttttctgataatttgtgttttttccttcttaaatgggtctaagttaattcttattagaaagtttcaaacccccttctctcatcatcatgccccaaaatttgtcaaaaaaagtttcagagatattatattgagttatttaggccaaagtcaataaatggctcttagaataagactttgaaactaatgtaatactctacgctaggcatggtgcatcatgcatgtaatcctagcactttaggaggctgtggcagaaagatcacttgaggtcaggaatttgagatcagccagagcaacatagtgataccataatctcgacaaaaaaaaaaaaaaacatgtaaaaaaattagccaggcatgatgccttatgcttgtagatccaactagttgggagattaaggcaaaaggatggcttggactcagagttcagggctgtggtgaattatgatcaaaccactgcacttctgcctcgatgacaaagaccgtatctcaaaaaaacacaaaataatcctataaataagtattctaatgccacaagccttttcctaggctgtaaatgttttatgctaatttgaattgcattttaaaaagtaatgattcttggggtaaaggacatagaatacagcattgagaaataaatccacttatttaccttaccagaaataaatccacattcttgcgttacaagagctcctgaagtaagcactaaacgtggaaaggaacaaccagtaccagccactacaaaaacataccaaattgtaaagaccattgacactataaagaaactgcattaactaatgggaaaaattaaaaactagcaacatcatgacaggataaatttcacatgtaacaatactaaacttaaatgtaaatgggctaaatgccccagttaaaagacacagactggcaagttggataaagagtaaagacccaatggtgtcctgtattcaggagacccatctcatgcgcaaagacacacataggtttaaaataaagggatggaggaatatttaccaagcaaatggaaagcaaaaaaaagcagggtttgcaatcctagtctctgataaaacagactttaactgaaaaagatgaagagagacaaagaacagcactacaaagcagtgccatcagcttttcctcacgcctctgctccatcagccatcaggtggcagccactcaggctgttggaacctggccatccctgcttctttgagtgggtgaggttggtggctgctccacctgctcctggcacacccttgcagaggtggctggttgctctttgagccagcttggccttgcctggcatgcacaggccccggggaccgacatgctgctctaaatgagattatcctgactctgtcaaattctacgtctggcctgggccacagaagcccaagtcccctgggtggtaatactagctgctttctggactggaacataaactcctcaagacgacctgtggtctgcctcttggcaaccaagaagcctgcagtgtcatatgacccatgaggcatggacggaaggcccaaaggcagcgcacaccctggtcctgagcctgctgctcctttcctctatatggctccatttgtagcacagttgttgcactgaggcttgtgcatgccgggcaagggcaagctggctcaaagagcaaccagctatctttgcacggatgtgccagcagcaggtggaccagccaccaacctcacacgctgccagtcaggctaaatcagttcttctaccataaagatagggccacagtgccatctggttttcctaaggcctctgcttcatcagccattaggtggcacacactcaggctgtgggaacctggccatccctgcttccttgagtgggtgagctggtggctgctccacctgctctaggcgcacccttgcagaggtggctggttgctctttgagccagcttggccttgcctggcatgcacagaccccagctacggacacgctgctccaagtgagcttgtcctgtctagggccaaattctaagtctggccagggatacagaaggccgagtcccctggatggtaatcctggctgctttctgcacatgaacataaagtccttctcaagatggcctgtggtccgcctcttggcaaccaagaagcccgcagtgtcatacaacccatgaggcatggactgaaggcccaaaggcagcgcacacactgctcctgagcctgctgctcctttcctctatatggctccatttgtagcacagtagtggcactgaggcttctgcatgccgggcaaggctaacagggctcaaagagcaatcagccacctctgcaagggtgtgcgagaagctggtggaacagccaccaatctcactcgctacaggacatggaacatcagttcttctaccataaaggtagggccacagggccatctgcttttcctaaggcctctgctccattagccatcaggtggcagccacgtgggctgtgggaacctggccatccacttccttgactgcgtgaggttggtggctggtccacctcctccaggcgcacccttgcagaggtggctggttgctccttcagccagcgtggccttgcctggcatgcacaggccccagctactgacacgctgccccgagtgagcttgtcctgccttggcacaaattctaagtctggccagggccacagaaggccgagtcctctgcatggtaatcctggctactttctgcagtggaacataaagtccttctcaagacggcctgtggttggcctcttggcaacgaagaattgtacagtgccataggagccctgaggcatggactggagccccaaaggcagcatacacccggctcctgagcctgctgctcgtttcctctctgtggctccatttgtggaacaacagttgcactgaagcttgtgcatgccaggcaaggtcaagctggctcaaagatcaaccagccacctctgcaagggtgtgccaggagcaggcggaccagttaccaacctcagtcgctgccggacatggtacatcagttcttctaccctaaaggtagggccaagaggcagaccacaggccgtcatgaggaagaatttatgttcaagtgcagaaagcaggcaggattaccactcaggggactcagccttctgtggaccacagtgccatacgagctctgaggcatggactactgccatctgctttatagaaaaattaacttcggatgaattgaagagttaaatgtgccatctcattttcctcaggcctctgctccatctgccatcaggtggcagccactcagcattctgtaacctggccatccctg

SEQ ID NO: 1880433 - DNA, 4001 bp, Homo sapiens
aagactgtaattctatttgcaatgcaatgtctttgttctatttttgtattttaagtatgtgagacttcaaatgaaaaaaatatcttcttatcgcagcagtttttcaagcaagtaaaactgcttcaagcaaattttctaggcctgaaagctctgtggcagaagaccatacctcaggagtctattcctggacattagattgggcctttccatgaagctgagtgttagctcctgtcttttggtcatggctggactccatataaggtattcattcactatcatctagagtgcacatgaactggaacaagaagcagaaatgtgacccttgattaagatctgtgctttctctcattactcgtgttaagtagggctcttctattccaagtattatttatgtcctgcaattgttgtagaaaaatggccctttcactcttagcaacaacatggaacttaacaagtggtaatttaatagattggagagtaaaaatataatttgaatgggtgcagagtcaggtcttttcaagttgaaaaagcatcctttttcaggatcagaagaaaaaattgaataatgaagtgaattcaagtaaattgatacatgagttgaacacacttctaacagaagacttttgtgggcaaaggtaggaaataggaagttgtgacaaggaaacttaacagaatggatccaaagttcatttggaaaaataactttgagagaatagtgatgaaacctttgaaagggggagaaaataataaaggagaatttgccccagtagatattttaaacaatgatagtttgagataattaataatgttctattgcagaaatacactgactattaaatgggaaaggactaccgctagcccacatgatgcccaattctttccaaggaagctctgcaggtgcttggctaggagccgaagatgcctttgtagttagaaaagatatccctttcttcttgctcgcaagctccattggcttggctggcaaaagagcttggctggattttattctgcactggaccttttttaggtgtcttactgcattttgcatgctgtttgaccacacctggaagttctgattgaacagaccctgttttatatctaagttaacatatgataaaaattactgctaaaatcactggacaaagaatggatctattcaatatgtggtgttggacacctaggtcattattctgggggaaacaaaagccctatctttagatttcacatcagaataaattgaaaaacgaaaactacaaaatactagaagaaaatattgctaattagtttgggtgaaatgtcattatattttttaaaaactcaagaaatcataaaccgattacatttaaagaaattctacatagttttaaaatagaacaaaataatttaattattttaattaagttaataagacaaatacccgttttttggctagaggttaatatatttacctcatacagaacctttaaaaatcaataagaaaaagaaaaaatatatgaaacaatagagaaaagagaaaaatgtacagaatatataaatagccacctcacaaaagaaaatataaacggttattaactttatgaaaacttattcagttttattaacagtgaaagtaataaaaattaaagcgattgagctgctaatttttcactaagattatttgaaaatttaagtgtttggagaaaaaaaattaagggccaagatggaatagtttacatgatgtcatttaggtaaacgaaaaatgcatatgaaaataaatattttgaaagaatacttacaaaaaagtagtagtatgggccgggcgcagtgtctcacgcctgtaagcccagcactttgggaggccgaggcgggcggatgacgaggtcaggagatcaagaccattctggctacggtgaaaccccgtctctactaaaaataaaaaataaaataaaataaaaaaattagccgggagtggtggcgcggcgcctgtagttccagctactcaggaggctgaggcaggaaaatggcgtgaacccgggaggcggagcttgccgtgagccgagatcgcgccactgcactccagcctgggcgacagagggagactccgtctcaaaaaaaaaaaaaaaaaaaaaaaaaaaaggagtagtatgtacgttatacttccacatgaaaaaaatggaaagaaaattgttaagtgtctgtgggtgctgggtaatgcctttcctctactcctggtttccatgcaaaaatattttactgggtctttacttacttgcccttggagagatgttatgacatttggtagataaacttaggaataaacttgggaagaattgctgggcatgccaggctcaactacctttctctctctttcattctttggaatagaactcaaaaaacaatttaaatcctttttcaaaggcactgtctcctttcaggttagaaggaggccaggaactacgttgactgaggctgctgtttcagttctttgcttttggatctaccaattcaaatccgttatctgtcaatcatagagtaatattttgctctcatttttttggtcaatttattccccacccaggcataaagaagggatactatttatccgggtctctcagaggcctcaacaaaccttggagcatatagagaaaatgtgagcaataggtacttttggtgatgggaatacaggtgatatttatttcccttttgcagttgccctcctatttttttttctttttttgcaatggtcatgtttcatgttcttaatcaagaagatcaaaataaagcgattctttcagaatgacagataaaatgatagaggtttgaaggtaaatgtaacacagtaactttggaacccagagcccctaggaactcataggatatttggccactgttacacatgacaaacagaaacatgaccccctttcaaatcacatgactgaaatttgaatttcagtcttggttttcattacagtttttaaaaagttgtcaaatactttaaatgttggttttgcagaaatatagggctaaacaaccagcatattttttgtgtgcttttgcaataatcagaaataaaattggttttcttaaggtaagtaacaggtcgtttttttgtcttagccaaagttcccttagttagggtaagagaaacttaattctggtttgagcaagaaaattaatttaaaaatactggaggccaggcgtggtggctcacacctgtaatcccagcactttggcaggccgaggcgggtggatcacgaggtcaggagattgagaccatcctggctagcagagtgaaatcttgtctctactaaaaatacaaaaaaaaaaaaaaaaaaaaaaaaaaatagccgggcatggtggcggccgcctgtagtcccagctactcgggcggctgaggaaggagaacggtgtgaacacggaggcggagcttgcagtgagccaagatcgcaccactgcactccagcctgggcgacaaagcaagactccgcctcaaaaaaaaaaaataaataaataaataaaaataaaaattactggaaagctgctgagtttctatcagggtctatatgaacctatgatgaatgtgaagaactttcaaatggaaatctgaggtatttgcagtaggtaaaattaggcgtatttgtcatcgtagtgccctgctaggcttctgcaacccttttctttggcatctcccttcttcacttcctggggcatgctataaatttgttttaaaatcttgttccatttggttctattgtttttaaaaacttggttctgacactcttgagatttttatacctctaagccatttcacaaagaagatcatatcaaaagtcaggttataaaaattacaaagcaatagcaagtttaaagactttaaacagtgggagaaaatataaaagtgagtaatctttagcactgtatgtaacgattggaaaaagacagttatgaggactcatctatcttcatttatccattcatgatggatgtgctttgtagccatatttttttttccctctttagga

SEQ ID NO: 1880434 - DNA, 4001 bp, Homo sapiens
aaacatgtgacttaatctttcccaaaacccatgcaaagggcatccttttgtctccattttctattatatgtgctgagatgagcctcagggaaggcaagtaactcacccagggccacacagcccgtcacagctcagtcagggccccaggaaggacaatcccatggcttggggtgttgggaagtttgccttcattcagtcctgcgaagcctcggaggaaaggctgagcttggtgctgtcaccctgtctccctccaggtcacctccaggtcacagtgtggctggggctcttgggccttcagttttcttcctgccgagtgggttcaggaagagcaggctctgagtcactggggccccggctggtgatgggggcttagacacgtgtatggtccattgctgccctccagggatgaggctcatctcaggaccgtgccctggcttctgtcaaggcggctctgtggttgttcggggcctactctgtccggccacagctctgggcctttttccaccagccttctttgagctctcccttggctttgggagcagcatgagatttttccatgcttccggctccgttgcccacaagctgaacagtgacttggtgtcagggtggcaaagagaataggtgccttactgggaatgggcagtggtgggggatcagggagagggaggctagagggtggacaggacctcccagcagcggcaagaacagctccagctcctgccttcttggaacccttctgccatggagccccccaggctgaggaggcctcatgggggccatttcgcacaccaagaggctgagtcacttgcccaagattgggcctctggtgagtgacaggcaattggaccggtcagggtgacccggggcatgcggtctcaccacctcaccacagtgctctcttcccacggcagcaccctgcctagaggatggtggctgggccaggcgctgcccccactgcctcacaggcctcttgggggtcagagatggacaggggtttaggtagtccctcctccatcctgtcctcatggatggatgcctgtgccctccctagatttttctcacggtccgaaggaagggctagcccctggagagcatcttatctcttgtttgatggatggcccagagagggtgagtggcttgcctggggccacagagcaaactggagtcagggccacccaaacacaggagtcctgactcccagacactcatgcactggcggggcagggcctacactgtcttccctgcttcccaggaagataccttgtgggtagatgtgggagggaacaggccggccttgaccagtgccatccactcagctgttaaatattctgggaatccataaaactgacagccaactcgtggggatggtcgtggctcctgtgttccccaccaaccagcaggggcacctggggaaacctccagtgcagaaatcgtactctgccatttcctgtatctccagctattccccatctgaagagtgaggtggttagaccaggtccctggttttcttccagtcaccccctgctggaatgccaggagctctcttctgtgctgggggaagctgccgctggcctcagcttccccatctgtgagatcgggctccatgcccgtcttgttggactcatcaagagacccatggggaggaaagagcttgcaaggagagcagctaaggaaagaccggaatcgtccgagccctttgtcccttcctgtatcagcagcaggcgacctgcccaccagccggggcctcccgttccgttccattccgtttaagtaagctctttccctgtgcaagggagcaaccgacctcaaaggcccggcccacaaaggggcccccgacatggctgggaacaatgcggcctgtttacctgacagattgtccgctttcttttcatctcgtaggaaaagaactcccacggggagccgctaatcccagagtaaacagatgacctcgtggtgcctttctcccggaggtggggttcctagcgcagcaccccaactgtgcaaacagaccctggagggctcgatgcgcctgcgggggcgtggctggggacctgggcctgggccaggaggggcctttccctctcgccagccctcttttcttcctttgtgatttcaattgaatggggagaagctcaaaggcaggggcatgaaaggtcaaagccaatttgcagggccaagtgtgggggaggagagaagggcccagaccaagcattctttttggaggcctgaccttgacctggaagcaactcctccctctctcggctcttctgaggacactgccctggcagagctggctttgccttctggccaccccccttactagctgtgtgacagaggccagaaaatgctcctttctgagcctcagtttcctcatctggaaagcagagatacagggacctgtcgggtaggactgctgtaaaatattgtggtgtgctttccataagtgatggctgtttatgattagggagggagtgaggctgagtcttgaagctggaatgccagtggaggccagagggtattccaggctggagggacaggcagagctgggacaaaggcactcagatggcaatgaatagtgtttgtctgggagactgaataaaataggctctgaagcaacatattattgtagggtggttatttctgggaaggaaacagaattccccctcttcccagcagtgtgaccttgggcgaaccatttgacctcttgatccttcagtttcctcgtttataaatggggatgcaaagtcttgtatcgaaggactttcatgaagatgaaaagaacctgatgtacagcagacactcaaacattagcttttagggctttagaaaggtcaagttctcccagtactttgggaggctgaggcaggtagatcgcctgaggtcaggagtttgagaccaggctagccaacacggtgaaaccccctctctactaaaaatacaaaaaattagctgggtatggtggcacatgcctgtaataccagctacttgggaggctgaggcaggagaattgcttaaacccgggaggcggaggttgcagtgagccgagattgtgccattgcactcccgcctgggcaacagagtgagactctgtcttgaaaaaaaaaaaagaaagggcaggttgtaggttctttatgccctgaatgaggctgtgggagtctggtggagtcaaagacacaggagacccatcacgcccacttggtcactagcagacagccctttcccttgggctgcagggagccagggtgggagcctcacaaagggtgtagccttgagcacccagctggcccaagggcctgagcctgcaacccccctttcctgggctgtatcttctggtctgttccttggatctcctgggcctgctcctctcatcttagccctcaggaagtccttgatccccagcccctatttggggtagagaaggtgagaaatgcttagggtaagttatactgccactggcttcttcagcatcagacccctgattcaaacatgtggtgagttcctgggccccttggctttccctaagggccagcaaagggccttttaaagagaaagaagaaaaggtaagtagggagcataatatttgatgagcacgttaaagcgttcattcatgggtatcagatagaaacgtttggcttcacttaaggggaatctcaactcactgtggcttaaacaaaattaggtttatttttctgacatcataattctgaaaacgagtggttgatggccttggtcagctgctggtgatgccaagtactgggctcttcccagctttctgttcatcgtccttagcacgtgggcctcctcgttgccttgtggtggcaagatggcagcctcgactccctgggaaagtagagggtctcccaggagcaccctgttggtgtctcatcggccaaaagtgggtcacatggccaaccctggcagcaagggatgctgggaatgcaaacacttggatgttcttctgcagtgttaatggcagggccaggcaagcatgggtgggaggt

SEQ ID NO: 1880435 - DNA, 4001 bp, Homo sapiens
attcttgctaaataattgtatttaagacagccggtgtagcagcatagcagaatttacttcttaaaacattcgcttagttacctaaagaagtccctaaaattccaacacatggatcctataaaagcactgacaaattgcacaaaaagcaaatttgggcttttcaatatcatcaatagctatgaaacaagaaagtggccctgatggtaaggctacagcaaaaagacttactgttgggtgatcctggaaatcacagtctatggatccagacctgccaatcatggcccacactgccattttcctcttccttatgtgaggctgtggcatatttaccaaatgacatttcgtgctgttttcacactattgtttcttcaacgtcttctttaactaactttcattttgttcttcaatctgttgtatgtaataagtagggagtctatcaacaaatcactaaaggtcttggtgactcttctctcccaaagcgcttagctaacaggtgcaaaatagtgaactgagagattttgtggtgaaaggataatttattgtaacggcaaagacctcagccattacatttcagaaatggcatctggaagtacccctggagcaccactcccctcaaaactctggaatggctacaacattatggattgacaaaagttaatttttgaccctctacaaagttacatgttgtgacttattttgtttttgttctggatgagtggggtgaggtccctatgaagctaattggtacttttcatcttttaatctatatcctatgtggaattacttaggcagaaccccagagtcagagtgaactttcctttctgctcctctcttaagcaatttatttgtcgtttactctatctccacttttaccagtttgctgtaatttaatttagattaatgatatgccaatatgtgagccagggaaaaaacttctttcctttatagcaccctatgaattggtcaagggcaatgacaatttcaaggagaaatttgggcttgaaaactgagctcccaccactgtcagtcccctggtgcttcgccatcttatctaaagcttcttctgagaacatcacagcaggttgtccctgattgctagtacattctcctaaaggtgggacaagtgtaagaagagcatttgacacaacccagtctctcatgagatgactcccaatgaaggtcattgtttaaagcagagccatatttagcagctcttcaggaaaacaccacaatgcattttataaaacatactaagatggcaaaacagttcagtcccattggaggagagtctttattctctatttcccccccttctctaaaatgggcgattgcttttctgccaaagcggctcaaagggccacagaagctaaggtccttcaaagctgttaaatgcatcttcaaatttacaataaaatcagcatgacaaatcttccagtaaaatctctggagcgtcacagcagcgcctatacaattttcctttcagtcagtattttagtattccacaccttgagaaacagggaaagccaatgtgggcgaggaaagctaagcaaaacaaaaaccaaaacagaaaaaagaaaagccaccaccaacaaagacagtgaaaaaaaaaaaaaaagcaaacagccacgcgcgccattaagcatatgccaaagtaaacaatcggtgcgggtttgccacggctgtgccctgcaggtagaaggcaggcagcacgggagcaaatggaaggggaaagagaaagagaagcaggaagtggaggagccgggagcaaggcggcctgattgtgagccgcaagacacaccatcagccatgcaaaacaggacatacctttctggcttgctggttctgtcggctgagacaaagcagtcccattcgcagcgggaggccaaatcaaaatgaaattttatttagtctgcactgtccccagattgggtttcagaatgactgctttaggagatagcatggatgtggctgatgcatgctttgcatatgaaactgcagtaggaaaagaaatctacataatcaaaaaaatctgtgctgtgtgtgtgtgtgacaaaaaccctggactccagtgattttgctgccgtgtatgtttcaagcaggccctttcagggttgaaagacgttaaaaaaatttcttaaaataatgttattaataaatattaataaatctataacagcctagtttatgaaaatatatgcaatttcctggttacaactctgccacattaaaataattgtgatttctagtttatttaagagtgtatcaaaaatctgtgtgagaaaacaaattgaacttaaaaacaagtgcaggcgatttcttttggaagggcgttgttccaacaattactatactccctcaaccttgataaaataaattaaaagcttaagtcttaagcaatatggaaattaacactaggagcctctttgacttttctctgggaagacacttaatcatatttagacactattttaaaaaatagggcaaaagtctttgaaaacactctttagacgctggaaattatatttttgacattaagaaaagggactgtaaagtgtatatagaacacatatcatggaatctctaaatagagacatgtgtgctgtatgtgtgtattgtacacacacacacctactatgcttttaatacagggttacctcctgctttgggcaggaaaaggaagtgatattcaaggtgctgtgaaacaagggggcagaatagagcctgttggtaaatatatattatttctcaaagaaatacttatcccagcttggttttgatagatcagttccttgaggttgagtgctgccaatcattttctttaaagaggaaataaaaagtaaaagaaaaaagaaatagaaagaaaaaaaaatacctgtataaaacgacagcaaaaaaaaaaaaaaaaaaaaaaggcaagacaggctctcccactgcacggtgctccgaaaaaaacatggactcttgtaattctgttttatgaagtattcccaaggatgggaagaatatgaaatctgcccatttaagctctgaggaggcagtctccaagccatgacccagagcagcataaaaacttctcacaataatgagatacaaatagctcaaacaatgtgcttccacacacagccccagcagaaatcaccaacagcagaaccatgtactgatgtcccttagagagacagtcaagcctaattctgtgattcaggtttcgacaccattttcttagaaaagcttttccccgttccagtttggatgggtggcctgtcaataataatatttacaaatgtaaaggtcttcttaaattggtaattttgcattaggtacaaaggcatcatgttcagctgtgtacaccaccagcataattaaagcataaaatccaaagacagcaaataacatgtgcctcctttatgctccagaaccaccacgtccaggtctccttataacaagggcagtgccttggtttctctgttgctttcaagcaagaccctcttttgccttatctttccattatatcataattgttcagatattcactaagcaggagttttgcctgcctattatttttagtgacaggacaccccttttctggaggacggaaagatgtgacttcttaacaaattctctatcccccaaattcagtgcacctggctttcactttctacctaataagcatccgtgaatatgcaaatgttcagtgtctcagtaacctcattaatttattcctcaggcaatcatagaatgtgaagcggtcctgtgccactagtactggatatggtaggatcagggctacgagaatcagctgaaagctcaggctgcatactgaaacactgtttcatctttattccgtcttttggcactctaattcaaacaaagactcttaccttcctctacttagctgacagccaaaagcaaaaccagaaaaaaaaaaaaaaagaaagaaagaaaaaaagagaaatgcgtagggttagtaattaagatcttccctccaccaccaaacacgaacc

SEQ ID NO: 1880436 - DNA, 4001 bp, Homo sapiens
atgcctggctaattttttgtatttttagtagagagggggtttcaccgtgttagccaggatggtctcgatctcctgacctcttgatccgcccgccttggcctccaaaagtgctgggattacaggaacgagccaccacgaccggcctattttcttacacaatagttctactggggctccccaggctgcagacacagaacctgagcttatggggcaggagactgagtgaggatacctatggggacccacatggaggaagggatgggaacaaggcaggactgggagggagaagccggactcaacagagtccagctgaccttggggagctctgaagataaaagcccttcaatgtggtctccagttgaggcaagggggtcaggtctttattcccctacactaaccaaaggctaatacagaattccttaggaagaggcatgaccttgggctaggctgctctctccagccagggacatttttggaagaggctggcagctgatctgctaccgccatgcccagcagctgatggaaggagtgttttgagtcctaacgagatgtggagagcccaacgcaatatccactaaactctccatgtcttatcttaaacctagaatcgtgtgccatctatattattaaaatagaaagcaaagaaatccagagaattagcaactctcaaaaaagacaggatctcagaggtacccaaggttagtgtccccgaacgtagatactactcctacaatgccctagcagtgaatcatctctttgtacaccttgagagacagcagctcaccactgggaacctctagttgtgatgtggtttttacttatatcttctaggtggaaattgcactttgataacagtaactgtattgacaaattacggtcggtgtattgaaactggaaaagagttagtatggttgtgcaaaataatttggacctaggactgaaataatggagcagatattaatcatttcctttaacttattttacaagatgttttccactaagtagtcagaataatcttttttaatgaaagtcagattaaatttttttagactcaaagctctccacaattggaaagtagctcatactactcactatggcctacgagcccctctggtctggagcctgaccccaggtcagccctcatctcccacccaccactcagccttcagcccctttgccactgccacgtgggcctttctggtgctctccagatgcccccacctcgttctgctacaggactttgcacttgatgggaagcctggcttggtgctctccttcaagacctttgtaagcttccattcaaatgccaagttttcagaagggcttccctgccacaccccatctcagaagagctcctgagtctcttgaccccttgtgctgcttgctttcttttcacagttcttattaatttctaataagatttatacgtgcatgtttgcgtgcatgtgttacaaatatatacactcttatatacatatacacatacatatatatacatacagacatgtatacatatacacatatatacctatacacatatatgcatattcacatatgtattgtatctagttgacctttgaacaatgaaaaggttagggccactaaccctcctcagccaaaaagccacctacaacttttgactccccaaaaacttagctactaatagcctgctgttggccagaaaccttgctagtaacatatatagtcaatcaacacatattttgtgtgttatatgcactatatattgtatcttacaataataaaagctagagaaaaagaaaatgttgttaagaaaatcataaggacaagaaaataacatttaccattcattaagtggaagaggatcatcataaaggtcttcatctttgtagtcttcacgttgagtaggctgcttgggaggaggaagaagaggagtgggtcttgctatctcacgggtggcagagatggaagaaaatccatctataagtggacccataaacttcaaacctgtgatgctcaagggtcaactctgtaataaaaaatgtgcgtgtatgcgcatgttctcactcataggtgggaactgaacaatgagaacacatggacacagggtggggaacatcacacaccggggcctgcccgggggtcagggaagcggggagggatagcattaggagatatacctaacgcaaatggcaagttaacgggtgcagcacaccaacatgtatacatatgtaacaagcctgcacgttgtgcacatgtactctataacttaaagtaaaataataataaaaaataaataaataaataaataaatgtgtgtgtgtgtattgaacacatatcgtgttcgtcactacgtctctaagcttctagaacagttcctgacacatagtagcattaaataaatatttgttgtatgaagacattaataaatggcatcaatgaacaaatagaagcttgcttaaaatgtatagataatgtagtttgtaagtactgaatttttttttttttttctttgtgagacagagtttcgctctgagtgcaggctagagtgcagtggcatgatctcggctcactgcaagctctgcctcccaggttcatgccattctcctgcctcagcctcccgaatatctgggactacaggtgtccaccactatgcctgactaattttttgtatttttagtagagacagggtttcaccgtgttagccagaatggtctcgatttcctgacctcgtgatccacccacctcggactcccaaagtgctgagattacaggcgtgagccaaagtgctgggattacttggcctggccaagttactgaaatttttaagaaggggatgagaataaatatcagctaaaataaaataatctaatgaatggaaataaacatgtttttgtactgagctatagtcaaggagaagagcatttatatcacagttcctttctaggcaccttgacggcagggatcatgtttcattccagttgtattctccaaacccccactatggtaccttaaattattaggtacccactagatgtttgttgaatttaattgatttagcccgtttaacctcatcatcaagacagaagaccacagtcccctgatgctgttataaatgcagaaggctagtgtgttccaagtgtcagtatgtctttttctagatcatctttaatactattagactagtgtaccaattttcctcaatatgtataagtagacttatgaaaaaaacattcaatattgcattgctatttaagaggatttgctaagtttcatatgaatgaaaggcccattgagtggaactgagaaggactagcccatcaacaacattttatggggtggactcttctcagccccatcgtggacagaggtgttgctttcatgcttcaaaggacggctcaggacacacttagctgttggaaggaggcgtgtagggagtctggctgggttccttcattttagtttggtgaaccagccactcgacctccttaggagaaactggtaccatgtgtcttgaaacaaataaatgactgactctgacattccccttttaggataaactgcttccctagaaatcctctccagcattcttgccaccacgactttgggacacattgaccatgaggaggagctggtcaatgatggacaggagtccagattagcagagatgtggtaataaggacaccgatgcctaaatacttgaaatatccaataggaagcattccacctttgtgcaaatgcgaaccacatctcaccaagttcaggccaaggctgccaccggtgacgttttggaaaagaaaaaaaaaagcggggggagaggagagaaacagagaagcaaggaatgcagaagagagcagaggccacaaaaacagcagcaacgtgtcctgtgtattctgtttccttgtaaaactatgaagcatgttaaggagatacttcattttttgaggattcatactcttgtttatattataataaaaacaacccatgttctttctaaaaatttaggcaatgccttcgtgcac

SEQ ID NO: 1880437 - DNA, 4001 bp, Homo sapiens
gatgtgatggctcatgattgtggtgaaggtttagatcacgtattggctcaggtgccccaggggacttgctctgaatggtccccagaccctaatcagatattatgcaaattttgctcttgaagacttggtctgagcaaagattttttgagtaagattgcaaaagcataggcaacaaaagcaacgatagacaaagggggtaacatcaagctaaaaatcttctgcacagcaaaggaagcagtcaagagagtgaagcaacaactcacggaatgggagaaaatatttgcaaattacccatcctacaaggggttaatcaccagaatatgtaaggaactgaaacaactcaatagcaaaaaaataataaaaataatcagattttaaaatgagcaaatgacctgaaaagacattcctcaaaagaagatatacaagtggccaacaggcatatgaaaaaatgctcaacatcactaatcattagggaaatgcaaatcaaaaccacaatgagatatcatctcacctccattaaaatggctgctatcaaaagacaaaaaaataacagatgctggtgaagatgtgaagaacgggcaatgtttgcgcactgttgatggatggaatgaacatttgcgcacccactgtggataacagtataaaggttcctcagaaacctaaaaatagaactaccatatgattcagtaatccctctgctgggtagatatccaaagaaaaggcaatcagtatgttgaagagatacctgcacttccacgttctttgtaacactgctcacaatagccaagatatggaatcaacctgtgttcatcaatagttgaatgaataaaggaaatgcagtatgtatatacagtggagtactattcagccacaaaaaaaagaatgaaatcctgtcatttgcagcggcatagatggaactgaaggtaattatggtaattgaaataagccaggcacagaaagacaaatatagcatgttgtcactcatatgtgcaagctagaaaaagttgacctcatggaggtagagagtagaatgatagttattaggggctggaagggtagagggtagaaggggatgaagagaggttggttaatgaatacaaacatacagttagatagaaggaatatgttctagggttcgatagcacagtagggtgactacagttaacaatgacatattgtatatttcaaaatagctagaagagaagatttggaatgttcccgacacaaagaagtgatacatgtttgaggtcttggatatcccaattaccctgacttaatacgcattgcatgcatgtatcaaaatattacatatagtccataaatatgtacaactattacatatcagtttagaaataggtgacagccaaggaagaagggcctccagagagcccgatgggccaggactgtgtgagtaaatgagcttcctgagattacctgagccttggtgcgttcatctgcgagtaggcctctttcctgaagagagaatggagactgaagggtctgtgccgctccaggtgatgcagacagagcccgccggggcagcgctggccactctccccccactttctgctgtgcaccatgctgactcagccacaggtctgcccccaggacactgggccctagggagtctctgagaagcagtcattggtctttcagctcattatgagccaatggctggcgtgcttgtctcgtggaaataattcctttattcccaatgctccagttttctgatggcttaaccacatggatgggtgttcctttcttttcctggacagacgatggcatcgtagcacttccttagcatacaaagcacccgcagcatcttcccttgtttgattggatcagacatgctggaagagtctgaggtttagggttttgcttctagttctggatgaaacagatgaacgccataatccctatttttcctaaaagggagacatgaaaatcttgcgtttatactaaaaagtgttcccatctcattgaaattcaggcttgaactatccaccctgaacacgtccagaagccctttctctaattctggaagcagtgatctcgggagagaagttttccatctgtctccttatgatgctaagctgttagtgcagttcattatttattacatctcctgctttatgttaagccatgatcttcttttttgccatgtattaagaattcagtcgggttggtataaaaatagggttgttatctgtgtctccagactgacttttgaacagcatattttttggggtaggggaggtggttataattattcccaaactactttcattcttatccaatacttaatattgactctggctattcactataatactgcttcttatcagacatgtgcgtggccggagtggcagtaaagagatacgtcttccgaggccctgcatgtgtctgtagggctggaggacatttgctcccagaggcagagagatgacatgggagaatgtcagcatatcaaggcacagcatctcacagtcatagcaaatccggtctctgaataggcagtttgtggcatgtgcttttaaaatacaaactaacagacacaacaactggcattccaaacatctcctggtcctccagggcagatggtgccaaggcaacgatgtacttatcagagctaagctccccaggctcatgtggggaagggagctctggactctaactccctctttgccatcagggttcagctcccccttttcagccccgggccaggctgtctgcagctaatgggcagagggaatcctggcctaccagcctgcagggacatagctgagtgcaccgccatggggcaggaaggcagtcctgcacaagacagccccatgagggacagaaggaggaaggcactgacaccatggccccctctttcccccagtccagtcgttattgtcaactctcttcttggtaacccctggcccctcatgtcctgctcacagaggctcaggggtggtgaaattgcctcaaagggtggttattttattgaaatagaatcagatcattttccatccagcatcttgtttgtagaaatatcctattagacacagaaaggaaaagatcagtatcttttacaccataattaaaatatcacttttctcaatgaaacattatctagattatctcacaaaacagcattgcttacaacattgcttacaagccttataaatgtgaggctgccagctagaacactatagaaaatgttagttattgcaccatctcccacagttgttcttttgatgtgctggcttggaataaacagacttatctttcctgtcatacaacactgtccttaatttaatggagatgttattaagataaaatctctattcaattccatattgtaccatattaacacacacaattagtaatgctttatcagttatgaagaaagatgatgactgcttttaagctaaattacctttatcatggtagcacatgaaagaagcgacaaatatttatccgagtgtatgttaattcttatttaattttaacgctgcttttatcaaccaaattaaccaatgaattttattaaagggaatgttatagaaaagagcttccaacactctcttccatctgtttttatttatataattttgatggtttctttttctctttcatttcatttctaattaagaggaacacgtggaaaattgaacatttgggcttaattttaacagaatttggaataattagaagcatgttcttgttaatataaagattgtgagtgttgggattgcagggcttacatctgtgcatttaaaccccctcccacaaggcatcttgctcagtaaatctcaagaggtgatgggggcatcgtaacatggaaacataatctcaccttagtgattttacacttagggaagccaagcaattcctttttacagttttagaaatgcaagtagaatgtgacagcaagacgcatcttacaattcaggttggagcattctcctcagcaatatataaaccttgcttcccttggccctggaatcacccag

SEQ ID NO: 1880438 - DNA, 4001 bp, Homo sapiens
tgggctctgggtttctactttggtttcctggttgttgttgtcaaccagagccacagtcttcttgaggaccatgaaactcttggaagcccccagaaattgtcatcttcccagaaattggatattctttcttcctccccacagttggacaaggttctccatcctgtgagccaggcattgcactagactctggatatatcaggatgtgaaaccacagtcccttccttcaaggagcacagatgaatggggcagggtgtagataatagcagtacaatcttatgtaatagatacaatgctgggtgtttttcaggacaaggagagaaacacctaaaagatcagggggaggcgttttggaggaagtgggagcgcagcgtagccttaaacaatgaatacaagtcattcaggtcactggagagggtgcccagcttaagcagaggcatgaagatgagaaatatcgggaagcaagcagaaaaatacaagcaatagttgtcacggaagcaatgaagcagggcatctcccacaataaggccagaagggaatatagcagcaagagaatggagatcacgtcctccaatattaacacggtcaggcaaaggaggaagctcgaacagggcccccaaggcagtgggggaggcaagtgagatttaatcaggaagctaagaccattctatttgccttctggatgtatctgtttggtattgaaacaagaacatctgcctgactgcgagcaccgtgttgtctcttaacaccagactctgcccagtggatcagtcatcctggagattgactccaactggggaatggctcagagtcatcagaacaatttggtcatcatgacagggcttcagccatactgttccaaatacgccctcatcccagagcctgacatcactcccggtctcctctccaacccttagacctgtcactggggtctgacatacacaaagctaagcccaccagggctagcacctgctgaagtgcccaccatgagcctaagtctggctcacatctgcactgatgtcatcacacaacacaaaacatggctgtattcattttacagggctctgaatgggtagctgacttcactgagactataacctagatctcatggcctttccaagtttacacctgcatcttgtcatcaccttttctgtcccaaagcacagagtccatgggtaatttttaggtgtgtcaaacaccaggccttgtgccaaggactcagcaaacaaaggtaaatagggcacaattttacccctaaggagtttgaacctgtcatggcaaatacataaccatctttttcaataaagaacagaaacaccaagaggttatgtgatttgcccaacaccacagggcttcctggtgccgctaggacaggttctgaactagaactcagcactccagaccccgtggaatagtccattgccagcattccatgatgagttcacagactatggagaggaatcacctctggggacctactgagcagactcggggcagttgctgacacatccgagagtcagacctagttttctccttggctggatcctctctaaagccatctccctgattttagagtgggctttatgacccaggtgcatgatcagcctagctcttgcttttcaaaaaggaattagggaaatgctgaaagacactcggcaaatcaatctgtctgatagcagcgtccagcctggcagacggacttgttctcatgcacacggcagagacctgtaccagacgaccagcatctgaacccccgagccttgtctcacctgagcagggctccctttgtcacggtgtcagcggctccgagccgtgaaggttctgtgcttccaacgaggctcgtctgggaggcatcagcacagcttttagcttcctttagtgaggcagtcgtcaaaacactgccgggactgcagaatgaaatctggatttgagaaccctctgcagggctgccaggggtgcttggcactgcctggcgccaccagccggtccagctccagccagactgctgacctggcactggcgctgcgtgatataactcgctctcacggggaaggtttaactgtctcttccccaagctcggagtcctccagtctctgtaggatgcatctctctgtgatgcccctcttcccacactccgggctcctctctgccagggttccagccgttcagggactcacagcccaacccctgtaaacatgccagccaagaattcatcatttttagcaaagtaattattaatcccaaggcttctgttgaagtccttctcttttattagtgctgccaattaaaatatatttaagcataaagatatttataaagagtctagtgtttttccgtaaatacctatcgattgaaatcattttaaaaaaaaaaaatctagcaactattcccttattcctgtataacacattgttctcatttaatttatatgactttaagacttcatatggaaaggatatagttgactggggagacatggatacaaaaaaaagtaaccatgtaggaaattaataatgcacattggaatattaatcatgtcgttggaagaatgcaagagacacataagagcatagaactgagactaaggagacctggagacctgggttccagttccagaaataacacgaaattaactttaaagatttgtgcaagttacttggtgcctggacgtgagtagctccccggctttcaagcagttaggttggttgattgccaaagtccttcccagcatcaccattctaatatatatttttaagccaaaacacatatacctgtggtttttagaggaagtataatacagccattagaaccactgaagactcacaggcttctaatcctcactgccccttcttagctctgtgacccggacaaattttctacagagtagacacctcagtatccccgattacaagatgggagaacatttgctgttacatgagctgatgcgtcgctgttaagaattaaatgagctaatttatgcaaaaccagctggaacattgcttcatctatggttttgcacaataaatgttaactgttattattactctattcaatggtcctaattctaccacaactatcttactaacttactagttggccagtactggatatgcagtacttactatatttgtgtaggagtcatagtcttcatgtaacagggtcctgctaatgctttcaaagataaggccacatctctgtgttagaagacagatttttggcttagggaaaaaaaaatttattgaacacttactgtatgccagagtactctctaaaacatttttttctatatcatctacatgtttcagggcactatgtaaagtgtattcccttttaataacaatttaaaatactctcaattataaaacaaggtgattccaatgcataaaatgtacatactttgcccaaagctatagatgtggttagtgttaaatccaggaaccaggaagtctaactcaaagtaattcatcatgtcaattgcccaagctaaagggggattcaaatgtatactgctcaggtggtgggtgcaccaaaatctcacaaatcaccactgaagaacttactcatgtaaccaaacaccacctgtttcccaaaaacctgtggaactaaaaataaaattaaataaaataaaggcgaatgcaaacagaaagtagaaactgaaaagagactttataggagggcaatagagattggtctttttgtcttcaatctctcacctacaacttttttttttttttttttttttggagacagggtctcactctgttagctgagctggagtgtgtggtgcaaccatgtcccactgcagcctcaacttcccagctcaatcttcccacctcaacctcccaagtagctgggattacagacaccatcatagctggctaacttttaaatttttcttttgtagagaaaagatcttatattacccaggctggtctcaaactccagggctcaagagattctcccactttgacctcccaaagtgttaggattacaactgtgagcca

SEQ ID NO: 1880439 - DNA, 4001 bp, Homo sapiens
catgtgaaaagcttgtatgtgaacgctcagagcagcattatttagaacagccaaaacgtggaaacgacctaaatcccataaactgcagaagagatagataaaatacggtgtaggtaagtaacagaatagaagtcaaacataaaaagtaacaagctactgatacataccatgaacataaatgaaccttgcaaactttgatagaagccagtcacataagacccagtgttgtgtgacttcatttatatgaatggtctagaataggcaaatccatagactgaaagtgattacggatttcctagggcggggcagatcagggaaatgggcagtggctgctgatgggtagtagtttcttctggagtgatgaatgttctaaaacgatggtgatggatacacaactctgtgaatatatacaaaccccttgcatggtacacttgaaatagatgggctggatagcatgtaaattatatctcaataaaactgtataaaaataaagagaagcgcccggaagtgctgccttggagtcggtgagaaggcggccacggccaggcctggtgcctgaagaggagtcggagtcggcggctgtagaggctgtgcgccacatacatctgcagaacttctcacgctctctgcttgagaccctcaatgggcagaagctgggtgggcacttctgcgacgtgactgtgtgcattcatgaagcttcgctgcgtgcgcaccgctgcgggctggcaatcggctcgccctccttccaagacaagctgctgctcggcccctctgagatccgtgtgccttcggtggtgcctgtgcagacggtgcgacagctagtcgagctcctgtacagcggttcgctcgttgtggcacagagtgaagccccgcaggtactcatggctgcgtcggtgcttcgcatagacagttatcgacgaatgcacgcagattatcgcacgcgctcctctgcacccgcgagcacctctgcacccgcgcccctgcccacccctgtgcccccgccactcgcacctgagcagctgcgtcaccgcctgcgccacctgctggctgcgcacccccggggcaccccggtgccgcgcacagcggtaagcagcgccggcccgcgagtttgcagctgcctgcgcccccgacacctgccaaagccgaggggcttggtgcctacccctcactgtccgcggcccctgacgaccgaggtgacaacgatgacgaggaaactgacgatgagaccgatggcgaggacggcgaaggtggcggcccgggagagagccaagcacctccttccttcccagactgtgctgccggcttcctcactgctgctgctgacagcgcgtgcgaggagttccatgcacccactggcctctctgactacagtggtgtgggagagattttcttccgggatctggggcagctgaggacgtatttccagacagctatgtaaccgcttggcacgacaaggatggcgctgtccccgaaggctgtcccaccgagacccctgtccagcccgactgcatactggctggaccccgcccgcctggcgtgaagaccccagggccgcctgtcgcactcttcccctttcacttgggtgctcccgaaccacccgcaccacccccttcagcaccatccgtgccagcccctgcgcccccacccgccttctaccccacactccagcccgaggcagcccccggcactcagctgcgggaggccccggctccctctgctgctcccaccacggccccctcaggcaccactgctcgcactcctggtgccgagccacttgcctatgcgtgcggccactgttgcaagacgttcagctcaaggaaaaacgacaccaagcacatgttcatccactcgggggagaagccgcaccagtgcgccgtgtgatggcgatccttctcgctgcgctactgccgtttcaagcacatggtcacgcacacctgcgcgcacgccttccagtgcgcggtctacgccaagcccttcccgcagaagagttcgctcaatatgcacatgcgcactcagcggccagagcgcgcgcccttcccccgtctaccgcaaggtctcctctcactgggcgctgctggagcaccacctggctgcgcaccccgcgccctgatggggctggggcctggtctcgcccactgtggatccgcaacctcccgcacaggcggccacgcctgctttcccaccagtaggccacgctccctcctgagcgcaagtcctctttctcccttcacccctttctccatacgcccaagtccgccttactcctctcctccatgtacttgaaccttccaggtggtgctgggctggggctgggcctgggactggttagggatcggaccacctctgagaactagaccatttccggcctaaaccaggcgctcaggcccttggacccggcccaagatttgactccggttctcgccccgccctcttctggggttggggtggggactgaggccgctctcctgctccagtgtcgggctgggcaaggtccctggctccctacccaagccatcactccctcatggggctcctaaggaggctcaagtggacccatcatatatgggggctggtcctcgggaccctcactctaataaaggagtgtaggccatggtgcctaaacaataaataaataaatagaagctccagttcacagcccccatggggcctaaacaaacaaacaaacaaacaaataaataaaagctctagttcatagtccccttatgttaggtgtagtcctatgaccagcttttgccaaagggaggcaatggactaaggtgagccacttccagagctggcccacaaaagcctccaatgcctttctcacactctccccttctaccgatagatgcaggtgggaggaggtcccagagatgacggaggcacctgatggaaagattctgggttcctgcatgcccacgcagaggaaagcagcctctaccctgaacgcccagccagcaacttctggtgggcccaaaatataatgtgaagtcagtgaaatctgggggagtcatctgatatttcagcacatgtaactaatgtatctgcttaaaaacttggccggggccgggcgcggtgtctcacgcctgtaatcgcagcaatttgagaggccaaagcaggcggatcacttgaggtcaggagttcaagacaagcttggccaacatggtgaaaccccatctctactaaaaatacaaaaaattagccaggtggggtggtgggtgcccgtattccaagctactcaggaggctgaggcaggagaattgcttaagcccaggaggcggaggttgcagtgaccctcgatcgtgccactgcactccagcctgggcaacagagtgagactccatctcaaaagaaaaaaagaaaaacacttgaccgggggcagtggcccacgcctgtaattccagcacttcgggaggctgagaatggtggatcacctgaggtcaggagttcgaggccagcctggtcaacatggcgaaccccatctctactgaaaatacaaaaattagctgggtgtggtggtgtacgcctctaatcccagctactcaggaggctgagacaggaaaatcacttgaaccttggaggtggaggttgcggtgagctgagatcgcaccactgcactccagcctgggcaacaagaatgaaactccatctcaaaaataaataaaataagtaaaaatttaaccacactgttagctaagtattttttagacatttaaacccatttaaacccagccattttgtctcagaaaattttgttcctatgcaatgtttgattttgtgctaaataaaacatttaaatcagaattataccaatctttaaatctttttgctaacacagtattttccagggcattttttttttctatttttttttaaagcagctgaaacaggcacttgtttatttccccagaaggaggcagaatggggtccttggggagtctctgtcccagcctggtgccccggacaggcagatctcacttccagaagagcacattccagaa

SEQ ID NO: 1880440 - DNA, 4001 bp, Homo sapiens
actagaaaatttgagttcaaagaggaaaaactgcatgaagagtgtttctttttgttgataaaatgttcaatccataatgaagttatatacttccataaaactaaatataatagacagtattaatatttatttgagaggccgggcgtgttggctcacgcctgtaatcccagcactttgggaggccaaggcgggtggatcatgaggtcaggagttcgagaccaacctggccaagatggtgaaaccccatccctactaaaaatacaaaaattagctgggtgtggtggagggtgcctgtaatctcagctactcgggaggctgaggcagagaattacttggacccgggaggcagaggttgtagtgagattgcaccattgcactccagcctggggaacagagcgagactccgtctcaaaaaaaaaaaaaaatatttgaagtgggattggaaccacagggagaaactggcggcactacagctgtgggcactcttaatctcccagtccctggtaggttttggagacgaaggtaagtgggcttaacaggtaataattgctccgtattactcagagtgtggatgatgtcacattaccttttccctccaaatcaaataaaatttagccaaaacgtccatatgcaaagactggtagcaagtctgacattattattattttttttttcaattgaagcctcacccctcccttgaactcaacatggggacttctttctggacaaaggggagagacctggtcctctgtccaaggtgcgttctgccgctgctgcccccctcccaggccaggcctgtccactcaaagcctggcagctccagcagtgagtcaaagcccctgtgccaagtggggccacagggatgcggcccccccgtcacccccacagcccctttggcagcccttctaccccaggcctgcagctgagggcctgtctgttagctctgcgggtgggctggaggtgtggtcagttacctttagctcctatcttggtccatttgggctaccgtaacaaaataccgtacacggcgtggcttaggagcatcaggaatgtgtggctcacagttctggaagacggaggtccgaggtcgaaggcccagcagcttcggtgtctggtgcggaaccgccttccagctggtaggtgtcgtctctcaggcctctttgatgagcctgatcccgttcgtgaggtttctgcctctgtgacctcatcacctcctaatgtgaggccccgccctcacttggggatgaggattccagcatgtccgtttgcgggggacatattctgaccgttgaactctttaaagcaaagccctaatttctcctctttctttcctagtggggctgatggcgcagtgggaagagtttgactgtccagatagcctagtcccagaccccagaccagaaatcctgtttaggggctcagtattgagaaaggcaatgtctgggtcccccttcctcaaggctgggcaagcggccctgcccctgtgagaggtgctgcccctgctactcagccctgccctgcggacgcagtctgctgcgggggtttcttggcaaattagccaacacatcagggtctcgagtatgcaaataatggaagactgacatggaagtagtctatgttgtaaccatccttgcgacagagcccacctgacttgctgtgtccctggatccgcaatacattctaaatgctggagacagtagaggtcacatctcctaactacagtgtaatgacagtcaaaataaaaattcaggaataaattggaacaagaagactcgcttcctgggaacttaaaacagtcatctcatggataaaagagaaaaaccaaatcagcagtgacacaatatttagaaaagaacaaaaaagaaaaagttacatgctagagcttattagatgtagcttggactatactgagaaaataattccacagtttaaaaactgttaaaggaaattaagaaatcacttgaaatgaaagacaaacaaacccaaggaaagcagaagtaaggactacagataacagcagaaataatgaattcaaagatggaaacaagtgaattgataaatgaagcctgagagctgactctagaaaaatcgaatagataatctactaacttgttaaccaagaagaaatgtaagaaaacacaaattcccctcataagactagccttggataaaccagaatttacagagaacaattcttaccattctaagttaaaagagtttgaaaacgtagttgaagaaggtaatttttgaaaagtatgtattattaaaattaattgaagaagtgttaacatattgaaatgcaccaacatctgtagaaacatttgagaaagctgtaaaagaatcaacgcaacgaagtgtagcttgtgtgtgtgtgcatggtgtgtgagagtgtgtgcctatatgagcatgtgtgcatacatgtgcatatttatgggatgtgtgtgcatgctgtgtgtgtgtgcctgtgtgcatgtgtgcacatgcatatgtgtgtgtgatgtgtatcatgcatgatgtgtgtgtacgtggcaagtgtgtgttcctgtctgtgcacgcatgtgcatgtgtgcatggtgtgtgtgtgtgtatgtgtgtgtgtgtgtgtgttttagccttctgtaatctttctcatgctttccaagctccttcaaatgcaagtaataataatcaaaggaaaacgaagccccgtatgtttaggaacagtgccatgctttgctgactggcgaagctctgtatctttaggggcggtgtcatgctttgctgactgtcaaagccctgtatctttagggacagtgccatgctttgctgaccatggtgctggctgtctaccgctggtccagacccacctccatcctcgccacgctctgtgttgcaggaggctgactgcatgggccagaccccagcggcttctctgctctttggcttctggtcaggttggcagccagggagagagagtagaagggggcaggagctgggcaaggccgcctggctcccaccctgtctgttgctgtcatttgccttctacttctgcctacactcaaacgtctcaacttctgcccttctgctgatctctcggctcctctcggcctgtgtgacagacttggagatgtgccacccagatgccccttccaggaaggacttgctcccagctttggggagtggtcagaacatggcttccacctgttagctcttcaggatcttcccagtgatgagccccaaccggcctgggccaagtttttcatgcccagctaacacccggagactgggagagggtcttgggagacccgaggtgggatgctggatgggtactgtgcacttgggagcttccagacaggcctgtaccacagttgaacgtctccctccacccgcttctccctcctgtccaggtgctggaccctcataaacatcttgtatcctgactttgtctcaactcctgcttctgaaaaacccaacccatgacaggcgggtctctctccagctcccaacccacgacaggcgggtctctctccagctgccattagctactccggcagccccttgcctttcaggactggggtggtaactcccagctgtcaccagccccaagatactgtggagggtcatctcagcgattcccagcacaggctgctggctgacagtggcacagttcaggtcgtccattagctttctctgcacaccacgatcctgagacaagcttggctcgggggtcccacagaactggacagcctgttggaaacgggctcccggggatcgtacactcactccctaatgttggtctgtggggtcggagggggcagcaaaatggtggatgggaggagacctcaaatgaatgcgtgcttcacagaagaagtctccacgatgttttgtttaactactgcgttctgagcagtcaccctgctggaagagaagaccctcgctccgggccccacagcttccccacagagctgggatattggaatagtgtaaatgaccttcctttccccaaaatgcccccagaaggc

SEQ ID NO: 1880441 - DNA, 4001 bp, Homo sapiens
gaaagcaggaatcatctcagcaatccgtctctggattgggaggaagaacatgttcctaaacacatttgctcactgctagggaggcggcgcctcttctgagggaagccactccctcttcccacagcctgctcctggctttattgctcctctcagtcactgtcactgccgtcacctcctcatcaaaatctacccccttctccctctcttgttctctcccctcagccctgcctatcttattaacactttccaaacacgtctctaatccactcctctccctctccccagctccaggacaccctcacagctgcgtctgtggactgcttcagtatcctccctgctgaccctgtggcccacagctcaccagcttctgtccttccttctaatccgtacaccaagatgtcccaaaatgttctttgtgaagagtaaatctaacagtgccttccgacggctgaagaccatttgtgactctccacggcctgttctcagcccaggcttctgttcccctagcaacaccaaactatcaccttctgagcactcaacaaaaaccctgctaagtgctttcatgaaacttcccatcgaatcctcacaacgtcactggaaagaggcattgccgtctgcattttacttgtgaggaagctgagactggaagggctccatcatttgtagacagcaaggcagtagtccagctgggatcctcagccaggcaggcccaggcctacaggcactggcccaccccacctccggttgctcccagggccacttagaagtttcaagtcctccccagcttcccaaggccaactgcaaggagtttctcaatcccttccaggtgtccccatcactaaaggatgtgtccgtctgcagcttagttgtacgtctgtttttctccccaggctggatgccttgaagataagaatcatcttgagtccctaatgcttagcacagagctgtactcaggagggttaattgaattaattaatggtcagcaaaatgaatgagtggatgaatgaatatcacacattcaagtgatcacatttcctgtctcttccacaataaggctcaattgattggtttggctatgttaggaatgttggacataggtatactggttacagaatagtatcagagcaaggttaaattttccacatttaagggtggaatcaccctcacaataaacgtgttgtttttgtcagcattgtcgctgttgttgtttactatggaatgtcaccatgcttgaatcttaagcagacgggcttgggctccattcataattttcctgctttagaaaaagttatgatcacagaaggggaccttagcgcttgccaactgccagagcccaacagcagccttggtctcagcacaggtggatgtgattttctttaccggtgatctgtccacgagctgtgcagtttgtcccactgatgatgtgggtgaaggatgaagccagggctcacccttctaagggggacattgagattcctgggcattgtaccaattcagccatatgtcaccccagaaagtaactgctttttccatatatgatcataactaatgttgcaaagcctgttttgcctggatccttttacagaacctatgcaaaatatgctgtgcgctttcactccagatttctttcttaggatgaatggctctgcacatacacgggaacaagatcttattcttttcatcaggaatgatcattattccataggctaattccctgcgcattagttatatggggtgaagttctggctcatatgcaggagctgatggaaacagagtcctagtggccaaatacatcctaatgttctcctttcaattctttcatttttgctgtctttaccttttagaaaatgttaatgtattcctgatgaattcagtgtgaaaaaaaatatgtttatcagcttgggtttaaaatttttattcataataagaatatagtagcactgccaagaccctccaaagccaatcctgagatcttcgccagctctttgggggcatcgtaaacaagctgaccatgcagaagagttacaagaaaggagttcccatgccaaaacaatagcaagtgtattttcattaggtattgatgctttgttcttgccacgagtagggttgaaggaagtgtgttctggtagcaaaaaccctgcaagttgtcatttggtaactgcataagttgtgcctttagccagggccaaatggatgataaacttgccactgttaacagtctctagttatttggagcaatccacactttttcttgcaaaatcacacactcaatttcttgactgcgtttcctcatctataaaatgggagagagggaagataagctctgtggcccttttgcactctgcaatctctaagtgcctttgcatttccatccagccccgccccaccccaccccaccccaccccaccccacccaggggatggatgtccacagtcccccaccccagccctgccagcattgcaaagcctgctgaggatttgcacaagtaaacccacctcagcagcttcactgctccccttagtaaataactgcatacagaaaccctgcagattctcaggctgcagccagcgccacagctgggttctttagtttgttgtgaaaagaattccagcatgacacagctcctctcagcacaaagacatgctgaagcactaggaaaaaaaattttttaaagaatgcttctgaaagccaggcagccaggagagaggtgtaggctcgggccagcctcctccctgccggggcctggacctgttgcctgggctcttctcctctcaacagtaaacagagcggttcacgaatcaccaaggctcagaacggcgggtctggccacaggggtgcctcagacgcctcccgggcatctgcagcaaacagtgccacctgcactgtggtcagatcagggacaaccggtcccccctgttgtttgatttctaaacctgcctccacctccccaaggcctctgagagctgagggcttgcaaatcaacacaacatttaattaactgcacattaaagtttccatctttcaaagaagggaattagggacagtgcactttctgaagcactcattaatgaaaaaataaattctaaagcctcctgagtttggggtggtccttaccattctaggtggcttcctgctttaatgctcagggctgggcaagttccctcagatgagctgcaatcttcaggcgtttttaaccctctgacagccagccttggttttgccccacaccacgcaccctgaataatccttaagagttttcaagaaatatccagaaatgtttccaattatattgaattatgaatgcttttttattaaaagatatacagttgttacttttaagagaggcatgaataatataattaaacaactgtctatactacctatggaatggttgtaagctgctattacccttgagaatgacggaggcgcatgtactgctggcatggagggacatggccatcagcttgacagtggggagtgatagagatgggaaggagagcaagtgaaagacagacccgggccaggtgtggtggctcatgcctgtaatcccagcattttgggaggctgaggtaggtggatcacttgaaggcaggagttcgagaccagcctggccaacatggtgaaaccccatctctactaaaaatacaaaacttagctgggtatggtggcacatgcctgtaatcccagctactggagaagctgaggcaggagaatggcttgaacctgggaggtggaggttgctgtgaaccaagatcgtgccactgcactccagcctgggcaaaagagcgagactctgcctcaaagcaaaaacaaaaacaaagacccgaagaaatccagtgcaattcatctcaagcagggtagctctccatgtaccaattcaggctgtggctagatacacacacacacacacacacacacacacacacacaaactcatcacttactcacacatcctgcctggaggcaaaaaaaaaaaaaaaaaaaaaaaaaaaacagtgaatg

SEQ ID NO: 1880442 - DNA, 4001 bp, Homo sapiens
gtggttggtgggaagaagagggaagtcacactcacccagcccctccctgcatcctccacagtcccctggggcggcctcactactgacatcatcaacgtcgctccagccgggaccgaggccgcacgcacaacctcagcggagcttctccccttcatccacgatgtctacattttagattgtttgattttagccacacattaatttttggcaagttcttgctagatagcctaataaattagaactgataaaacctgaggtgttctgactaaaacctgaggtgactgatgctaggtggtgggaagatgcgtcttctccccagagtccccaccgcaatggggacctgaggctgctgcgtcttctccccagagtttccaccacaatggggacctgaggctgcacaggtcccctcaggccccataccctgacacccacctgtccaccttcctctctgcctccagccctttcctctctgctctctaggatctccacttaagattctccagttagcattcttcctccagaacaaccttccctggcaactcctcgctcttcccaagaccaccttagggaccttcgtacacagctctccgggagggagctcccagcaggcagcagctgaaggcctggcaatcctcccattctctcacccacaggccccagacactgcagggtgagaacttgtgattatcttcacttggatcccaaaccctcagcaaaatggttagtgcctaacaggcgcttttgaaagaggagtgagcagataaagaaaggaatgtgtttactaaggaaagagcctggtgtgtctgcaggtcacacaccccaaagtgccacaatctgtctctggtggaggcttcgacggtgtgttcttcaagttcatttaccaggattcctctggcattttattggccctatttcatgagtagtgaaacatgaaataaaatgtctatttcctgagtagtgaaacatgaaataaaatgtgaaatggacaggagatgttgtggggcccgccctccccacctgcagggacctctcatcccaggcctgtttcacggggaagccctgacaacagttatgccactaagacgcagcacgtaggcgtgccgtccagctcagggattcaaagcgtgtgacacacggcactgtcactgtgcgagcacctctcacttgtaactggattcacatgcatctatgaagactgtctccactcagcacaaaaactgcactttttatttatccatgtattgcccctttttccacagaatcttttttcctgtttcaatgagcactagttgctgttaaaatgaaggtcaaatgcatctttcctaaggttttcattaaacttaaacatgtggtgcagagtgtccacaatttaaaattatgtgaaaccaatttccctagatactgactttaacttgaaagaagagagctcaccccatttgattttcatgcaggaaatggaattgagagatcaggtactccccagtaattgctttccaaagcagctgtgagaagcacccccgagtgtggagaataattctcaatgcacacagctactctcaaatcaaatactgatcaggttgcaaaaactaattttgagtccaactctattcctaaataaaaagaagagcgttcacatgtgtcagaattttggcagcgtatgctccttcagtctgggagctgataaatctcacctggtcaagtgggagcctctggtgtctgagacggcaatgggtgcgccctttgtctagacggcaggagcaggagccaagatttaaacgtcagtgcctcgatccaatttccatgtaaatacactgcctgcgaggtgcgtggactcgggagctctgacgtaaacgcgctgcctgcgaggtcggtggactcgggagctctgaggtaaacgtactgcctgcgaggtgcgtggactcgggagctctgacgtaaacgcgctgcctgcgaggtccgtggactcgggcgctctgacgtaaacgcgctgcctgcgaggtgcgtggactcgggagctctgatgtaaacgcgctgcctgcgaggtgtgtggactcgggagctctcacgtaaacgcgctgcctgcgaggtcggtggactcgggagctctgaggtaaacgcgctgcctgcgaggtgcgtggactcgggcgctctgacataaacgcgctgcctgcgaggtccgtggactcgggcgctctgacgtaaacgcgctgcctgcgaggtgcgtggactcgggcgctctgacctaaacgcgctgcctgcgaggtccgtggactcgggagctctgatgtaaacgcgctgcctgcgaggtgtgtggactcgggagctctcacgtaaacgcgctgcctgcgaggtcggtggactcgggagctctgaggtaaacgcgctgcctgcgaggtgcgtggactcgggcgctctgacgtaaacgcgctgcctgcgaggtcggtggactcgggagctctgaggtaaacgcgctgcctgcgaggtgcgtggactcgggagctctgacgtaaacgcgctgcctgcgaggtccgtggactcgggagctctgatgtaaacgcgctgcctgcgaggtgcgtggactcgggagctctcacgtaaacgcgctgcctgcgaggtgcgtggactcgggagctctgaggtaaacgcgctgcctgcgagatgcgtggactcgggcgctctgacgtaaacgcgctgcctgcgaggtgcgtggactcgggagctctcacgtaaacgcgctgcctgcgaggtgcgtggactcgggagctctcacgtaaacgcgctgcctgcgaggtcggtggactcgggagctctgaggtaaacgcgctgcctgcgaggtgcgtggactcgggcgctctgacgtaaacgcgctgcctgcgaggtcggtggactcgggagctctgaggtaaacgcgctgcctgcgaggtgcgtggactcgggagctctgacgtaaacgcgctgcctgcggggtgtgtggactcgggaactctgcagcttctttcagctccagtttccttgtggacaaatgaaatgtagtagctcccactcatcctcacggggcacattccagacccggtgggtgtctgggactgtggatggcactaaacccgacggccgtcagtcagaacttgtttatccttaagtcttccacccacacattcaatacctgatatggtttggacttgtgtccccacccgaatctcatgttgaattgtagtccccagtgctggaggtgggacctggtgggaggcgactggatcatgggggtggatttgcccctggaggtgggacctggtgggaggtaactggatcatgggggcggatttcccccttgctgttctcacgagggtgagtgaattctcaggagatctggttgttgaaaattgtgtggtgccgacctcctgtgttcttcctgtggttaaaacttttgcagtttgaggtgcaacagcaaaactagcaggaatttctttttctttctatgcaatttcagagatagaagatttgttcttatggtagatattagcaacctcagcatacaattttttccttccttcttaagtagagaactttcaccttttcacttaaagggagcactttacagcttctctttgccatctacaagctgccagcctcactgctcttctgatctggagcccttggtaagcaaaataagggctgcctgaactcaggcacttgtgatctgcatcagtggacctgctgacccaggagagctactaagccactaacaggcatgtggtgtgcacagcatggatctgctgggcaaagagatgacccggtcctggtcaggatggagcaggacagtgcaagatttagtcataatgctcagaatagcatgaaagtttgagaccagtctggccaacgtagtgaaaccccatctctactaaaaaaaagtacaaaaattacctgggcgtggtggtggatgcctgtcatcccagctacttgggagactgaggtaggcgaattgcttgaacctgggaggtgga

SEQ ID NO: 1880443 - DNA, 4001 bp, Homo sapiens
atgccaagttttcaagaaagaaatgaatttggattgtttattacaccaacaagacacatgttcaaatttatcccctgtatataaaaagattagtataaaatatttctcaattgtttatgcagaaagtagtagggaacaaattccaataatttttatcacatagctgatatagctaaatatttggaacctttaaaagaaaagtgctaattaaaatacatataaatttttcaaagtttaaaaagcagttggaaaaatacttctaccacttagaacacaattacctgcacagcttaatagtcttatggatttcagtagtaaaatatgtttagaaacatcttgtcttttccattccctcaaacacacagtgggctgagaatataactcttcataatatattaaaaagtatccaccatcttgagaaaactatatattatggtaataatttttacatctgattatgccatttttagactatggaatatagtttctgaattcttttggggggagggaaatggtgtggaaaaactacttttaaaacgtgcttctatcttcatttaaaatgtataaattctcaagtttcttaacaaaaaactttgatcccactattttatatagactgcatttataggcttggaaatcctgttctctctattaaactccttagacaggattatattaatcttacttaaaagaaaaaactacttacagcaaacatggcactcaaaagaattaaaaataatacttgcaatattttaatatttatgaaaatctgttttttgaaagacagatgaacttagaaatgtgaacacacaaaaaaatacaagtataaagtttcctttcgaaacttttcctttcaaagaaatatttatcccacatttctacatgcaaaacttttagtgtaaactattgagaaaatcctaaatagtaaaacatttgtttctgtaagtccataagcacttgctgtacatactcagaggcagccctggcccactgtatccgcaaatgcatctgcagggggaatggttccaagccagtcactgagtgtcatctgtcccttctccaggggcagggacattgagtcacaatgaaattttattatttatatacattattttaaattctgtttttcttagagctcaaagctttgacagtaaatgtcaaaccacactgaagttgacttgttagcttttgtagctagccttactgctgtcggctatttcaaattgcaaatgacaataaacaggtggttttttcttttaatcactaaagaacatcccttttcatatagctaatataacaaaaaagtctaaaacatgggcatataattcccactgtaaattaattataattatttcaggcttaagtattaatagtaagtgaattcttttcaagagatccttggcggttccatttgcccttgaacattaaccctgccacctcaaaactcaatgcctttgcacttagtctagaaaattaaaaatacaactcgtcctcatcctagtaacctgcgcaagtctctacaagagactggaggatctacgtggtaactaactttaacttacctcttctaggctttattaacgagtttatcaaaaaatattaactttcaggcaagatgtggctaattcttaaatgcagcttaaaactttcgacatccccttgtaaaaatgatgccacgaaatgtgccactgtccatttatttcccatttcacttaacgcattaatattgacccttcggacagcagcgctggcatcattttggagctgcaaagcaagacgtggcgcgttgatgagctaaaaaggacccgtctttctctgggccccttaccaacatctctctccctagaagacaaatacttttcagatctcgcacccctctttacaaacctgagcggggctttcggggtaaggggaggcaagactttggtgggagctgctcgtcttcagcaaagcgagggccggctgcaaaggcgcaggctggcagttcgggtcatttcctgccgattccccattcccctcggagcagcttggagaggaagtcggacttcttttccaggcggagcctccacgatgggcgtgggcgcctcgtgcgtgggccgggggcctcgtgcgtgggcggggatcggggcctgggaaaaacgggaacccggtacccgcccgcgccctcgcgcgtcggccaggaacctcggccccatgcgggcgggccagcgcggccaggagggccgggaagaggggtccccggggccccggatgcgctgaactccggggaggggatgggcaggagagagagcacactcctggagccgcgacgtccaaacccggacgcacttgaacccgcagcgaggcccgtggctcgcggccttcggagagcacccgcgccccgcgcagaccggacgccggccttgcccgatcctcggcatccttcggcggggcggccagtcccagggcgctcgctgagggccacaccctggccccagagtttagcaccgccgcgggcagggcgctccgctcccggaccccgaatctgaaagcggagaccaagggctgcctgcggcaaagctcgacatacacttgattttcttccgatttggagaaaatgtcacgggcgagagcaaaaaaaaaaaaaaaaaaaaaaaaaaaaaccctaactgtaaatattatttggaggtgggcgagggcgcggcgtgcgcgcggcggcgggtggcgggcggcgcgggcgcccttgcggggattcccggtctctcagcgcgccctagtggacgccctgcctttcgctggctccccgtgctcgttacaatctgcaatatattatttcttccgaagtattgacaatgtgtgagactccagtaaccccggagctctcgtctgtaatcagcacatttatccacatttaagggggaaaatccgaattaaatccccgtgaccctgattgggttacagtgtcattttccctggatcctcttttaaatccactccacactgcttctctgtctattacatgctaatttaattttactgtggaagatattttcaggatttgctgaggacagtaaattttgtagtttatgttatttcactttttatgactttttaacacttaataaaattttattagagcacttttgtgtttacaaggccacaaaactcttggcaggttgtcagaagtcctttttattatgatcctactgatatactgcgagtaatgaaataatcatgtccagaaatgtatcaaaggccagagggattatcccacttaatagctccacagatgcgcccagaagaatgtggacgcgcgacaggacgggctgaaaggctgcaggaggaagcaggcagccccggctcctggctttaccatttcggttgctttcctaaaaggctacatgcagggtcatgtgactttccgcggtctcaataaaaaaaaaaaaaaaaaaaaaaaaaaagaatttattctattgcaaaatgtgcttttctttttatactccttgtgtgggcatttaagactgttctagtggcagtggggttggctgtacatatccatgtcagtcaccgcgcccggccccactttcttctcatttctaagtgtacttttgtggcatttaaactgccgatggtgactttggtgttgagcggtgttgtttccacagcccacactgaaggcattgggagggacccaggagggcacaaggtgttttaaggccctttcccacctgccaaacaccttttgctgttgctttttggttttattttgttttgcgaaaccggggaatagtgacttaaggactcggctttctgccttgtgccagagagccacagtacactgcttttatttttattttttggtaagacttggctataggaaggactgagaatatagctttcatttcttttaaaaaacatttccttttcttttaaatagatacgtgatcatttaacacacgggtgttaagttcattcttgctgcaaaagaaggccattgtacctcctgaccctgaaagcaaggt

SEQ ID NO: 1880444 - DNA, 4001 bp, Homo sapiens
aaaagccaaagtttagaagaacacgtgctatggatacaccaacagtaatttcaaaatcactctgtttatgagtccattcctcacctcttttatcactttgacacactctttaggaaataacagagaaagagaaatatgaagctgaagacagaaaatttaattataaaacaaagccacccaccttgctttcagggtcaggaggtacaatggccttcttttgcagcaagaatgaacttaacacccgtgtgttaaatgatcacgtatctatttaaaagaaaaggaaatgttttttaaaagaaatgaaagctatattctcagtccttcctatagccaagtcttaccaaaaaataaaaataaaagcagtgtactgtggctctctggcacaaggcagaaagccgagtccttaagtcactattccccggtttcgcaaaacaaaataaaaccaaaaagcaacagcaaaaggtgtttggcaggtgggaaagggccttaaaacaccttgtgccctcctgggtccctcccaatgccttcagtgtgggctgtggaaacaacaccgctcaacaccaaagtcaccatcggcagtttaaatgccacaaaagtacacttagaaatgagaagaaagtggggccgggcgcggtgactgacatggatatgtacagccaaccccactgccactagaacagtcttaaatgcccacacaaggagtataaaaagaaaagcacattttgcaatagaataaattctttttttttttttttttttttttttttattgagaccgcggaaagtcacatgaccctgcatgtagccttttaggaaagcaaccgaaatggtaaagccaggagccggggctgcctgcttcctcctgcagcctttcagcccgtcctgtcgcgcgtccacattcttctgggcgcatctgtggagctattaagtgggataatccctctggcctttgatacatttctggacatgattatttcattactcgcagtatatcagtaggatcataataaaaaggacttctgacaacctgccaagagttttgtggccttgtaaacacaaaagtgctctaataaaattttattaagtgttaaaaagtcataaaaagtgaaataacataaactacaaaatttactgtcctcagcaaatcctgaaaatatcttccacagtaaaattaaattagcatgtaatagacagagaagcagtgtggagtggatttaaaagaggatccagggaaaatgacactgtaacccaatcagggtcacggggatttaattcggattttcccccttaaatgtggataaatgtgctgattacagacgagagctccggggttactggagtctcacacattgtcaatacttcggaagaaataatatattgcagattgtaacgagcacggggagccagcgaaaggcagggcgtccactagggcgcgctgagagaccgggaatccccgcaagggcgcccgcgccgcccgccacccgccgccgcgcgcacgccgcgccctcgcccacctccaaataatatttacagttagggtttttttttttttttttttttttttttttgctctcgcccgtgacattttctccaaatcggaagaaaatcaagtgtatgtcgagctttgccgcaggcagcccttggtctccgctttcagattcggggtccgggagcggagcgccctgcccgcggcggtgctaaactctggggccagggtgtggccctcagcgagcgccctgggactggccgccccgccgaaggatgccgaggatcgggcaaggccggcgtccggtctgcgcggggcgcgggtgctctccgaaggccgcgagccacgggcctcgctgcgggttcaagtgcgtccgggtttggacgtcgcggctccaggagtgtgctctctctcctgcccatcccctccccggagttcagcgcatccggggccccggggacccctcttcccggccctcctggccgcgctggcccgcccgcatggggccgaggttcctggccgacgcgcgagggcgcgggcgggtaccgggttcccgtttttcccaggccccgatccccgcccacgcacgaggcccccggcccacgcacgaggcgcccacgcccatcgtggaggctccgcctggaaaagaagtccgacttcctctccaagctgctccgaggggaatggggaatcggcaggaaatgacccgaactgccagcctgcgcctttgcagccggccctcgctttgctgaagacgagcagctcccaccaaagtcttgcctccccttaccccgaaagccccgctcaggtttgtaaagaggggtgcgagatctgaaaagtatttgtcttctagggagagagatgttggtaaggggcccagagaaagacgggtcctttttagctcatcaacgcgccacgtcttgctttgcagctccaaaatgatgccagcgctgctgtccgaagggtcaatattaatgcgttaagtgaaatgggaaataaatggacagtggcacatttcgtggcatcatttttacaaggggatgtcgaaagttttaagctgcatttaagaattagccacatcttgcctgaaagttaatattttttgataaactcgttaataaagcctagaagaggtaagttaaagttagttaccacgtagatcctccagtctcttgtagagacttgcgcaggttactaggatgaggacgagttgtatttttaattttctagactaagtgcaaaggcattgagttttgaggtggcagggttaatgttcaagggcaaatggaaccgccaaggatctcttgaaaagaattcacttactattaatacttaagcctgaaataattataattaatttacagtgggaattatatgcccatgttttagacttttttgttatattagctatatgaaaagggatgttctttagtgattaaaagaaaaaaccacctgtttattgtcatttgcaatttgaaatagccgacagcagtaaggctagctacaaaagctaacaagtcaacttcagtgtggtttgacatttactgtcaaagctttgagctctaagaaaaacagaatttaaaataatgtatataaataataaaatttcattgtgactcaatgtccctgcccctggagaagggacagatgacactcagtgactggcttggaaccattccccctgcagatgcatttgcggatacagtgggccagggctgcctctgagtatgtacagcaagtgcttatggacttacagaaacaaatgttttactatttaggattttctcaatagtttacactaaaagttttgcatgtagaaatgtgggataaatatttctttgaaaggaaaagtttcgaaaggaaactttatacttgtatttttttgtgtgttcacatttctaagttcatctgtctttcaaaaaacagattttcataaatattaaaatattgcaagtattatttttaattcttttgagtgccatgtttgctgtaagtagttttttcttttaagtaagattaatataatcctgtctaaggagtttaatagagagaacaggatttccaagcctataaatgcagtctatataaaatagtgggatcaaagttttttgttaagaaacttgagaatttatacattttaaatgaagatagaagcacgttttaaaagtagtttttccacaccatttccctccccccaaaagaattcagaaactatattccatagtctaaaaatggcataatcagatgtaaaaattattaccataatatatagttttctcaagatggtggatactttttaatatattatgaagagttatattctcagcccactgtgtgtttgagggaatggaaaagacaagatgtttctaaacatattttactactgaaatccataagactattaagctgtgcaggtaattgtgttctaagtggtagaagtatttttccaactgctttttaaactttgaaaaatttatatgtattttaattagcacttttcttttaaaggttccaaa

SEQ ID NO: 1880445 - DNA, 4001 bp, Homo sapiens
tgcccagggcctgaagaaagccacacacaacacaagtgtgtgcacctggggctcattagacctctcagtgggcttttgccttttctttgcttcaccaattcctcctcctggcattcccgacctctcccagaaccctcccacagccctacagggagccaggcagagacagtgatggctggaacagaccctgcacactacatacatggggatccaggccacagcgggtggggctttgctcttggcaggacaaacagtcctggttccgaaaggccccagaggccaggacagagttttaaatagccagtgtcaggccgattgtgaggctcggtttaaattagctgtcagggctccattgaatcaggtttaattgttgattggtgctgaaatgatgaatgagatgtggctttaaataggaagcataagtgtttcaacctcaccctgggctggaactgcaggcatgatctggtgtcctcttattcaaagagttccctggaggaggagaggcaagaggaggagcagaatgagcggcctgggctggcccgggttgctgcacctgtttctgggtggtctagtgttccaggacagatataaggatcacctgatggaggctcagggaaataaggtctcaataattcaatcaagcgatccttcttcaacccatctgtccaccattttccttatcatcctttgaccaaggtgcttattcccatctgtgcctttgcaggggtccccagaccaatcttcctagagttgacagaggaagtggggggacaaggcagagaggaaaagtccaccattcttgggaggtcctgcatttagacctcactctgtccctcatcaactgcatggctttgagaagtcatatgagctctctgagcctcagtttccatatctgtaaactaagacaaagcttgccctacctccctcctgcaaggagctgttgagggatcaagaaggctaaggcagggaaggagctctgaaaactgtgatcgcggcactactgatgactgatcagcgcctcccctgcctggccctgggccaagctggggtgactggagggtgaagtgtgaatgggaagagggagaccccaatgtgccttttgcagcccatgggctcccctcaccgacacccaacaggtcaccgcctactcagtggtggtttttcaccttccccagggttgctggacagttccagtgctctgggccagggccgggttccccacccacccttctcacctgagacctgcctggtgagttcccccagctgcatcttccatctccagcttcctctcaccctcacctggagccaagtagggcagtcagaagagagggcaagagaagccccacagagccagggttgtaaccgccagtcttcttggtagaggaagctggagggctgatttctggatttgcctctcaaagctggaagaatggcagcaggtgggaaccaaggaccagcccctggtgagggaaagctgggtagcttcgagaaggcactgtaagcctccacaatggtgtttctggggctcagggctgcagtggctgctgctagtaacaccctcccgagagggtcagggagtagccctcatacccatgtcagctggctcctgccacccctggctacaccagactcagcagagtcctcttcattaagaaggcaactgtcctaaaatgccacattcctcatgatgtcactcccagagttggtcagcagccccccatggcctgtggggtggcgcccaagcccctgagctcacctgtgacagtcctcatggtcagctccacctgtgggtttcccctctcctcttgtactttcagcggcagaaaggtgcactgagcggacatgggattccacactggagtccaagctcacatgtcttgtttttgttttttgagacagggtctcgctctgtcacaggctcgccttgtcttgtctctgctccctcactagctgtcatctggccccagcctcctcacctgctggcgtgaggaatatttacctgctccagagcagggctatgaggggttgggaggagttgggagatggccccaggacagcagcacgaggtgcacctgaggagctcaggaggggcgtgttcaatttccttcctcaccttgcaggcttggtgggattgttccaggaaagaatctacaggggaaaatgtgcttctgaaaacttttaagaactacacaaattctagcctcaggagcccccttctcctggatttcaagcaaaggggcctgtgcactccaatagggcctcccagctgaggtgtgggccaccttcctccctctcccaacatcctccgattcccgcccatttctctcccaccctccaggtcagtggccttgggttccctgtggacactagcagtcctttccgcacctgcacaccttctctgctctctgtctttgagatgcgtgccatttcgtcttctaccctcaactgtcttttgagttttaccacctccaggataggggatttgaatcacccttgttatattgtaaagggtgggaagactccagctgaccccagggtgcatgcagaggcaaaaaagagacaaaacacttttcttttggttttgttttggtttttggtttttggagacggagtctcactctgtcacccaggctggagtgcagtggcatgatctcggctcactgcaacctccacctcccaggttcaagcaattctcccacctcagcctcccaagtagctgggattacaggcatccaccaccacactcggctactttttttgtatttttagtagagacagggtttcaccatgttggccaggctggtctcaaactcctgacctcaagagatccacctgcctcagcctcccaaagtgctgggattacaggcgtgagccactgcacctggccaactaaacacttgtctatttgtatggtttttttttttctctttagctcaaaaaagtttgttgggggtggggagtgggctacagaggagatgcttttgaagagaaaaacatcacaaccctgaaaattctggtgaaggacagaaggctcaggaaacaggctccccaaaaaggcagccagggtgccagagcacgtgacctgcttttcatagtttctgagcgctctctgcctgcatcgttgtgcgttcctcccagacatgtgaagttggtattattggaatgcctacttgcgttgatgggggaaacgaaagtaggtattataattcccactccatagaaaaggaaccaaggtttggagaggttaaatactattgacgataaaacaacaatagctgccattggctgagagctaattgtgtgcaggctctgggggaagtgcatttgagacatcctctcattgagtccctcagccatctggcaacgtagacaccatcgcccccatctgatggcaactcagagatgttaagaaatgagtccacatttaggaagtggcagggctggttctaggacaggggtggggcagccaagggtcatctggggccatcttctcatctctgaagaacagacatggccaagggcagagctctggctttcttccctttgcctggagttagatttaggacttataggacccatagatgaaagtgagagagaggtaggttttagttcaacccctaaaaacattttagatgagactttccttagaaataaggaatacccaaggaattcaaagtctggatgaatcttctacctggagtgttgtagaagagactcctcctgtgcctgggacagacagggcttggtctcagagctggaagaccatatcctagcgctaccactgacctactcacgtcatgatcttgagccaactacttgacctctctgagccacagtttccacatttgtaaagatgggaaagtaaggcctttccaaaaagaacgttgtgtggattctgaaatatgaaataacagatgcaaaagcactcctggcttggcccagggttggcatctgataaatactggctgaatctgaatctaagccaggtaggggctgggatc

SEQ ID NO: 1880446 - DNA, 4001 bp, Homo sapiens
tgtgcatggtaataatcctgttgtgaggattaaacgaaatgagcaagagaagcccttttgtaaaccacaagttcctacacactttagatgttcaaaaaacaagcaactgttaccacgacagaggccaaagcttggaaggggagggcttggagttagcacttcctcacgcctgctccaggtggctcatcacttgcggatccccttgggtgggcatgggatgtgggtggtgattgaaggatttgcaggcagagagataggagcctttggtggggcacagacaaggcacacagatactcctaggacgtgagacagtgacgggaaaaactgggggagggcagacctggattgtcccagtgcccgttctcctcccacccccgccaggaagcaccaccaagtgtcagtgacctgtgctagccaggggccactcctcggacctcagagcccactgtagtcaagtcagcaggttgctaggctgactctggaacaggtccagccctctggggcatgtgccttcttcacattcctgtgggagtctctgtggcagaagccagaggccacaataggtgagggcgtagaggggtgcagagtgcagggcagggttgaccttggtccaggtcaggcctggagtctcaccaggctgctgcctctcctacagaggggtcaatcaggttgcaataccatcttagtcatcttgggctgccataacaaaatatggtagaccgggtggctttaaacaataggggtttattcctcacagggttctggagactgtgaagtccaagatcatggtgctggccaattcagtttctggtgagggctctgtctggcttgcagttggctgccttcttgttgtgtcctcacatggcaaggcagagagcactctggcttctcttcctcttttcataagggcactaatcccatcatgggggccctaccctcatgacctcatctaaacctaattaccacccaaaggccccaccttcaaataccatcaccttgggggttagggcttcacctaatctccaacatgcattccatagcagacatctaattccatctggacacctgctttggtcctgggctcctgctttgtccctatacttggctgtcccttcaagacatgccctgtggctggtgggcttctgctctagaagtgtcaggcaggggagctgcaccaggctggtgcctctgctgaatgcacagagactgccctggaggagggagggtggcagctgtgagggtgggcagaccctgcagccgcatgtcaagcccaccaggttttattgtgatgataaaaccacatagtgccttctctttcctttttttcatgagattgctacaaagtggattgtcaagaggaggactctggaggggaaggaggtccgagaactggtcagagagagacaggacagagaggcacagagtgagagggaggcagagagtggcatgaggacccagagagagctggggacacaggcatagacacagagaaaggagccagagatagaaaacagagggacaaggtggcagagatacagagacacatggagaggtgaggtctgcaaggcaatgcagagagcacttgaggcaagtgaggcaggacaaggaggacgaggaggacgaggaggatggggcatcggggaaggggaggcaaagggcatggaggcctcctccatctcagaggtcccttcctcaacccaacccatcccaagagaggcagaaacagcagcacccagggcagagctgcccactgggcatccgtgtctccccacactcttacctggctgcctgtctcttccagcccaacacctcatcacctccgagttagaggaccagggcttgagcgaggaggactgtaggaccccgaggtaccagctgacagggtggctgatctcatgggtccagtatggccaggcctacaggctggggatgaggacctctgaagcccctcgtagcccccaggctgcctggacggcagtaaggagtcactcacacttatgtgctgttggcaaggagatgagacgaaagctaagggctgacggggtggtgaagagtgctcagatcaccctcagacattagctatgagtcgccttcccttgggagaatgtgggcttcctgacccaggtggctgtgaaacatgctcaccctgaagcagatcagtggccaggccgttccctgagagcagtccctgcagtgcccagggtccagacctggcgggggcagggaggtggctttcctaggacacaagttctgctggggagccccagactgcaggagcttggttctggacccaggactggacttgaccagaagccaccaggcagggcagaggactagtgtgtgtgcatgtgtgtgtgtgtgtgtgtgtgtgtgcatgtatgtgtgtttgcatgtgtgagtgtatgtgtgtgtgtatgtgtgtgtgtgtgtcagagtatatgtttttgcatgtgaaagagtatgcatgagcgtgtgtatgtgtgtgtgtgtgtgactcagtctagcaccagcactgtgcacacatacactgtgtgtgtttgtgtgtgtgtggtgtttgtaggggtgctggctgtcaggggatcacagcaaataggacaggaaaacccaccagaagccagagggtgaggactgaggagaagcaagtccacctgcaggagtgggtggggccacctcctccctctgcctgcttccccacgtgtcctcaggtgagtgtcggagcgaggcccttggcactggctctgagccatcatggcgagtgaccggagctgctctggcacctcctcaggaagcttccctggagcaggggaagataagagaggctggggctgacaggtcctccgagatcggctgctctgacccttgcagtgtacagagaggggcaggcacttgcccaggtccatctcttgatgccctgttggctacccttccactgcctcatggtgtctctcgtctgacttgcccatgtctttcctgtcttatctcaatggctctcacaacagccctgagatgtggataggtttgttcccattttaccagtaggaaaactggggcccaataggtgatctgcaaaaactcgggccatctgaggcagagctgggctagcactgacaggggtctgggctcccagctcagcgctctctccacctcggctgtgatgaggcggcccatcttcacggcgggtggccctcactaagctcatatccccaggcttccctccccaccccttagccccgggcagaacctccctgttgtggcagagaaggtggtcaactctgagtggagcccccactctctctctcactggaccagttcttcctcatctgagagactcattcctttggcagaagtcttcctttccatgagccactcttaaatctgcccctgcttcctcactgtctgccccaagccaccctgttcctggcacctcagtgtgggtgagtgtgtcagccaccagccttccgtggcaggaggctttgggggagccacagcatggtgacgcacgggctaatgtgcaatgagaatattttagatctgagttatccttccaagactggaacatgtggctgccagaggccagagggcactggttcctgaagaggggaaaggaaagggagaagagtgttgaaagggcggagaagatggcagggtgagggcaagcacaacctggcagaactcgagacatcctaagggctggccttagcaggtcactgccctctgatgcgcaaggtcagtccctcctaggctctggaagcccactcttgccctctcaggaccccccgctcccagcacatttctgaagcaccagtaacacgtttctatttacccgcaatccctctgtgtggtctgttccaccccaccaaagtgggcctgtgcaccaggtgagcccctcgctccgctaggagatgtgtgggaggcaggggcagtcccattacctcatcccctagaccccaggccaggggatcctggaaacagaacggcagggccctgagttcatcaaccac

SEQ ID NO: 1880447 - DNA, 4001 bp, Homo sapiens
agccatggcattagattcgcataaagtgcacgtggcctggatccctggcctgtgcagctcgcagtagggtttgccctcctaggagagttgtataattatttcatcatatattacaatgtaataataatagaaataaagtgcacaataaatgtgctaggttcatcctgaaagcatccttccaccccatcccggtccactgaaaaattatcttccatgaaaacagtccctagtgtcaaaaaggctggggaccactaagttcagtgtttgaaccattgtcccctgttcaccatctgcagaaataagcctcctgaatctgagttgggcgttaggaagaacttgcactgtaggttgcacttaaaaccgtgcagaccgactgtgtaggcaaatccctgtactgagatgagacgaggtagaaaggtggcagatgggagtgaccaagagcacgcggcctggtgcacaaaggtctggctcaagtccttattgggaagctacatgaacctgagaagttctatagacccttctgtgcctcagttctctcttccgagtgtggaagttaactgaaatgtggccatcaaggctggtgcttaagtgatttagggaattaaatctgtgacccccactgtcttctgactactgatctgagcaggctgaactaaggcctgcctgagagtgggcagtgtctaaatgaagtttattgaataacttcaaagtcacacctgatcagaagggcactcgaatttaacaagacacggcgtgtgttcagtcatgagtgaatattctactatagaagaaatgtaagcagaagagctagtaacttgagcaggggggtacctggctctaacgaacaacatgggaggtttcctggtcacctgaaacaattaagacatcaaaaagccaagagcacaaaatcgtgctgcctctgagacaaacattagtattttagacctttaaaaataagcattttagtattacagcagcagaattagaacctgcggtgggggaggcggcggggtggagttaaaggggctgatgaaaatttgaaggagagagttatcatcccagcctggaaaagatgcaccttttccaggagaaaagaaacaaaaggcaataatatgggacctgtaaattacgtgtaaagagacacagtaaaagtcgaacttctgaggtataaatctgagaagtttaaaaaataatagatttcagaatgaaaaattattacctcttgtaatttcattgagaacaaattaatatcttaagaaaagcttattttttaaatcaaaattttagtttggtattagtgtatttttaatattgtagctaattttaataagaccttgtaaataaatcacttaccctagtcaattttgactacaaagtaagattttcataaaccttttataacctctaatgattttttctattttgtaactttttatatccacctgattgtatttatcttttaaaaatgtctttaatttaaaacaatccctcgaaacctcttaactaggctattatgtttcccatcagaaaatctgtttattttcttaaaaaactctggatttaagatgttccgatatctgatttaagattttcacatctctattcagaagactttggcctgtaatccccctttcatggaatgtctcttaccgtatttggtatcaagatctcctgatatgatgaaggcagtattgttgtgtttcttctggatctattctatggaagagtgtgtacaaaactggcctaggaaacagcacattcttataaacagagaaaaatatttaaggcaaaaagcttcataggaccgaaaatacaaattgagtcataaaactataaaacaaatttgtaaatctgtagacaaattggagctggggaagtaaaaagaataaattaagaagacattttaagtacaagtggcccacgtgaagaaactgcagtgagaagatggaaagcggcaaaggccacctcccatctttaccagcagtctcccaggtggcagttgaaacccagtggcagttgggatggagggcaggatatacatcatcacatgacctccgtgacaggtcatcacagaatattcaaatgaacacaggaacacgtgccacactctggggtccaactgccgctctctagaccagtgcactttcacaaggacaaggggccactcagagtccacgcttcatttcaaaatctgaatcccagacccacagtgttattctctgtgtatgaaacaaatgttaaggaaaaaagacttgctttcaaatatatttagtagtgaaaatttcagggtgaaaacagtcaaaactagtatgttcagaataaaatgaggttccttccttgatttgaaacattatccccacccatttttactattcctgagtcatcagaaatttctctattcagaaattttaaatttgttccagattaaagtttaaaatgccttaccataaattcaaattttaaaagtcaatctctaagaatatctcacagtaactgtatgaaatcttctcttatcagctatctatgttatctactgtttttctctatgcaactaagttttcatacttactaatttctgaatttctgagttcattgagagatttctctgtcaatgtgtatatgaaagactggctattcactcggagatgctgaaaaaagcagcattacatgtttaccaatgtgttgtttgaaaatatataaagagtgattttcttttttttattatactttaagttttagggtagaagttttagatacatgtacacaacgtgcagatttgttacctatgtatacatgtgccatgtgggtgtgctgcacccattaactcgtcatttaacattaggtatatctcctaatgctatccctcccaactccccccatcccacaacaggccccggtgtgtgatgttccccttcctgtgtccaagtgttctcattgttcaattcccttggcaacaaaagccaaaattgacaaatgggatctaattaaactaaagagcttctgcacagcaaaagaaactaccataagagtgaacaggcagcctacagaatgggagaacatttttgcaatctactcatctgacaaagggctaatatccagaatctacaatgaactcaaacaaatttacaagaaaaaaacaaacaaccccatcaaaaagtgggcaaaggatatgaacagacacttctcaaaagaagacatttatgcagccaaaagacacatgaaaaaatgctcatcatcactggtcatcagagaaatgcaaatcaaaaccacaatgagataccatcacacagcagttagaatggcgatcattaaaaagtcaggaaacaataggtgctggagaggatgtaaagaatgattttctaaatggagagttctgataacctcaaatggtcccttccttggagggttattttgaagaataagtaaggaagtatacacagcatattgcctgactggtattaagcattacatattctttcaaaaagggtgggcagctggagggatgaggcatggcccccttttcccaggaccttctttgggcacatggatgcctaaccctaagctgcaaaaatatgcagcccaacccccgaaggagaagaaatgtctgcttcctatttctctttgtgcgtgtgttttgcttggccttctcagggcctctccagcaccagagcagccaagctgctggcccaccacgagcccaatgtcctcatgcctcccaagcagacaccagagattgtcaggttcctcaagcagatggtggaaggttctccctcctcctatggacaggtgccttcctgtgctggatcgcatgtgggaatcagcactcccaacagtccctggacaatataaggctcctgagtgtcccctcctggttttgctcaggcagtaacagggagaacagaggctgtcactgcatgggtgtgggaaaaacagtcatttcctccgctgtaaaacagaaatggtacctgcgtttccaatgtctcacaggcagtctgtgcatg

SEQ ID NO: 1880448 - DNA, 4001 bp, Homo sapiens
taaaacccacttcttccaggaaattataaccccaactccaccgtgacctcacccccacgccgcatctgcttagcttgcctgtccccttctgggggccgtgtccacttgtctaagccctttgttgtactgaatcacaccatatgatcccagcaacctggggggatcttcttttttaaaaattactcttcaaacagaacccagccctgactctgttcttgaaaccatgtcaagaacagtgtaactgggaccactactccaagtggtaatttattgccaaatgagtttcacttgttttcatattatagttctactgtttaaaattccaggacaactttcttttgttatttatttaaacaaaatgccttgagtgttttttaaatcccacaatgattcatacaaagccacggaggtatagactgtttgtcccacgaaatttactgggaaaaagttgacatgaatgatgtcacacacttgaccatgtacactgtacccaattatttatccaacaaacatttattgagcacctaatatgttcctgacatgatgttaagcactaagaaaacagaaaaataagactctcgtctggctctattagtctgagtagggaaggcagatatgtgatctattatattatattgcataagatatattaagtactctaataataatagcagaaaatacttaaatagcacatgtcatgaatcaggcattgttctaaatgctttaacttatactgttcactcttcagaataaccttatgatatagattcttttattatccccattttatcagtgaggaagctgagggacagagagactaaatgacctgcccaaggcaaacccctagtaagtggcagagctgggacttcaacccacatggtctagctctagagttcattctcttcaccaccacacagaggagatggcaactaatttgtcctgggaagtaggaaatagtcctagtgaagaaggaatgctaacatgttaaaggaaaggaggagttcccccaagaaaagaagagaaatttccaggtataaggataaacttgaaggcggggagtacctgaggactgctgagaaagctggcgaggctgtcaagctgggggtgtgatagagagtggggagtgagcgggagaagaagccctgcgtagatgaccatgaaggccagggtcccatgtcgggcccatttgaggacagccggctttctcacatcccctggtccaagacctcacctctaattaagagccatgacctcacaaacaccacgttggaatctgggaaagagagatggaaaataatggtcataaaatctgcatgtgtagtttcagttttcagagttccttagcacacattctcttaactatacttcatgttttacagttgaaaaaacagacgaaaaaataaacgttactcaggaaataagtgcagagccaggcctcggacccaggtcttcaggttccttagctaatgtcctttccactgtgaccaacagagtccatctccatcactgtacccccaaaaatctccaagtgtccattctgctagttctgggcccaggagaccatagtcacacagataggaaaggacattgagaacactgagactccagaggaggcaaatgtacccatggtgaaaatgacattggagtgggaaccaggaaactgaaacttcagtctcatcattatcacaaaatcacaatgtgacccacaggccttggtgtcctcacctgtaaaagaagaatgctcaggataatttccaaagggcctgtctcggcctatctttccgcctccgtcaccgtctacatgtagcttaattagtttagtcaactgctgtttttagccatcactgagtgttcagttccactcaaaacagagctgagttgacagaacgtgccatcagagctggaagctcaacatccgggacacagcatcagagatgtctgtattctaaccaagttcctctcttcagtttaagctaacctcgaagggcccagcatttccatgccccactgtggggtctgctttgtagcctgaaatgagatatttgtctccttattaataacctcacactctctgaatgcattttaaaagctcacccggttcagcaacctgtgggcctgtctttgttattgttggttggagtcttgcatacttgacttaaaagttagcaccaaatgcagctttatctgatcaggaaggcatgaaatagaaggaatgggtaaatttcctttgcaaagcagacacccctggatgtgtttttcatgctagagatatgaataaatggcagacgctggttctcaccaggcaaagtgagtgccaatgaggtcacagggagagcagtgagcatgcaaagatgacaacaaggactccatctacctgacccaagggaagggacagaggagacctaggaggtaaccagggcataagtaattatctccagtgacagaaagccagggtttggtgaatggtcaaggtaaagtggaaaggcaggccttgaattcaggtctcctaacccctggtcctgtacccctttcctctgcacatgctgctgccaacacttggatccaaacttgcacttcgtaaaggcagagaatattctgctcattaatgtgagctcagggcttggcatacaaattcaagaaattcttgttgaatttcttgaactctagcttgactaaggagagaggctgatctttattaatttgctgaagtaggaacataaaaaagttaaaacccttacagtgcctgcagtgccatatatgaatctggcccctgtgatctctctgacctcacccccctctacttccctcattgctcacttccctctagccactccggctatcttgttgttccttaaacatgccagacatactcgtgccttggggtctttgcactggctgttccctctccctggaatgacgtttcctggataccctcatggctaatttcctcttttccctcaagtttatgttcaaaccttaccttctgtataaggcctgctccaaacaccctccttgaacatgtaacccacccccgacttcagtattttccttcactcttaggccgctctgttttttctatggcatttttttgctttctgtatgcggtttttattttttatgattgctatttattatctgttcatacctattggaatgcaagttctatgatggcagggattttttaattcattgatgtaccctacaggcctagaatagtgtctgatatgtagtagactctcaataaacgttactgaatgaatggtctgcaaagttacaacataattttatttcatatagaagttttctttctggtctatccaagtgcgaataagctaaactgtgatagaaccaagactgtctttggtgctatggggttgtcagggagcagggactctgttgcctttgtccagggcagaaggaacagctgtggcctgagtcactgatcttttccccctgggcctgggccctttaactctaaataaggctcctgcaaacagaaatagagaggcagatggaaaaaaaaaaaaaaaaagaatcacccaacatggttagatgttcagggcggctctcacatctcaggagcagtaaggaatagcactgagcattctatacacagcaattccagatgctaaggaagggacatgatgtagccccaggtctacaaatgcagcagcgcaggagccaggacggggcctcaggagcagtctgatgcaacagatattcagttcactgggcatggcttcttctagtcctcggccaagtggactctgagcagtgggatagggatgtggggggaggtggtgggggaagagagggttgcccagaagttgtggaatctcagcaaggatgccaagccagaggctggcttcaagcagccagacgtctgaatggagcaagctggagtcttggccattgtggggctgaggccctaggctggccagtgggggcaggacgcagcaggaacaggagctgcagctcaggaaccaggctagcactgtgct

SEQ ID NO: 1880449 - DNA, 4001 bp, Homo sapiens
gggggatgcagaatcaccttagatatattacccacaatgcttttcaggacggcagctaattaccagcagaaaggtcatgcaaaaaataatgtgattagaagaggctgaagggaaaaaatagccacatatttggacatagaccaaattccctttttgccactgtaactgaaaaccattgcttcaatatttaatgaaacgcttatgctgcagcacctggtcacattgtcagcactgcctaaccactgcctcccccgtgggtcattactgcaaccatctgaaagggggcaaactgttcatcgacgacaataatgccagtctttaagaatctacagctacaaaacagcaggagacagagttactttggctttgatcttgggaaaaatggctgggggcaaaatgctgtttcctaccatcagagactatacagttagcaataattctgtaagtcaaagctattcacaggactcaacttggctgccctgctttgctttctctctccccttgcagaaagctagcagctcctggtgagagatccttgtcaacaggaaaacactagttcacgctaccctgctaatgatccaatgcatcaatacctcaaacaatcacaacaagcagatgtcctaagttaatatagacttccctgggattttcctagtgaaacatggctttaaaaggcattagtcttttgtcctcactagagaacggctaaatcctggcaccaattccttgggtatgtgaacctcagcctaatggaatttaattactttagtggtattaatcatctgtacagtagagcaaagagtattttattaccacttttaagggttatcggcacatttatttcaaatgaactgtcaaactgcattacgtgtaaggcatgccagttttgaattctacagctcaggtgaaaacaaatttacagtttaaaactctcctccaccatcaacatcccacccattcatagtagcagcacacatgtaaggctctcaaaattaaaagaaattaagtgttgaattagctattcattttttactctctggttttattccttattccaaccattttgactactcatttgcaaaggttgctttataccaaggaccccaggaacaccaattggcatcaaataggctgtgacaccattacaggcttagttacagaaaagtgaggctagtcttgtccattatcaggcaacaagcaccagctcaataatataagattcctccaattcacaccatgtagcaactgcttttgtttttgttcatattcagggaaaatgaatgtgtgcttttctcttctcttggttgtttttagcccaatctgaattgttctataaagaactctaagaaactcttgcatcatttataaagctctcctcctgtgctaaatagattcaacagtggattgcaagatgccagactcaggttaattctatagacttcactaaactttctgtttgtcataaagcatttctacagaattttgggtagccaagtagaagagttagaatcagaaaaatgcaggacaaagtcctacacacttggtgggaaagctctctagggctctggaatcagattgcctcggttttaatccccctagaattacttatgatcttctcaataaattccttcacctcctcagttccctcatctgtaaaatgggaacagaagtacaggtttatgttaaggttcaaagacaatgatccatatacaaataaaataatcctagcacaatttctgaggtatcatgggctctgttatattgtcattctgattgtaaggagaatacatgatatttgaaaagccatataacccaccttctcatatggttcagtgtcggcgttgaacagattccatataaattgcagtgacttctaagacatcttcatttgtttcccttccccaacccacccctcctccactgaagtccttaaagtccccgacctgttccacatccacctgtttaaggcattttccactcatctcatttcagagacattctgcagtgagaagcaaatgagagcaatttgtgacatgagataccgcatgtgcaaaagacacataattagtgtcaaaatggatgcatttgctttttaaagtctatttgtcctgtgatttcaaatgaatcaagctgctatatctctctcaacagcttcatactactccataatgaattaaatggctcctgtgaaaaaacagtgtaagctttatgaataaaatgctttttcaaatgttgggataagaaggacttaaaaagactcttatgtctagtaccccttagtttaaagatcttctccaaactcagaatctttgaaagaaaagcattctccaagaaagaaaaaaaacaaacaaacaaaaaaaaaaacactttttttcatctttccaaacgttataattaccagtgaggggtagaaaaaaatctacagtattcagcaaaggcagaataggaccctgaatttccctacccctgcttagtactctgatgtcctaaacatgcaatcaaggccccaaattcttttcaaagacatttcataagagaggaaagaaagttccattcgaagctctaaatgcttagatgctactattcatgtgctctatttctctctctttcttttgtgaatacctttgtttggtatttaaataatataccctctgagtccattctcttaactctactttcaaataagcttggttcctctaagcttcccaaaccttggtctttactaatcttttttggaaaaaataaacaaaaaatgtttgcacctgaataacagtagtctctggaaaaggcagaaaatcacttaaatgtttggaagaccaaaactacaagtgattaaagtagagaatattaatgaatagcttaattcagattatttacaaagtccaatttctagtaatgagtaatttcaatttcttgaaatatgaatatttcaagaggaagttaaaattagtgctaggtttatgggactaatcttttcctatttgagtatgtaaaaaataaataaagataaagaaagtcccagattccatgcagtgttccatgagagtcacgtttttttcctcattgtcacttgtattataaaaaataatatcattgtgaatcctgaaaaatagactcatagtgaaaggcctagaattgaatcctcgttccttttcattctttcaactataaactctgtttcttcatttctgaaatgaagataatgttaatcattttaagaagcacatgaggataaatgagataaaatttatatgccaagttaaagtacataaatccaacattttataaaatgacaagtatattaaaagaaaaagaaaataatttcatttcttttcttagaggaagccccagacttcacaatagtgagctcagccattatttctaggtaataggcacaaagtttccttggtagtgaaaaaggcttttatataatctacatgttccagcctggaattcctttctggtaatatgtatgttctctttctatactgagaaaacacataatgcaatttattttgttaattaggaaaaaaggatgagagaccttattttacacttttgtgtcaccataaatgcacataaacttacaataaatgttacatgttgattgggaccaaggcccagggtaaatacacaacctggaaaagaataagaccactagcctagaagttctgcttccatcactgatgttcccattcagatcttttaaatctgcaacgcttttctgaccaatccagataactagttttaagtgtatcgttccaaacttcagctaatacattaagttgctaattattttattataaatatcagtcgcccaatgtcctttattgtgatgttttgaaaaaaaaaagtgacttcctgcttattaaaacttatttgggagaaataaattatctttctgtgaattaatccccaatttactcctttttccacattcctctgatattttcattctctgcttgacatgtcttaaggtgcactgactgaaattagactcg

SEQ ID NO: 1880450 - DNA, 4001 bp, Homo sapiens
agaaatgaaatcatgtgaaaagcttgtatgtgaacgctcagagcagcattatttagaacagccaaaacgtggaaacgacctaaatcccataaactgcagaagagatagataaaatacggtgtaggtaagtaacagaatagaagtcaaacataaaaagtaacaagctactgatacataccatgaacataaatgaaccttgcaaactttgatagaagccagtcacataagacccagtgttgtgtgacttcatttatatgaatggtctagaataggcaaatccatagactgaaagtgattacggatttcctagggcggggcagatcagggaaatgggcagtggctgctgatgggtacgtagtttcttctggagtgatgaatgttctaaaacgatggtgatggatacacaactctgtgaatatatacaaaccccttgcatggtacacttgaaatagatgggctggatagcatgtaaattatatctcaataaaactgtataaaaataaagagaagcgcccggaagtgctgccttggagtcggtgagaaggcggccacggccaggcctggtgcctgaagaggagtcggagtcggcggctgtagaggctgtgcgccacatacatctgcagaacttctcacgctctctgcttgagaccctcaatgggcagaagctgggtgggcacttctgcgacgtgactgtgtgcattcatgaagcttcgctgcgtgcgcaccgctgcgggctggcaatcggctcgccctccttccaagacaagctgctgctcggcccctctgagatccgtgtgccttcggtggtgcctgtgcagacggtgcgacagctagtcgagctcctgtacagcggttcgctcgttgtggcacagagtgaagccccgcaggtactcatggctgcgtcggtgcttcgcatagacagttatcgacgaatgcacgcagattatcgcacgcgctcctctgcacccgcgagcacctctgcacccgcgcccctgcccacccctgtgcccccgccactcgcacctgagcagctgcgtcaccgcctgcgccacctgctggctgcgcacccccggggcaccccggtgccgcgcacagcggtaagcagcgccggcccgcgagtttgcagctgcctgcgcccccgacacctgccaaagccgaggggcttggtgcctacccctcactgtccgcggcccctgacgaccgaggtgacaacgatgacgaggaaactgacgatgagaccgatggcgaggacggcgaaggtggcggcccgggagagagccaagcacctccttccttcccagactgtgctgccggcttcctcactgctgctgctgacagcgcgtgcgaggagttccatgcacccactggcctctctgactacagtggtgtgggagagattttcttccgggatctggggcagctgaggacgtatttccagacagctatgtaaccgcttggcacgacaaggatggcgctgtccccgaaggctgtcccaccgagacccctgtccagcccgactgcatactggctggaccccgcccgcctggcgtgaagaccccagggccgcctgtcgcactcttcccctttcacttgggtgctcccgaaccacccgcaccacccccttcagcaccatccgtgccagcccctgcgcccccacccgccttctaccccacactccagcccgaggcagcccccggcactcagctgcgggaggccccggctccctctgctgctcccaccacggccccctcaggcaccactgctcgcactcctggtgccgagccacttgcctatgcgtgcggccactgttgcaagacgttcagctcaaggaaaaacgacaccaagcacatgttcatccactcgggggagaagccgcaccagtgcgccgtgtgatggcgatccttctcgctgcgctactgccgtttcaagcacatggtcacgcacacctgcgcgcacgccttccagtgcgcggtctacgccaagcccttcccgcagaagagttcgctcaatatgcacatgcgcactcagcggccagagcgcgcgcccttcccccgtctaccgcaaggtctcctctcactgggcgctgctggagcaccacctggctgcgcaccccgcgccctgatggggctggggcctggtctcgcccactgtggatccgcaacctcccgcacaggcggccacgcctgctttcccaccagtaggccacgctccctcctgagcgcaagtcctctttctcccttcacccctttctccatacgcccaagtccgccttactcctctcctccatgtacttgaaccttccaggtggtgctgggctggggctgggcctgggactggttagggatcggaccacctctgagaactagaccatttccggcctaaaccaggcgctcaggcccttggacccggcccaagatttgactccggttctcgccccgccctcttctggggttggggtggggactgaggccgctctcctgctccagtgtcgggctgggcaaggtccctggctccctacccaagccatcactccctcatggggctcctaaggaggctcaagtggacccatcatatatgggggctggtcctcgggaccctcactctaataaaggagtgtaggccatggtgcctaaacaataaataaataaatagaagctccagttcacagcccccatggggcctaaacaaacaaacaaacaaacaaataaataaataaaagctctagttcatagtccccttgtgttaggtgtagtcctatgaccagcttttgccaaagggaggcaatggactaaggtgagccacttccagagctggcccacaaaagcctccaatgcctttctcacactctccccttctaccgatagatgcaggtgggaggaggtcccagagatgacggaggcacctgatggaaagattctgggttcctgcatgcccacgcagaggaaagcagcctctaccctgaacgcccagccagcaacttctggtgggcccaaaatataatgtgaagtcagtgaaatctgggggagtcatctgatatttcagcacatgtaactaatgtatctgcttaaaaacttggccggggccgggcgcggtgtctcacgcctgtaatcgcagcaatttgagaggccaaagcaggcggatcacttgaggtcaggagttcaagacaagcttggccaacatggtgaaaccccatctctactaaaaatacaaaaaattagccaggtggggtggtgggtgcccgtattccaagctactcaggaggctgaggcaggagaattgcttaagcccaggaggcggaggttgcagtgaccctcgatcgtgccactgcactccagcctgggcaacagagtgagactccatctcaaaagaaaaaaagaaaaacacttgaccgggggcagtggcccacgcctgtaattccagcacttcgggaggctgagaatggtggatcacctgaggtcaggagttcgaggccagcctggtcaacatggcgaaccccatctctactgaaaatacaaaaattagctgggtgtggtggtgtgcgcctctaatcccagctactcaggaggctgagacaggaaaatcacttgaaccttggaggtggaggttgcggtgagctgagatcgcaccactgcactccagcctgggcaacaagaatgaaactccatctcaaaaataaataaaataagtaaaaatttaaccacactgttagctaagtattttttagacatttaaacccatttaaacccagccattttgtctcagaaaattttgttcctatgcaatgtttgattttgtgctaaataaaacatttaaatcagaattataccaatctttaaatctttttgctaacacagtattttccagggcattttttttttctatttttttttaaagcagctgaaacaggcacttgtttatttccccagaaggaggcagaatggggtccttggggagtctctgtcccagcctggtgccccggacaggcagatctcacttccaga

SEQ ID NO: 1880451 - DNA, 4001 bp, Homo sapiens
agaaatgaaatcatgtgaaaagcttgtatgtgaacgctcagagcagcattatttagaacagccaaaacgtggaaacgacctaaatcccataaactgcagaagagatagataaaatacggtgtaggtaagtaacagaatagaagtcaaacataaaaagtaacaagctactgatacataccatgaacataaatgaaccttgcaaactttgatagaagccagtcacataagacccagtgttgtgtgacttcatttatatgaatggtctagaataggcaaatccatagactgaaagtgattacggatttcctagggcggggcagatcagggaaatgggcagtggctgctgatgggtagtagtttcttctggagtgatgaatgttctaaaacgatggtgatggatacacaactctgtgaatatatacaaaccccttgcatggtacacttgaaatagatgggctggatagcatgtaaattatatctcaataaaactgtataaaaataaagagaagcgcccggaagtgctgccttggagtcggtgagaaggcggccacggccaggcctggtgcctgaagaggagtcggagtcggcggctgtagaggctgtgcgccacatacatctgcagaacttctcacgctctctgcttgagaccctcaatgggcagaagctgggtgggcacttctgcgacgtgactgtgtgcattcatgaagcttcgctgcgtgcgcaccgctgcgggctggcaatcggctcgccctccttccaagacaagctgctgctcggcccctctgagatccgtgtgccttcggtggtgcctgtgcagacggtgcgacagctagtcgagctcctgtacagcggttcgctcgttgtggcacagagtgaagccccgcaggtactcatggctgcgtcggtgcttcgcatagacagttatcgacgaatgcacgcagattatcgcacgcgctcctctgcacccgcgagcacctctgcacccgcgcccctgcccacccctgtgcccccgccactcgcacctgagcagctgcgtcaccgcctgcgccacctgctggctgcgcacccccggggcaccccggtgccgcgcacagcggtaagcagcgccggcccgcgagtttgcagctgcctgcgcccccgacacctgccaaagccgaggggcttggtgcctacccctcactgtccgcggcccctgacgaccgaggtgacaacgatgacgaggaaactgacgatgagaccgatggcgaggacggcgaaggtggcggcccgggagagagccaagcacctccttccttcccagactgtgctgccggcttcctcactgctgctgctgacagcgcgtgcgaggagttccatgcacccactggcctctctgactacagtggtgtgggagagattttcttccgggatctggggcagctgaggacgtatttccagacagctatgtaaccgcttggcacgacaaggatggcgctgtccccgaaggctgtcccaccgagacccctgtccagcccgactgcatactggctggaccccgcccgcctggcgtgaagaccccagggccgcctgtcgcactcttcccctttcacttgggtgctcccgaaccacccgcaccacccccttcagcaccatccgtgccagcccctgcgcccccacccgccttctaccccacactccagcccgaggcagcccccggcactcagctgcgggaggccccggctccctctgctgctcccaccacggccccctcaggcaccactgctcgcactcctggtgccgagccacttgcctatgcgtgcggccactgttgcaagacgttcagctcaaggaaaaacgacaccaagcacatgttcatccactcgggggagaagccgcaccagtgcgccgtgtgatggcgatccttctcgctgcgctactgccgtttcaagcacatggtcacgcacacctgcgcgcacgccttccagtgcgcggtctacgccaagcccttcccgcagaagagttcgctcaatatgcacatgcgcactcagcggccagagcgcgcgcccttcccccgtctaccgcaaggtctcctctcactgggcgctgctggagcaccacctggctgcgcaccccgcgccctgatggggctggggcctggtctcgcccactgtggatccgcaacctcccgcacaggcggccacgcctgctttcccaccagtaggccacgctccctcctgagcgcaagtcctctttctcccttcacccctttctccatacgcccaagtccgccttactcctctcctccatgtacttgaaccttccaggtggtgctgggctggggctgggcctgggactggttagggatcggaccacctctgagaactagaccatttccggcctaaaccaggcgctcaggcccttggacccggcccaagatttgactccggttctcgccccgccctcttctggggttggggtggggactgaggccgctctcctgctccagtgtcgggctgggcaaggtccctggctccctacccaagccatcactccctcatggggctcctaaggaggctcaagtggacccatcatatatgggggctggtcctcgggaccctcactctaataaaggagtgtaggccatggtgcctaaacaataaataaataaatagaagctccagttcacagcccccatggggcctaaacaaacaaacaaacaaacaaataaataaaagctctagttcatagtccccttatgttaggtgtagtcctatgaccagcttttgccaaagggaggcaatggactaaggtgagccacttccagagctggcccacaaaagcctccaatgcctttctcacactctccccttctaccgatagatgcaggtgggaggaggtcccagagatgacggaggcacctgatggaaagattctgggttcctgcatgcccacgcagaggaaagcagcctctaccctgaacgcccagccagcaacttctggtgggcccaaaatataatgtgaagtcagtgaaatctgggggagtcatctgatatttcagcacatgtaactaatgtatctgcttaaaaacttggccggggccgggcgcggtgtctcacgcctgtaatcgcagcaatttgagaggccaaagcaggcggatcacttgaggtcaggagttcaagacaagcttggccaacatggtgaaaccccatctctactaaaaatacaaaaaattagccaggtggggtggtgggtgcccgtattccaagctactcaggaggctgaggcaggagaattgcttaagcccaggaggcggaggttgcagtgaccctcgatcgtgccactgcactccagcctgggcaacagagtgagactccatctcaaaagaaaaaaagaaaaacacttgaccgggggcagtggcccacgcctgtaattccagcacttcgggaggctgagaatggtggatcacctgaggtcaggagttcgaggccagcctggtcaacatggcgaaccccatctctactgaaaatacaaaaattagctgggtgtggtggtgtacgcctctaatcccagctactcaggaggctgagacaggaaaatcacttgaaccttggaggtggaggttgcggtgagctgagatcgcaccactgcactccagcctgggcaacaagaatgaaactccatctcaaaaataaataaaataagtaaaaatttaaccacactgttagctaagtattttttagacatttaaacccatttaaacccagccattttgtctcagaaaattttgttcctatgcaatgtttgattttgtgctaaataaaacatttaaatcagaattataccaatctttaaatctttttgctaacacagtattttccagggcattttttttttctatttttttttaaagcagctgaaacaggcacttgtttatttccccagaaggaggcagaatggggtccttggggagtctctgtcccagcctggtgccccggacaggcagatctcacttccagaagagc

SEQ ID NO: 1880452 - DNA, 4001 bp, Homo sapiens
tccaaacttcagctggggcctgggaggaccggaatctggacgggttttcacaaacggagatgaggccgagagcagccaactgcgaccactcaagagagggccttctgtacgctcagcaccgtcctaaagaccttgcgtatattaactcttaaacctatagccactctacaaggggtgcactattgtaactcccattttacaaaccgcaaaactgaggtacacagcggctgagtaccttgcttgccaaggtcaccaactagaaagtggcaaggcgggaaaaatgtcttcagagagttcggactccgagctttcaaccaccaagccactaactttgaccctgttggcccactgatggtttaactggctaatgggggcatcttggagaaaaagctaattcccataactatggggatgtgaaatggcttttctggcctttttgggaaagtagctatcagattcaataaaaagggctgccttccatcctgcttagcccggccctgcccgcctccctgggaaaggggacttcgaagatctcaaagaagctggaaaggaaaccagcgctaaggaaccagatcgcttcgagggtgcaagcatgtgcaggcgcgagtgtgtgccaaggggctccctggcctccgacttgcatccagggaagagctccctcgagtctcacgcttctccaagactcaaatcctggacgggagcgtgggaaggagcaggttggccaggcctcggatgaaaccactaagctctctccccttctccgctcccagagcagccgacctcatcttcagaagccagatcgggtcggccaagttgtgtggtcgccgctcgcgttttagaggggacaactcgttgggggagaagggggcgtgcgagtgcaggatgtgcgagggacccattgtatttgggtcgcaagcagcccacccgtcttgagtacgatattctcattccgcaggcgcgccctgggcgtgggagaaggtgggcccggaggcatcgcatccccgacccctgatggaagtgcggagggcatccttatacagtccagattccgagtccgttgtagttaggctaacctctgacgctgcatcgggagataggtcaccccgtccgtcccggtcgcagtgcggttcccgtgaggaagacgggcagagaggccgggcgcgaactgattaggggctcccccacggccggcggcctggagagtggagactgtgtccgacgggaggtgggtgggggagaggagtaggccgagctccggcggccactccgcagtgcgctctcgcgagccggggccgcgaggcctccaacgcggttccgcacccctaatgccccagggcggtgagcaccccgcggttccccgcccgcctcttcctccttccccgcccgcgcgcccgggagaggcgatccccgcgtccgcagtgccggggcaggacgcgccctgcgccctgggccaggaggaggcaggtggccctcctcggcaggaggtgagccgccagggagggatgggggtcacccaagcccctgcaagcgcgaccctgcccagagcaaagcacgccccgcgcctggtgaggaactttttctttccaaaggtggcaggaacaagtctgtactgacttttctcccgccttcgggatcctctctcgtatgatttgtggtttgtgggaccacaacaaccaggcttcctcgaccgcgccttttttccagtagctcctggtctgccaggcttgcgagagggcgcgctggcttggcggggctccgggcgagaaatcaccagcagcgctggggctttcggccccccacagcccagcccgggcctcctgggtggcctggggagaagggggcgggacagcacagcttcttcccctcgggtgggcatgacgggtcgccttgggtgtcctgccgagctcagctttgagggtatgcgcggcgcgggtgtttttcccaggtccactctgcaaaagttgtggcctgaggaaaacttccaggtcgccagcaggaacgtcacaggagagccccggtcgctcgtcaggcgggcggccctggagcgtgcgcgccacccaacgccgcgctgggcggccgcccggccccgccccaggtcacagccctgccctcggccccaccgcggcgggcgggggacacgcggcgggccgggcgctgtcggtcccacgccccaccggggatctcgcttgggtccgctgtgtgcgcgggcgggtgcgtgtgcggcgagggtgcagggtgtgcaagtaaatacaggggagagttacactctttgccgtctcaaagtccggcgcctggaagccgaaggcagatttttccagagataacaaagacactttgtcactttgggcgctgcgtcggtgcaaatctttaattgcaagtgtgtgtgtgtgtgtgtgtgtgtatgttggggggggcgggaagagtgtctcgagcaacccaagcgcgggtctccaggcggcaaggccccctttgatcaggaaaatccaattatttgtgtatatacatttcccacatagtgattacttcattaattgtcccgcctttatctcctcccttcccatcccccctaataatcagttcttttatccagaccaacaaacacaccataggagctttgtggattcaaaggatttgctttcgcttctgaaagagccgctattctttgatgattgggtagcggcaaacttcaaagccataaatcttccctctgactggctggcggcccagcaaagtccttatcaaattcttggaggtgatcctgaagcgctcagaccgcgcgcggggcgagcgagcggggcgcggcgaggggcaagggcggggagggccccggcgctcagagcaggcgccagggaggcaggctgggcggcccttcgtcctcgccttcgggtgtccatgcctcggcggcggcgtcccgctccgcagccaggggcctgcaagccgtagccatggccgcggtggccgtcctccggaacgactcgctgcaggcctttctccaggtcagggccgagcccggagggggcgggagaaaggtggaaagggccgtgtccggatctctcctggtactccgtgcaccttgaacctcaaagggaaccccgccgatgggtgcagctggagccaggcctaggggtgcccacgccaacttcacacctaatccggtgtggcctttgctggagggacgcgtggatccgggattgttcggaggtgcccggctggccgagaacaggaccggagctcaccctgctgggccctcctgctgatttcagcctggggcgggccagggaggagcgcgaaggcagtgaggacaagagagcttaaaagatgggagggagagcggccggccggcggggttgtgggtgtttcccgactcttactgaccacggagccgggaggggcccgtcggatgcctccccctcccacttcgcgcctgcttcctctaaggctggatggcgtctcagtgcaccaagtagtttagcaagaagcgctcgcgggccccacgttcaggtagcgcaggcaccaaaagtttccctcggccggtgggtgcgtgcgtggggtgcggtggcgggggagggacggccgggacggaggaggggcggcggtataatagcgggcgtgggggcggcgggctggcccggagtccgcgcttggagctaaccttttgtctcttctccgccctccctcgccgcctatgcaggaccgcacccccagcgcctccccggacctgggcaagcactcgcccctggcattgctggccgccacctgtagccgcatcggccagccgggcgcggcggcgcccccggacttcctgcaggtgccctacgaccccgcgctgggctcaccctccaggctcttccacccgtggaccgccgacatgccggcgcactcgccaggcgcactgccgcccccgcatcccagcttggggctgacgccgcagaagacgcacctgcagccgtccttcggggctgcgcacgagcttccccttacaccccccgccgacccctcgt

SEQ ID NO: 1880453 - DNA, 4001 bp, Homo sapiens
gacgccgcagtcccacatggccctgctctgctccactgatgctcagtagggtccttttgaggtgtttatcatctgttttgcttaatttcctgagactgtgacacgtagacagattctagcctcaaggaagagcacctgccttcccttcacagcagcgggaacaggttacctgggagacaatgaggaccatgcacgcaactcttcaaatccagcctgaggttccacagggagtggggtaactcaccaaagattttagccaaaccttcatcaggattttttgaatttgaggaaaattcaggccaggtgccgtggctcacgtctttaatcccagcactcggggaggctgaggtgggaggatcacttgaggtcaggagttcgaggccagcctgggaaacatagggagacccccgactctacaaaaaataaaaattaattacctgggcgtggtggtgtgcacctgtggtcccagctactcaggaagctgaggcaggaggatccattgaggtcaggagttcatgaccagcctggccaacatgatgaaatcccatctctactaaaaattatattttagtaattactaatttactagtaacttactaatttagtaatttattagtttagtaaattagccaggcgtggtggcacacgcctgtaatcccagcaacttgggaggctgaggcaggataatcacttgaacctgggaagcagatgttgcagtgagccaagatagcgccactgcactccagcctgggtgagagagcgacactccatctcaaaaaattaaaaaattaaaaattaaataaaattagatagtgatgcttcacaactctatgagtatactaaaaaccactgaattatatactttgtaaagggtaaatttggccagacatagtggttcatgcctgtaattccagcactttgggaggccaaggtaggaggatcacttgagcccaggagtttgagaccagcctgggcaacatagtgagatccctatttctacagaaatttaaaaaattagctgggtgtggtggtacatgcctgtggtcccagctacctggaaggctgaagggaggatccttgggcctggaatgttgaggctgcaattagctgtgattatgccaccgcactccagctctgggtgacagagggagaacctatctcaaaaataataacaataaatagaaaaataaaataaagggtgaattttattatatattatatcctataaagttattactaattttttttttttgagacaggatcccactctgttgcccaagcttgagtgcagtggtgtgatcacggcttactgcagcctcgactttttgggctcaagtgatcatcccacctcagcctccctagtagctgggaccacacgcacgcatcaccatgcatggctaattttaaaattttttatacagacaggctctcatgatgttgcctaggcctgtcacaaactcctgagctcaaggaatcctcctgccttggcctcctaaagtgctggagttacaagagtgagccactgtacccggcctaaccctgttattttttaaatagtgcatatatatagataaaatcaggagggttagttagcatatggtggttctttatactaatctttctacttttgcatatgtttggaaatgcttacagtgaaaagttaaaatacgcatgtatgccaccctcctatagagctctgaattttgagaaagcttcaaagttaggaaaatgttttcagttactcccttcccccaagtaataaaccctgaatggcagatttggggaggtatagaaggtagagtaggtaaagcatctgtgttccccacactgtgggagggaacgccctcctctgccccacttaggcttgaagtgaggcccatgtttctctccagctgccacagcaatataccttggatccagcagagaacaaagaagagggccatggctctgctcatctttgccttagtccataaaccatcatggagaagccagtcttctgatggcccttcagattcagcagctgtggactccagggtaccacggaacctaacggtctatgaagtcatacacggaagtgaggtggagcctgctcaaccatgagaaggggaagggcctgtgtctgtggacagtgacgggggctatgctggtggccctgaagtgactgcctctctgctcacttccctcggctccctggtgccttcctccatcctgcatgtcctgagggcaacaggatattaaccaggactctgaagtcacaagtgataaaacttcaactaaattggctgaagcgaattggaagtagctagaatagccagaaaaatcctatgatcaatcaagacatcacagccgggcgcagaggctcacacctgtaatcccagcactttggaaggctgaggcaggcggatcacctgaggtcaggagttccagaccagcctggccaacatggtgaaagcccgtctcactaacaaagtgttgctgcttattatattaggtaaaattataacaccaaaaatagcatagaccaattgatacgcccattttgttactcacgtgtcactatttccctctattacattttataagtattaaactgttttcaaaggaaaaatctattatagtaccttgtactacacttttttctagttttttctccatgttcattttgtaatgggtcccacaaattatgtagccagccctgcccttgagccttcatgttcttacagtgtctgttccatggctgagatggcagatatcttttaggggtaaaaacttgcacaaagagttatatagggccgggcacggtggctcacacctgtaatcccagcaatctgggaggccaaggcaggcagatcacttggggtcaggagttcaagaccagcctgaccaacatggtgaaaccccatctctactaaaaatacaaaaattagccaggtgtggtggcgagtacccatagtcccagctacttgggaagctgaggcaggagaatcacttgcacctgggaggtggaagctgcagtaagccaagatcacaccactacacttcagcctgagcaaccgggcgagactctgtctcaaaaaagaaaaaagaaaataatctgcatagaagtggacccgcacagttcaaccctgtgttgtgtagatgctgactgaatcgtctcccagttctggaggctggaggtctgagatcaagacgtcagcagggctggttctttctgaggctgtgagggaagtctctgttccaggacgtgggctcagatggccatcttctccttgggcttgcaagacatcttccctccatacacacctgagtccacatttcctcttctaagaacacaggatcatatcggattagggcctgccctaatgacttcattttaacttgatttcctctgtaaagaccctatctccaaatacagtcacattctgaggttcggcggggtggctaggacttcaacatatgaagagagggtaccatgtaatctgtaacagcaggtcatggtaaccacagaaatcttatttctctaaaataccttccaaaacaaaaacaaaaactagaataaaaaataacaaagaatatataaaacaacacaaaacccacaccctcaccacaaccacaggacagaaaatgtccaaattccaaatgactggtaaatagaaaaataaatgctaacccgggctccatctcttttgcttctgctgctggcctttgcaaagaggaaacctggaggttgaagagggtctaaaatctccatcctgagtttgcaaatgctgaaagcgtaacctggttgatcagtacaaatacccaggggtggaagtgccctggggacaggagattggtgagactctctcaccaatggactctctctccctctctaaaaaaacaatgatgtttattcaggaacgggcattacaatgggaataagtatggatgtgttccaggaggtaaaggaagacattttttaaagaaaaaatgaaaagggttacataggcttttataagaca

SEQ ID NO: 1880454 - DNA, 4001 bp, Homo sapiens
cactccagcctgagtaacacagcaagaccccatcactaaaagaaaggaatttaagaacaaaaaagcagccatactggaagtataggaaaggggctttgtaggaagaggcaggaaagaagttaactcagtgtccaaagttttgtcctaaagagaacaggaaattccctgggtggttttgcaaccactcggccccaaatgtggtttttgtgatcctgaattaattacctagttaggaaactgtgtagcccacacctgatggaaagctgccaacctaacactttttgttctaagacctagctggtgagaagtgagggacttggtaaaataaatgtggtgataaccacagaaaaataataatgaaactggcccaacaaagcccagctcattggaaatggccagcacttctttttttctccatttaaaatgaaataaaagcagctacattagacattttatactagcaggtactctgtacacaagcatgtcccgtaacatgtccacatgttatctccagaatcctaatctgcaaagtgggtgttctcacagctgttgactgggactcaccccagatttggacgttgtttcaaacagatgtttccactggttctgtatctgaaatcttgttactaacctaataggagtgcctagggaagtggctgtttcacagtttggtgagatgtttggggtcatctcaccaaagaacaaaccagaccacagttgcccaggtatgtcaaggggtcagtgtagggtaggtgctaaaagtgaaactggtccctctgaggtcacctgctcttggctgtgagtcctagggtccaggacttgggtgcccccacagctctgcactcatgattctgtggctctctgtccatctggccacagttcagaagccaggctttctccacccttacgcttttgtcaatttggtttaatacataaagatggtttagttcttgcttgtcttttaaacaccttcacagatatcatttgcaccttgccaaaggtgagagatgaataaagcaagaatattatcttcgtttaacaaggaaacccaagtaccaaagagatgatgtgatttgcctaagaccacatgatttctctggggcaggacctgaactccagcccagcattcctgatccttaccctggactctggctccctgggccatgaggggagtacagtagtgggaaatgcaggatacactccagggactcgaatccctgagtggcaggcctagttctttccccagcgggtccggggccttcgagcttcaggcccaagctttttgtggcaacctgtatgaacgcggagggagaagtgccctagaccagactccagatcgttcctagtggggctgtcagcggctttagcctcactgggcgctagatgggagtgtcccctccgtacccggacgaaggcggggcgcccgctggcaaagcgcattttccagcgcaagctgttggggtgcggggctggcgagtgagggaaaacagagggtggcgcgcccaccatcagcgtctgtgcagccccacctgcgccgcgggttggtctcagccggatcctgcagccctcatcgagcaaaggctgggcgcggcgcccccactgccggggagggaagaggctgggaggacgcaacaggcccaggctgtgccgggcggggagcctcggcaggcagctgcacccccagccccagagggctggggaaggccggcccgaccagcagacggaaaggtggcgctaagtcgccttcaagcccgcacggctctcccggcctttcctcctgtcctcagagtcagctcccccgcccgggacgtcccgcgccactccgcgcctttggccctggctcaaggtcttgtgatgtgattagcaaagccagcgccttgtcctcagacactcagccctgcccggcaggccccggcgctcaagccctgtttactgagcctgggcggggagggggcggagaaacgagcccgggctccaccggcaagactgccgcggcggccgcccgcgtggccacccccacccccaccgcgactccacgtgcagtcgggctggagccgccaccgactggacgcaggccccgagcccccgcctcctggccggggcaccctttgcaaacccgccgggccgcggggatggttgcgatattctggcattttgcaattcccgcgcccagtacaaaaccgaaggtgggagcttaaagctccacaggtccgcctcggagaacagggcagggaaagacacgtccagggctgcagaatcccggccacgctaaacgtaccggggctctccgaccgcgcagccccggaggagaacagccgtgccttcccgccgccacccggcggcatccactggggccgagagctacacgccacaccggccgcccgggccgccggccccgcccggaggcctccagcaccctcccccggaggaaaaaaattggcggcggccaatgggaggccgggaaggcgcctgacgtccgcgagcgggcgggcggcgttgcctggagaccccggcgggggccgagttctgtcccctcccccggcgcgcccgccccgccgcagccgcactcccgggctctatatagggcgcgcgctcggaggccgccgagttccagcagtccgcgagctgccgtcggctccgcggggggggcgggccgggcaccccggggcgcggaggagcgctcctcgcttctctccttcccccctgccgcactccgccggaccctcccgccggcccgcgccgctgcactcgccctctcctctcgccccccggcaaactttcggcccctccccgcccctcgcccgttattcgtcgtggctcaagcccggccacgccgccccaagggctcctcccgacctcccggcctgccgctccggccactgcgggatccagaaacatgtcgaccacacttctgtccgccttctacgatgtcgacttcttgtgcaaggtaggccagggagcgggcccggccggcagcagccgttgtagttcttggactttgcctctgtccccaggttctgggggacgcccctcccgccctgcctttcaggtcgggaaagtcccggggtttgcaaaagagtgtccgagcgccctggaggcggggagggcggcaaggagggcgccggtgtcgcggttgagtttctccactgccgaccgcggccacgctgcccggggcttcccggacaggcttcgcgccgcccacctcggcagccggggcggaggatcacgtgtcgaaacccagcgcggcccacggtgggcgtcctcccctctcccgctccgtccagcaagatcttgctggttttgcgcgtgtataggtggagggtggaggccgagtcgggatccgccaagagtgggggaaaaaaaggaaaagaatcaggctgggagttcctctgcggctcgccccgagtctgtcttccccttccgtttttcatcccttccccgctcccctccctttggcagacagagaaatccctggccaacctcaacctgaacaacatgctggacaagaaggcggtggggacgcctgtggccgccgcccccagctcgggcttcgcgccgggattcctccgacggcactcggccagcaacctgcatgcactcgcccaccccgcgcccagccccggcagctgctcgcccaagttcccgggcgccgctaacggcagcagctgcggcagcgcggcggccggcggtccgacctcctacggcacccttaaggagccgtcggggggcggcggcacagccctgctcaacaaggagaacaaattccgggaccgctcgtttagcgagaacggcgatcgcagccagcacctcctgcacctgcagcagcagcagaaggggggcggcggctcccagatcaactccacgcgctacaagaccgagctgtgccggcccttcgaggagagcggcacgtgcaagtacggcgaaaagtgccagttcgcgcatggcttccacgagctgcgcagcctgactcgccatccgaagtacaagaccgagctgtgccg

SEQ ID NO: 1880455 - DNA, 4001 bp, Homo sapiens
gaggacctacacatctaaggtgtaaactcaagtgctgaggggtcaccttgtcccacctggtactcagaggggccaaaagggtcacagttcagagagaaaagaatgagggagacgtgcagagagaagcaggagtgagcttggcaccagcccacagctgctctgctctgctctagggcctccccggatggcggcattcctagccctgggcccccatctcttgagaccacatctggtcacttccagggccacatctcaggtccaggagcctctggtgtccgcttctatgcttttagtttgccatttgggtggtccaattgcctgtcaagtagaatcccttgtgaagcattccagtctcctttgggctgagaaaagtaacttaaaaattttttttctgcaccctgccagggatagcccaggcctcagcaaagggcagggcagcatagcgagaaaagcaagtgccccaggttgagaaaagaatggcagagacaggaagcagcaaatgccctgggtcagggagtgagggaccacctgatcgagctccaacgtcagcagttctcatagcgctgcccagaccccagcagcaggacatcctgtgccccaccccaggctactggatcagaggctagagatgggacccagcaacctgcagtgaacaagtccctcagacgattctgatgtggccagaagtgtgacaagcgctactcagatggttctcaactctggctgtacgagaggataaccccaggaagcctgcatcccaccttcacaccgaaaaagaccaggccagtcagtactttttaagctcctacgtgattctaatgtgctgctcgccagggtggagggctgtaccacccacgttctccattgctatgtctttggctcctgcagagagaaaaagcaagtaagtgagaacctttcaaggtggactcacagaggacagttaataaagacaggggtgtagcaaaggctgccgagctgggtgagaaggggccttacaggacagtggtgcttccaacgtctgatcctcagtgtctaatcagggaaaccggggatctcagactctggttcacactcaccaagctcacaaaagaccgaggtctgcaccagcatcttcgcctattctttcattcattcatttattcattcattttggtaatatgctttcaagcacctgctccaagcccagcattgttctaggctctaaggatttccaagccagtggaggaaagtggcaataataaagatgtaaacaaataaatggcttcattataaccagaaagatgtattgtaagcaatactcaggcaggtcctctgcactggacagttccctccacaaggtagagccattccaatgtcatttcttgctggattcaatctgggcaattggcattatctgttgtcactcattctgcagcatcgcccgtgagtttgtaagccttgatctgacaacactcaggcagtacaactaggggcaccaataatattttggaaatagaactaggatgaaatttattctgattccatctatatgaaaaagggttgctaagtacaaaaacacaaaattatagacactacaatcacatacttaagaaaatcaatcgtataccataaagtgataatgcattgataacagatcatacttacttgttttaggcgtctctattcagaacactctgttagcctgaatccatttccagaatgcacttgacagacttccagctgctttttaaatagatacattccatgctcattcaagcctatctgcttctcaaagctgtgaatgaaaatcaaataaggcagcgtgtgagtcagcacaggctgcgtctaacaaagtaccttagggcgggatggcttagaaacaacaggaatctggaacttatttctcacatttctggaggccggaagtcgagatcaggtgccagcatggggttctggtggggggaccctcttcctggtcgctaatgaccatcttctccctgtgtcctcactggatgaaaaggtgagggagctctctggggtctcttttataagttcactaatcccattcatgaaggcctccccctcatgacctaattacctcccaaagactccaccttctagcagaagaaccttggaggtgaggatttcaacaactgaattttgactcttgggggaaaccgacattcagttcacagcaggtggtaaatggtgtcttacctgaatcatgggttcatgccttgccttccagccactgaatgaggaagagcaagtccatcccctgagcctccaaggaaacagccccaacaccacccatcaaagccctcaggagggggaatgaatggccaaccatcctgaccacactcccaacagccaaagtcaccaagaagacaatgttcagatcactcctgggcctggtctcagagaagtcagccccaggaaatggtggtgaagaatttcaccccccagactttcttacggtcctggctggggactggggaggaagccaccaggctctccaggattctgtggacctagccgttaattctcagggggatctgagagctccatgagcttccctgcccggtgccctggctgctccggctctttaggcagaagaagcctgccaggcccaccctcaccagcccagaggagctgtccaagttttttggctgtcttgggccaactactgctggaactaagcataatattagctggggcttgggagtgtctagttagatggtcgtgtttcgttctcgtgcttgtaaatccacagacccacagatcatctgcatagaaagagcctcggggccactccagtgcaccatctgcatttgtagatgaggaagccactggtggggcttcatccatgttaaatattgagggctgaatatgtatttgaacttcaatggcaaatctttgacagaacagatggaaaaatcgttttccagcacagggtccctgccttctggctgcacctggtgtcctccagctgcacagggccaggccatgctgtgtgacgctggtctcaggggaggcctatcttggagctgtgtctggggtccacgttgactcaggttctcaatccagctttgaaacctttagcaagtaccttaacctccccaaacctgcatttctgctactgtgataagagggctgtgtgagcagcagtgcccatgcacacagcattgatggagcgcctgactctgtcccaaacactttactcacatatcggctgattggatcatcccagcaacccaaagaggcaagtgttatggtgtattaacagtcctactttacaggtaaagagactgaggtattcagacattaaataacttctcaaaggtgataccgtgttatgacgggttgaattttgtcccttcaaaacaggcatgctggagtcctaacccccagtatctcagaatgtgaccttagttggagatggggtctctatggggataatcaagtcaaaataaagttattagcctaggccctaatccaacatgactggtgtccttataaaaaggaaaaatgggggcacagaggcagacatgcagggagggacgatgatgcaaagacacacagggaggagatagctgcatgcctggagtgatgtggtgtccacaagccaggggacgccaggggttgccagcagcaacagaaactatgaagaaataatgaaggatctccccctagagctgtcagagagagcctggccctgccagcaccttgatgtcagacttgtagcctcaagaactgtgagacaatacatttctgtggttctaaaccactgacttggtggtactttgtcatgacgaccctagaaaaccaatacacacaagcagctcgtgttggagctcaggcttcctgtgcagggtggctgcgaggaggggctgccacacatgttcccatgtgatggtagcaatggcagtggtgatggcagtgagctaagaaccctgcaaagatggaataggcaccatccacattcttggaagattaaaatagaccaaaaaagatggcaaaca

SEQ ID NO: 1880456 - DNA, 4001 bp, Homo sapiens
gggattacaggtgtgagccaccccgctctgccttttcttttttttctttttcttttaaaaggaaaacatgcatctaagaaaaaattctaagcagcacaaaagattaagaaatgactaccaggtgtctctccagaatctcagccccatccctagaagctcaagctctcgtcccatctcactctccggttttaaaaatgagatcaagtcgccctgtccgcggttcttcctgcctgcccgcctcgccggcctggctctggctcctagcggcgggtctcctgcttacctttcctgcgccctcactgcgcgccagccacttgggagagtgcttgcttccccacagcgtcgccagtttggtgtgttaccgaagattttgatctttgtgggtccgatgggtttcttaaagaaagacatgaattatgctagggaaacaagaggaagcaagagaagggcagaatgtttgaggcaagagacgctttgcttgggtcctgggggtgcgagcgcgggctggggacaatgcgggggcagtagttgcctgagctccagatcacacctgcactcagaggcgggaagcccttatcctggtcacagccgcgcgagcggagagaggcggcggggcggcggggtcagcgggaattagcgcgccagggccggggcgagggattgccgcggggcgagagttcgggacgggattagcgggttcaaaagcaggtcagggagagctaagcaaggcgacgaggtccgcgcgaggtcaaggtccccgagagaggcgggttccggactgggctcgggaaaggcagcgggcattgcgatcgcggggaggctgcaccgggaagcccaagttccgagcgcgtggagggctcggccggcattcgagtgtaggccgcgccctctgacggccgcggggcgaggacacctctgaccatgggccttggtcgggaggaatgagcgaggggcgaggtgaacccgggtacgagtgcgcggcaacttcaatgaatgtatccgaggtcgccaggcgcgcgcgccgcagatctgcggaaccgggtttatctattcgtcttttacatcgtaatcccgtttccttttatttttacaacacttttttttttctggcaagggaagtcatctcttaggcaaacaaacagtcaaaaataaaaataaaaaaccgcactgaacaatgcaaagaaatgttcttggcaggagccagtctctcccgcgtctcctggcacctgtggcctccctgcggaacagatcccagagtgtgacaccttctgtgtaaaaataatcgcaacccacactccacccttctgtgcgtcctgcacacgcaccaagggagagctggaaggacagccgagggatacacgctcttccacgaaataaatatgttttaggggtgtgtgtgtgtgtgtgtgtgtgtgtgtctgagcctctgacttgaagttattggagaaggtattcacacattatttgggttctctcttaaagagctcttgggttctctcttaaagagctcatgggaaacacacctggcggtactgtgggatgcgaagtgggcgcctcactcggaaaccccggccttggtggatgatctaagaaaaaaaaaaacccagatggacggatacatgggcactttcgggatcgctgggtgcaggccgccgtcgccatttccaccgtccactactccaggcacctgcctctcgtccccagccttggcctttaggtctcccttcccgcagatgtcgcctggagaaatggagcccggatgctcaggcgcgcggcgtggtatccccaaacccgggacctctgttttgggtctggttgattttccacggagaaccgaagagtccgctcctcaggggcgaagtttgcaagtccttggggtagatggtgacgggggctggggcgcgagtgtgaaaggacaggaaaggaaggagaggggagagagaagcaggctgagaagtgggggaagccgcggaagccggcagcgcgggagcggagacgcggaagccgggtagggggaggggcggactgggaccagggcgaggggcggggccggaaacgggcggactcgcgccctagacaaagcgcggcccggtgggcgagggccagctgctctccccgcaaggtctcccgaaaccgggctttcgctcggccagccggctggttctggtggggacgcgcaggttgctagtggggaagccagtccaaagggatcgatcgccggagaaaccccacgcattcacccaaacagccttcggctcagggtggccggagcagagcccaagggtcaagggcgaggggccccttccctgcccttttgtccaggtggactctgtggccgtcgttttgttctgagaccccctgggaatgccactgccgggccacaaccccgactggcaggtcaaggtgcaggaagtcccgccattagaaatgcattccccaggctgatattaccttctttttctcagttttacagtcatatacacaatggtaagactcctcttgacgccacttccaacctctgtgcactgttcgcatggctagaacagcaataatagaattgaaagcaggaaaaatatccccgtgctacccctaaaagactcagtcttttttttttttttttttaaatgtgcatctttattttgcataatgttagtcctggtgaacatgtagttttgtattcagtcttttctacttgaggccacacttcagtatttgctatgtgctatgatcctcataagtatacttttcaatggccgagtaatgctctattatgttactgtgtaatttacttaaccgttcaattacttgatattcttccgtgtccagtttttctgtatgaaaataatacacaacctaaaatcttcgtgtatatagttttctcctttggggaggattatttcttcaagattcttactgtttcagcaggaaggggacattttcactactcttaataaattgcccaaccgcttcccaaagcaatttacgcaggcatttattttcgggtcattatgggcgtggtgctaccggtcaggaatgtccagactaaatcagtcccacccttagagcactttccctgcaccccaagcctctgggaggcaggcccttggagcaaaaattaccgcgcaaagtgggcagcacggtagggagaggaaagaagaggcaatgggagccggggagtgggtgaggggtgtgggggttctttccccagcctggagaaagtcaggtaaggcttcacctgacttagcaaggaagtgaaggtgactcccgagtacagccccaggcaggggtttgccaagtagaaatggagagagaaacatagaaacctttgtctgcgcaggctgcaaagtttgttgggtttggagaggtacgtagtggttatacgctgcgagggatcataaatgtgggtggaaaagtccaggaaagtgggattctcgccatccagtccaaggaaattggaaacagacagcctggttattgtgcatttgcattattttaaacggttgctgtattaatagaggcatgattacataatcattattgttgtaaattatgttttactgaaaactagtttacatttccttatttaaaaatactaattgtcttgctttctgactcttgaggctgaagaaagaaataggaattgtcctttaagaaacaatttcttctctaaaccacagtaatatgtattttaaatcataaaagcaatacatatattatttgattttttaataagaatatattcacataagattaatttaaagattataagtgaacacaaactcataaaataatcagacaagtgtctacaagtccttccttaatcctctgtgcagaagtagcatggcttatagttactacgttgcatatgtgaactatttagatgttttttgcaacaatgatttatattccctgccactctgcaaattgccttaaaaaaataggtcatagttttcttacatgttaatggaagtagctctatctcattcctagcagctgtcttg

SEQ ID NO: 1880457 - DNA, 4001 bp, Homo sapiens
ttcactgaaatggaggaatagtttttgaactatatttctttctgggccatttcacagacatgggcgggtgggggatggggaagtcattgtcttcatattttaaaaccctgtgttatgcaatgaattcactcctcgttgtgaatatgcatagaaaggtagcggtatttgttcctttggcaagtttggaagagcagatttgcttttgaaacagctacattttactcagcactcgctaagacgagtcagtgcgccccctgctgacaagtcaataatgctactcctgagcaaagtttattttgttcagtaaaccgtgtcatataaaattaacaacagccaataaaattagcttatatgtttcaactgtaaaagtccaaaacaaaataaagctagttttagtggcactagaaatctctagtttggcttcttctctttggctgaaccaaggtccttttatctaaagcccagtgcacaaacatatagcttaatgtgactagtgttcttccttttatttctttctctatggcaaccaatatgctctgctcagaaatgttccccatcaaggaaacaaatgatcttcagggagcagctctatatggcatctggtccaatggagcacacagagttaaccccagtcaaaagcaacgctgccaagcacgtaaacaaggagtggaaaactggcgattctgagccccctccccaactgaaacctcttcctccctcgttacaaaccgtttcattgatttggcatcaactgtttccaaataaattaccaattctaaattgcaaggtgttctgtgtaaaaaagtgcaataaaattccagccattggattctcccccctcatcatcacagacgcagcttcccttaaaagaacaaaaccaagaagcttttaaaattttctccggcctatttcactaaggtaaggcactcaaatgggcctggacttggcctagctatgtcctccggccatgtttatctaattaactgcacctagcaataactgcaccctcaatttttacaaaacccaggaacagtggcaaggaggggacaagtgaggctgtcaaaaatagaaaacaaagtgaaatccagtctgcgatgctaaagctccagcctcctttgggaatgaagtgtagggatgtcctggttagttttgattgatcaccctctttctgatgggctttcactaccgagctgggaggctgcagctccccgcctgctccccagacacagcattaaccaggggtgccctgacttcctgcctcgcttcctcctcctccagctctccgccttccctttgccaagtccccctcctcactccatcctcctgctcccagcatgcgtccccccaccccaatccaggcaggcacacacaattcaggacatcaccactggctacagaaatagggtttcttcccctctagtcctgattctctgggaaaaataaaaaatcccaatcaagaaatatttatatactgcatgcttaataatcacttcttttccagggcttcttccccctcctcccaccccaccttcacgatcaacaattacaatgaatagcattttccccccacccctccaaagtaaagtggcttttgctgtgtggggctttggactgagtccatctttttatgtaatattttagcagggttggatttttttaactcccccccaacacatcttcccttccttccttccttcagacagttgctctgtgaaccctctcttgtcccaagcaatgaaaataagctcccaaacctacaagaacataaataaataagccaaaaaggaggggaaaaagaagaggaaagcagggaaagaaaatgaaaaaacacttaccgagcaaacttccagggttaggtttttaaataaaaggtgttttttaattttttttcaaataaggtgactgggttgggggtggaggggaaggcatattctcaactctccagcaccgatgcgtccttagccttcccttcacactgacgcctcgaagcccagctctccactagtctattattttcaccaaaatatatgaaaatgtatgcaaatgaaaatcagcactaactgttctccccttgttatatactttggattttttttttccagacaaaacaatcacactcgcaaagggagggggcggatggggtggggcagcgtggaggggggagagaggccggggagcgattcgagaattaagtacgacgaaagggggggaggaagaaggggacagacctcggaacagaagtgtgtttctgttatcgaggagcacaacgttttggggggcttcccatacgcgcacacacaccctcttgaaaagaaagaaagtggatctgtttgcagaggcgctatcacgtttcatcaggccacctgagactgcttttgaaagcgtgtactgtgaaattcatagcagtaatttagacaaaatcctcactgtatattaatgaaaggcggccccatggctctgttcctatcctccccattcagtgtaaacaaaaccacgagactctctcggtttttgagccggatccaagcaaaatcggcaggaaaggaaaacacggggtgctggcaccgactattcaaacgtctgcacctggagatctcagattgattcaatgaaatctgtgttccatcttttatatatacatatacgcatacgtaaatataaaaagcaacctttgggggccgcagaggaaaaaaatccgttctgtttggggtttggttaccaccgcctttggtatctataccttggcaataatggctttgctaaaacctacctacgatggtatctcacccggcaagcaggagctggacaagagcctacataaattctacgcgtctagtgttaatcttgagatcacgcgggggctgcctggctgcggctgggcaggagaactcctgctttcactgagttcacttaactgcgctcggcagaggcacgatacagcgggagagaagggcaggcccgttcacattttaatcggagcgcaccggcggccgctcctcggctgcgtcctgggctgccgctcgggctcgggactgccagatgcaggctctggctgggggcggcgggcgcaagcgggcgcacccgcagctaggggtgcggggtgcacgcacacgcacgctcattaagagccatgtatttattgaatgtccgagttgggttagttcattggaaatccccgaggagggctcaatttgcccttgttttcgttgccactttctcttttttcttggttcgctgaggttcctctgtgcagcgtttccgcttggccgcgtccccccaccccaccccaccccacccccgcttctctcgcctaccgggtgcactccccctcccatcccccttaactctttcagctgggttagagctgagaaagcatttgtcgccgccagccccatccaccacgcaaatccatctgagacagaaaggaaagaaaaaaaagcaccaccatgcctaagaatagagagcgagcaaacccccccaccgctaatcacacacacacacacacacacacacacacacacacacgaggaagcggtggagcagagaagggcgcggctagccgatcccggttctttcgcccggctcctgctgccacagggaattcctaaagccattggggtcgaatacacttacgatgaatctatgggggaaggtcggactgattgcttttcaaatacatcgcacggctccgctgaccggcaccctccaaactcacaagggcacgcacgctacttgcacgaatcccagaggagggaggagggaggaagggagggagagcgaaggagggagagagggggtggaggagccagggagcggcggcagcgagcggtccgtctcgcacgcgcgggcaccgcgctggtcctgggctgcaggtttcccagatgatggcatccgagaacttaaacaaagggggctgccgccggcgcgcaacggctgcggaaagttgcggtggcggatttccaaggagcgtggccacgaccagagctcttggcgatgcgagc

SEQ ID NO: 1880458 - DNA, 4001 bp, Homo sapiens
gacaatgagcagagatgacctacatcaagatgaactgctggctcctccaagtgcccagctgcctagcctgcctgcttcatggtgactaaagaatccctactaactgccccctcctttcttctcatggactgcagcagaaatttattcccttcctccctccaggcctcttcctcctatcccagaatgaacagggacttccatttgggataagaaggggtgtcaatcaagaggcaaggagggttggcaaatcatcttcagtaataaataaacccagctacacagtagcctttacaccaatataccgttctcagtaaccttttcttttcagtcacttagcttatgacaagctaaaggcatttcaacccatgagcaaaaagaaaattcaaaacataggcccaattccttctttctctttgctgcctgggttccccattcttcatttcctcaccttccaaacatcccaatagccattaccccatctgaagaattaaaacacttgttccttaaaatcgtctagggtctgccggattatcagagtaattgaagacagaaagcacccctgctccatcccaattctgcatccaaaccaagtaccatatattgtgtaaccaccatcatcagttacactttgcgtaacttggcagagccagaaaggaagactccattatttaccagcagtagcaataaactttctgagaaaaataagttcaacattgaccatgaatacctactggagaactctttgaaaacattacctgtttttttttaacctcctattttggggaaggagtgcggtaaaaatattaggtagcagaattttaaaacagcttgattacctcatttgggtttggagtcctcaactccagtcattagtaataaagtcattaatagtcataattggtatttaattgcttgatctgattggtgctttattcctgattccatttagtttcatggagaggtacaggtggtgcagtcagtaaacggaagccagccatttgcaggcaacttttcaagcataagggaaagtacttttgttatatttgcagacatgtgtctcacacatttcccccctgcttttggtaaactatctaagaataaacattacagatctgggctttaatttctccagatgggatcataaagtacctaggaggtgtgtgtgtatatatatgtgatatagaattgaggtcacatggctgctgttcacactgcaagtcaaaaagaaactcaatgctcaatgcgaacgcagaaagaactcaacaactgaaccgccagtggaatccagtatctgggcaagttcactttattccttcgcaggaagagggtcagcgacggccagcgaaagtttcccccgctctttgaagagggaggtgacaagacctgccagaccttcccacgcgcgggccgcctgggttctggggctttcgtgacgtcttccctcatcgcgctccccacccccgaacacacacacacagacacacacacacacacactcttccttgctcgggaaacttggcttcaacctggctccccctttcaaaaccccctggagaacttcccctgcagggatgccctgcgcccgccggctgcgccctccctctcctcagccctgctcctcctgtccgctccccggcgttctggactcacccggcacggtccttccattccacatacagacaggaaaccggcctcttcgggacaacatttgaaaccacattttatcaacatcatcaaagaccagagcacacacttcgggctctgagctctggagcccgcttcttgcagaaaaccgggtatgggggaagggctgcaggggcgagaaatcctgcttccaactgcgatttcagctttcttatggaaatgaacgcgacggcccgttcgccccgagcctccctcccgttcccagcccctcttcagcttaccctttcctcccgctaacccccgccctcccggtccccgagttcccgcggcggccaggctggtggggacgcactcgctctgcgcccgggtctcggcgcgcgcggaaacccaggccgcgggctcccctccgccccgccggcccgcgtgcagcattaaatattcatagggatgctactttcttaaaggagaacctaccgcgcgggaaagttcacagccaaggagaggcacaaaagaaggtctccgcgctggttctcaagggcgaggagacgcatcccttcttgacagtgcgcctccagactggcattaaggagaggactagggaatgggatcacctatcgtcaagtcacttattttagaggggtttggagaagaggtgaacttggtggtggagagaaagcgcgctccctaatcacctgttaaacagttattttaaaattagctgtcgcatctgacgccctagggtccccaagggccttttcataagggagtctgtttaacttcactggctttgggagcgagaaagtttgccctttgtttctggaaacacgcccacgcagtacgcttaggtaaccttacactgaacaatttccttggagcggctaaaaccgcaacaaccaaacttgcacctgcgccattctcttaaaaacagggcagcggctgtgagcgctgggccggtaagtaagggcagagaaaggggctgtcgtgtgcgtcccagctctccgacccgcacgtccgggacccctttccgcccgcgcaccgcggtcacttgcagccggcgctggctgcttgagcccgcggccgggtcgcccggcttctctccgggagagtggccagggcctaggcgctcgctcaagagggagagcgaagggaaaagaagaaagttctccgccggccgcgcgcagctcctcccgtgagcgcgccccagccctgggccggcccgacccgacccgcgacggggccacgcgtagtgccaggcaactcctgtgccctgtggccagccccgcgcgcgcactcgcactcacacacactcatactcacaccccacggttctttttgttccgggccaggagcactttcacaagtggttagaaagtcttgggcgccatctaacgggagcagcaaaaagttgacgctgggtggaggttaggcccgacaggagcccaggatgggcggaggagatcctctctcccactctctgcactcctgggtcttgaccccctgcttcccaattaccaccaccaaaaacatacacacacactcgagaactgaggggcctccggaaacctccttgcccagggcctgagggcagccctgactgcccgctcggggaccctcccctgagccccagccttgcatgccttcgggcgttccctaaggcgcacagaagaggaaggatcgttttgcgcctgtcttaatacggacccggtgtcatgcaagctctcgctggttttcctttggcctgtgatggaaagtccgaagaggcccgaggcaggcgcacctgcttctggaaaggaacagccacgcaattaaggagtctgcagccagaggggcttttagaggagagagagggagttcaaagaggataatggcaaggaagcaattgaggacttggtccagcagtggccccaggagagctgaaacctgcgggtctcctgggaggaaggggtagtgtcctgaagaactgtcctggggattgggagctgctgtttggaggaccatgaccagtggtgaagcccaggagagacctctggagaggacaaaggaagttggacacaggacaaaggcaccggagggactcacccatccagagggactggagcttgaggaggcgcaggcctccccgccagggttcccagccaccgtgagagccagtggtcatgggaggtaatcgggaacatgcactcctgttggattaggagaactgggtggagtctgagaagctagcagaatgggagtgcccctggccagatgtgaaagcaggagaaggaggagaggtgccagtaaggcccaaacctcttctcctctgaccccacagctgccattggccctggagttgaacagtgtgggggacctatctt

SEQ ID NO: 1880459 - DNA, 4001 bp, Homo sapiens
atttgcattcctgggaaattcagtatatattaaaaaccatacaaaaatattttatatctatatatgaaagggagttgtgttctaaccatatattattaaaataggcatttcaactacatgaaagtgaatgtttgatgagacgtttgaaggtcatgaggatgagggacaattcttgactgtgctctttcctatctcaaggacctgctgcctgctgttcccccagctggaatgttctttccctgaatctccctgtgaatggcctttttttttttttttttttttttctgagacggagtctcgctctgtcgcccaggctggagtgcaagtggcatgatctcggctcaccgcaacctccgcctcccaggttcaagcaattctctacctcagcctcctgagtagctggggttacaggcgcccgccaccacgcctggctaatttttgtatttttagtagagacggggtttcaccatcttggccagactggtcttgaactcccaacctcgtgatccacttgcctcagcctcccaaagtgctgggattacaggcatgagccactgcgcctggccggctctttcttaaactgaggactcagctcaaatgtcacctcctcagaactttcctctcccccagtcacttttcattttgaaattccttcagagaactgaaaatgttttccgtctctttgaaatgtatgtacatattttaaaaagctaaataagcctcttgctagttttgcgtcctcagaaggtctttcttgcgggcctcggagccatctcttggaaatgtgaacatcaaggatggtgctccatgtttctgtctctaggagggtttaagccttggctcttggttccaagataacttcccattattttcctttggataaagacaattaataggtatgtaatggattgtacgtgcctgaccatatgaaaaggtgagatttccttttttttggtctttgcactctcttcagtggattgcctgtgatgtgcatcatggtacgttttagtacatatccaataataaaactgtttcattcttttgttgtacattgcgcatttcgtggaaagaacagtttggggttggcaggatattttaaattatttgcccatatgggtcccccagttttgggcacttgtatggcaggctgatattccccattacctctccgtactaattttaactagtaagggacaggggcaagggcatggagctttggagtcagacaaccctggctttaaactgtgccttttatcagcattctgaagtactgtatgttgaagtaacttctctgaaccccgaatacttcatctataaagttaggaataataaatacgtcatagattaagtatggacattatctgatgcatagcaggtactattcaaatgaaggaaacgaagttatcctaggtcctttaatgcactaaatgtgtgctccatttccgcctttcttggcatctgtgtgaaatctcaggatatagtgtccactaaacttcagtgcactgcctaatgagacaacgaactccaagtgcggaccttttgagtttaaacgggtttcagtaggtaaaatacgtaaagttcacagtaccctcgcaatttagatggaggaaaaaaaatcagtcggggggggggtccccgtatgcaaatacaggaattacagaagaagacaggacccccgccgcagcaccacttccccctacagggcgcaacgtcccgccgctggcgcgggggtggagatttgcatgtgcgaagtcgggaagagggggaaccacctctcgaaaaccccggccgtcgccctcccaggccgggagagtcggccccgcgcgcccccaaaagctccccagcggccggccctctctacgtcatccgcaccctcccgcccgctcctgaactttaaaccacactcggaagaacaacctggaggagggggatttctcaggagccagcggccttctcacgctgctagccgtcacctcccggctcccgccgttccctgcgctcccgaagcccaccccaagctcccgctccctcgaccccctcccaagccagccgccgcagcagcgccgggggcgtatgcgtgggggccggcggggagcgtgcgcggggacaggcaggggcggggcgctgggggcggtcgcgcgcgcggcggccgcgaggtcgccccgcccacgcctccgggtgagggttgctgcgtcgggcctacgtcagccgcgggaaattcccctcccgccaggctgctcgcctctcggctgggccagcactcggctctccccgctccgccccctgcccctggctcccgtacggtggacggcgacgctgggtgacccggggtgcaagaattcaggggttgggaaggtgtgagccgcaaacccagcggagggcgggaagaaggaggaggcctctagggtggtcgggggactgggggccccgccggcagaggtccctcggcctcctgactgactgactgcggccgcctccggccaggacgctgggagctgcctgcgggaaggtgcggggagcggagccatggcctccggtgagtgttcatggggcgcgggcctgggccgggggaaaggagctcttctgaagggggtcctgccgcagtgagtttagggagctcagtttttgctggggcgcgttctgtctttaaaatctcatatggtaaaattgtcagcttttaaaaaagttacctgcttcagggtttgcgtgcagaatccaagccacgctctgtaattcgatcctgttgtcatagcaggaaccttagaaattcccaacgacttgattttaggattagggaagtcataagcgaaccaaaggaggacgaagagttctcattaaaaatgtatatgtattgaagatggtggttttatgttttagaacaggaatgaggaaccttcagacctcgggcaagctctctccccctttttagtttaatttcatcaaatgcaaagaggtgatcccccttgtactgacagttgtacaaaatgtgtcacggctttaaaaatcatccgtggtattttaacacgaattagaaaatccgtggtattttaagtgttaatgttgcttcgaccaagtgtaggccgggcgcggtggctcatgcctgtattcccagcactttgggaggccgaggcgggtggataaccagaggtcaggagtttgagaccagcctggcaaacatggtgaaaccccgtctctactaaaaatacaaaaatcagcggggcgtggtggcgcgcgcctgtaatcccagctactcgggaagctgaggcaggagaatcgcttgaacctgggaggtggaggttgcagtgagccgagatcgcgcccctgcactccagcctgggcgacagagggagaccctgtctctatttaaaaaaaaaaaaaatgtagtttttactgtgagataaagctcaaggttcctaatctgacgaatagagacgttgaatcccccttcctcctcgctggaaataaggggaaagaggagttttagaatatccgagctttaaaataatgagtaggaatgaatacaactttatcacttatgtgactatatattttcccttaataaatgctcgatctctccctttgggggggaataagtttgtaagaaacattgcagagcaagaaagtctcctatatacacagatgtggttggggctgcctggagcttaaggttgagggggacgggagagccggggcggggggataaatcaagtagcctggggtcgagttggtcttttaccaggattttggcaaggtgagtgggggacactttccagacagaggaagcagcgtgagcaaaggcagggagggctaaatgcatgttaaatgctgtactaagagaatgaagagggggccccgtttatgaacttgactcttatccccaaactgcctggtccagtgaccctcagaagtaggctgatgtctagtagagatgaggaagtaggaagcttaaagaacctttttaaaaggttgagcagaacaatgccatagctattgctgtaggc

SEQ ID NO: 1880460 - DNA, 4001 bp, Homo sapiens
cttagcctatcctgacttaactacttcccatctctggtgagggaatatgttgatgaggcctaagtgtagccccaatatttgaaaggaagaaggcagtttctgtacataataaaagagaaacttgggagctctgggacataatttaagaaggaaggatgggtagaaaattggtgtaacacagcctcagccatcggggaacttcacgtctacttggaaaataaaaattaaaaaaaaaaaaaaaaaaaaaaaaaaacgaaaaaaataatggtagagagaagtcctgagaataaagaggccatgtgggtttggagcaggcatggaaggacttcatggggaaaggaggtttgcctggccaggagataagcaaataagtaggactggggatgtagaagggctgagagcagccatgccccagggaaatgagtaatcatggtttgtctgtgaggttattgtctagaattgccagagtctacaagaccagctgtccccgagggttggagataaagtgctaggtggtgtggaagttgtaagaatcaaaatggagttactaatgttttttctttaaaaaaaaaaaaactcaggctgtgcgcagtggcccacgcctgtaatcccagcactttgggagactgaggcaggcggatcacctgaggtcaggagttcgagaccagcctggccaacatggtgaaaccccgtctctactaaaaatacaaaaattagctgggcgtggtggcgggcacctcccagctactcaggaggctgaggcgggagaatcgcttgaacccaggaggtggaggttgcagtgagccgagatcgtgccactgcactccagtctgggtgacagagcaagacgccatcttgggaaaaaaaaacaaaaaacaaaccaaaaaaaacttgacaaatagagctagggaaagctaagaagaaagcactcccacacttgtatgcctgataacaaaaactaacacaaaaggctctacaaaaccataaccttgcacaaaggccatcacagccttacacatatatataaaaaaaaaaaaacaaaaaaaaacctccacaaggacattcgcccagcaactgcctgtctaaccttggactggcaaccccttgttattgatctctgtagccaaggataaccatttgaaaacaattatgaaatcctccttactttctctttgaaaaccttcctcttcctttcttcctctgcctcctcgaatatgcacagtttactatgacatgcgtgttaccgttgcaacgctctgctcctgaacaaacgcctttctctagacagcctctcactgtgtggttatgcagcttgacaggggcccgctggacccaagtttactgcctctggcaggcggtggtgatgacggggagtaaaagcaccttgtggggagttgaagggaaagatatttcaacgcaaaaacccaggcacttttactaccttttgtttgatgcatcggtgttacgggaaagctccttggcagcgagggcctggctctttatcgccgtgtgtccccgccccacgtgggtcccatgcttagcccacggcgggtgtttgaaaagcacggaatgtatatggcgggacagggcgcgctgcggatacaccgggacgccccctcagccgcgacagtaacggcctccggccaccagggggcagccagggcgcgctgcggatacaccgggacacgccccttcagccgcgacagtaacggcctccggccaccaggggtcggccagggcgcgctgcggatacaccgggacgccccctcagccgcgacagtaacggcctccggccaccagggggcggccagggcgcgctgcggatacaccgggacgccccctcagccgcgacagtaacggcctccggccaccagagggcggccagggcgcgctgcggatacaccgggacgccccctcagccgcgacagtaacggcctccggccaccagggggcggcacacggcgcctcaaactgtaaacggctccgggcttcggaatccgggcggggagcggagagcggttcgcaaaagccagttggtgcccggatgccggcattgtcacgggatcgcggccaaagggggtagaagacagcgcaacagtcgctcttcttgcatgaagctatatgcatctagtgtgacggattatcctacctggagactgtctttttcagctcggcatcacgggggcgggggcggtgacccccatccgggctccccgggggcggtgacccccatcccggctccccgggggcggtgacccccatcccggctccccggccttctctcctccgcccgctcctgcctcccttctgcttactcctctcctggtcaacaggtcagctcggggtcctgcttccaacctcctcctcctagttgaagccggttctcaggagagaacctgccatccgcagctttacacctcggcaggaatgtaaatcactcttctcccgtcccaggaagcctttccagtgttctgattccagaaagcaggtgtgtgtggccggttcaaggaatttcaagcatcagcaggcagaggaaagtaccagagtggaaggcagcccacagggtgtcgaaatcaagccacccagggagcccgcagatcccaccctctccggtgagagagtttggtggggagcacttcatccaatgcagggaacagcgttactgcggccttcacctcccggcttcaagtgattcacctgccgcagcctcccaagtagttgggattacaggcgcgtgccaccacgccgggctagtttttgtatttttagtggagatggagtttcactatttttctctccccatcccgggaaagttgtatctgtttaccacatgttctcccacatctactcggttttacctctgtaaggcctgaactcaaaagccaagaaaaaacctctttctccagaactttaccttttctggcaaaaggaagcagggagacctactaggaaaatgccaagaacaaaatgattaatcatgtgaagacggcatctaccacctcaaatcgcccagctcattgaacctgcgtgaggatccagcactgtccctggtgtgtacagctcagtgcaccgagatgaccaaccgcctgggtttgctttactgtcactgctaaaggcaggaaggcagctgccaaaccaggacaaggtggtcaccccacggtgaacatcagtcaccctccctagcccacacaggcaaacaaccgggggagactatggctcagggcttagaacccaaaggcctgaacaaatgaggaagtttctacaacaaagactttctttgacagagtaaccagtcataatttctgagcattccaggagcgctgtgcagaatcacaggtatttggcaactagtgggataaaacaaaggtgccattgaggatgtttacaaccaacccctctccggagataacctcaaggtctttcccttgcacatggcctttccatgactcatccacagcagctgcctccctccaccacacaaaggaccctgcaagttctgtttggtattcttgagaataaaaactccgtgggtcgttccctggaattggttctcacccattttctttcctctgaccgtagccaggataggcatctaattctatagcttgtccgtggaatggaaaaacaatttggattttcacaacctgaaacctaatttctggtaggaaggtaccatctggtggatatttgtgaaactgctcacgtcctgtgtttgaaaatgagcatctgggggcagcgtgcctctccgaatgtcaataggaacgttgctccgagaggaggagagatccacactcaatgtggctgatccccttaactatgtgacactgtgtatgtgactatgtcataagcagcgtcatccctgtttacagttttctcagtttacaatgaatttaaatagctacccattgcctcttcctctccaagcgtactccttgctcctccgtgacaggcacattgatctatgagagttgtctcttgggaaatctagtcatatctcatgc

SEQ ID NO: 1880461 - DNA, 4001 bp, Homo sapiens
cccctgaagataaagagggacattccatgatgacaccatggtcagccactgtcaggatcacagaaaaatcctaaatgcctaaaaagataataacagtttcaaaaaacacgaagtaaaaacggacggaactgaaagaatagagaaattcactgtcctagttggagatgtaacagctctctcgggactgcaagcacagcgggtgggacaggaaggattcgccggtttaaagagcactgtcaaccagctgcacctcattaactcttggcgagcatcccaccccacagctgcagaacacaagtaatttttgagtgtatacggagcatttacaaagatagggcttatgttaaacagtaagaataagtctctgtaattttaaaaagtgagatcctgcagtttgttccttgatcaaaatggaattaaatcagtaatagcaagattccttttagactctccacatatttggaaagtgggcaatactcttctaaatatgcttctcagaatagagggtttaaaaaataaatacacacataaagagattcttctaaataaagcatgggtcaaagaagaaatccaaagaaaattagcacttatttcaaatatccatcaaaatattacacaaaaattgtagcatagtcttagaggaagatttgtgactttaaatactgacgacatttcaacaaagaaggtacacagtgatcaatacactcatgaaagggtgttcaactcacccgtcacaaggaaatgcaaactaacgcctcactgagatctgccaaacttctggtgccgactgtgacctggccgcgcctgcggggggcagaggagagaaggagactgggggtgaggtccacgtgtcccaggcagggggacagaggccagaagaaagtggctgcgggtgagatccacatgtcccagccagggacggagaggagggagaaccggacagcagcatctgcttccagccacgtcacgtgtttggagaggcggtgtcacctcagtgtgaggaatggccactcaggacacgtctggacttcctcccagccacctctcaccagggatcagaatcccggccccggggaccctcgacccataaacatcttgggcctacagcaccaccaagcacgccacagccttggcctggggctgcttcagagacaccgcacggagggcttctcacttccccagccaggagccacccacgctgcacccggggaggccccagttgcatctgtcccacctttcagaccgagccagccagaggcgcccagaaagactatgccaggcctcagctgtgttgaaacccaggttggggacagtggcaggacctgtgccagcgtctgcccttgctcctggctggattcagttacttggctgggccccagtgaaggcgcagagggcaccaccacctgcacaggaagggaaggaagcccacagcagagccagcacacgtgtggccacgccccggcccagccccccctcacacgtggccacaccccctgcccagcccccttacatgtggccacacctccgatcagcccccttccacacgtggtcacgccccctgttcagcctcctcgcacatgaccacgcccccgtccagcccccgcacacagggccactcctctagcccagcccctcacacgcgtgaccacgccccttagtctcctcgctcgtggccacgccccctgcacggccccctcgcgcgtggccacacccctgtccagccacacacacacacacacacacacacacacacacacacacacacacacgctgggccacgcccctacccagccccctcacacgtatgggcacgcccctgctcagcgccctcacacgcatggccaccccccgtccagccccttaacgcgtgctgccccgtgcccacctacagcggcctcctccgcaccagggctgacccagtgtggggtccaggtgggctctggtaggcccccgggcagagctgtgccccgcgtcactgaggatgcacagagaaaaaggaaggggcggaggaagcggaaacccgagcagcgctgcctgggcgtggcaagcccgctagttttcccgcccgctcatctgctttccctccctccataataagtgtggcacctggagtgtgtgactttcatgattttcttttaggagaaacataacgcagtcctctgtcccgcccctcctgcagggaatggtcatgggggcgtagttaaccccatgcgtgcggaggtacaccttggagcccagcgccgacacaggtcaggagagtgttagccactgctgaatgactcctgttgtgtgcaaaattgttttgacttttaaagactacacacaacccattctgccattatttagggtgaattatactgctgggtcacaagaagaagacgtggctcctcttgatgctgagggaggcctggaagtcattgctgggagcttgggaagagggctccccgaggcagagcctcccaggggacagaggcggcccagcgatgacctgggaggtgagcacaggtgtgcggggcccctcggggcccaccataaggccccacagcaggccctaacctcccccatgtgtcctaaggcagttccatttgcattggcaatggtcatttcactacttctgacctggaagcgaggtatatgtttggaggtgacacgaggctcccaaaggggtgctatagggcgccttttcttattttataaaacttacatcgaaatgagccgcaccctgaggggcagcccacctgctcacccctggagggactctcccagggctgagggtcttccccagatgcttcacccgggctcctccaagtgtggggtggccttcagtctgctgcgaagaggatgtggggtgtctggcagccactctgctctggatttgcgggaacctctgctgcctccctggtgccccttgattggcgctgggtctaggaaccccctctgggttggaactggacttgaaaaggtcattttctgcctgcacccaccaaggccacctggggctgtggagccaggaaacccctgtcactctcctcagatgctggcccgagggcaccctcagtctccctgagtccaaatcaccttttcttcccaaatgacccagcagcctaggccagccccagctggaaagactgctcccctctctcctccgctctgctcccctgccctctcttcccctcccctcccttcctttcttctgctggcggaagtcctgtgccaatcccacatccacatccgtcactgcactcctggatcacacctggacagacacagaactagtcctgggagtgatcccagggccaggaccctagtaatgagttatctaaatgtctctgggtgtctggaattggttctctgctccaactagctttaaaggcattcacgctctgttcccaggggtaccagggtgctagctgcccacaggagtagcatacaggcactcagattgccacctgcagacatctgtaatcaaatggccataggatgcctggccctgggcatcaagggaaaaatttaggggtgtagctgggtgggcggatgcttctaagtgtgctggagaacttggggaaaaagagaaaggcctccaatttagcccccaaagtcccaggcaaacagggacacttgccataacaggtggagacattccccaaaggctgggaggcagagtggaggcatcgccaggaccccagccctctgctgcctctcctgtacagaggtacaaagtcccaggccccagaaggaaagggaaggagatccccgaacctctgctccagctaggacctcactgaggcccaggtggtgtgaccctccacctaccagccagcccggggcccggatcacagcgtggccactcctcctggggacttccctggcctcccgctcccctcgccaaagctgcgggtgaagcagctctagcccaccctagctagccattgtccaaggccaaggcccgcctgtccacctgaatacccagggtccagggtaaccaacctgatcctaaccca

SEQ ID NO: 1880462 - DNA, 4001 bp, Homo sapiens
atatgagttttgggactcatgatgttcatgcttcttggtactccttcaacactggtaaaacatagtaggcattaggtgaggttcaggcatggagcataatatcatggatggagagatgaacaaagaacttttcctctccttggactcataaatgaataagagaaaatagacaggcttcttctagaacatctgttgacatataaagtgtttcaattttcaatatgtgtctctacaatgacccagatgttcagaataacttttattaaaccctgctaactcagattcagtttgccccaggagaccatgataaagatgaagacgatggttgagtatatattattggtaacaagaaacagtatttttatgcactgaagtcacctaacatctcacttttttatttttataggtcaaaagtgctttcatccagtggaaataatgacttcatattgcagaaaaaaggaaagatgacatttggtttgctttattaaagactttgtctattaattataaatgaacctttgtacatggtcaccgagagggaaagtgtagtgtgacttttatatccaagaaagcatgaaaacatcaacatgactgttggccctctgagatagaggtctcaaatctgtagtctggttaaccctcttccttcaatgttgctttaatgttttctctttatttaactattacttacaaagcctctggtacaccaggtagtctgccagaggctagaaaatcagagatgaataaaacctgatgcatatcttaaaagtgccagagaaggctggaaccagtggtgaatctttgcacaatgaagagggaagtggtcctacctgggagtgtgctggggaagttctgtgcatgaatgtgtgagggattctgtaagaatcaccacctgctcaccaaatcttaccacatcctgtagctcaggtgaattctccaaatgtgtctaggatacctggatgatattgaggaaagttataaaataatgatggaaaacaattatatatgcaattttgtgctactcagatacctttttacattagactctggactaaattaaccaggggcattttgcagaacccctgatttgacataaaatgttgtatccactagcactgcccctcatgccccaattgtgaaaagttatctcatgttgcagaagatgggagagcagtgtctgatggcagcatgctatgggaagtcatgcaggctggtatggttataaccagaagccaggtcacatgtagccaggtggtgaatactcatcaaaacagggacaaccatggcttgacactaatgagcctctgagtggaagaagagtaatcattgcaatcttacaaagttcagaggtcagcatactgtgatcttgattccagctggagctatacatcattcaaccagccactggtcatgccacattttatcaatgctaagagcaaagaaatcctgcccatcataaaagacaaggccctatctcaagattttaaaatctagtttggataccagtctaggggaaaactagtatctcccaaacatccttaccccttccttgaaatctctcttgctcctattctgattcttgtttctttcttcctttctattctaatgattttccctaattttacacccaggaataattattatattaatagtttctattataataaaagcttacatttttctaagtgcttactttgcgccagactctgtctgaaaagcttcgagtatattggtccatttaatccccataataaatttagaaactattttaaccaatcatatattttacttccaatatgaatcattcagaagtaaaatgacttgcctaaagtcatacagtgagcaagcaggggagctggccttcagatcctgcaacctcaccttagagcttgatctcataaggactgctgtcctctctgctcactgccttgtcctcacaggccaatttcgtcacacgtgtgttacaggtgactccaataggaaatccagcttctctttggcccatacgacgtttaaaacacctcttaaaagttttgcctttttgtgtgacctctgccatttttgatggtcccaggaatggcatgtatgactctccaatctgcttggctcaaggttgactttttgtggctcaaggttgacttttcatgactcaagattgaatcaccaataacgtctttgtgaactgtccataataaaaattaggagggtctttaggaagatgtagcttttattaggtttaagaatgacaaaatattaaaatcagacctaaattactgttcatgttataatttaaattttgggagatgtggtaggggctccaccatctaatctaaactatttctctccaatggaaagaggaaagtttttgcaatcccaaatggctaacttcgtgatactacagagagtcttatgccttctttttatggatagacatacagtagtgacaatgatgctgaaagacttaggtccatctgagtttcaaacacatggccaactaaaatgggagaaaacattttctgggtccacctaccccaggaagggggctcatgaatgtgaggaatatttcagaggaaatttgctaatcaacaaagcaactaaatagcaggtagccaggctctctggcaacaaaccaaatccctagaaagaatcattcacccttaatgctggagaggtcatcaagtccaaccttccaaaattgcaccctcttactcagtatgataatttcctcctacatcttaggaatcttcttctctagcttcaccttgaaaaacaatagcagtgagatgtttactaactcctatgcccacctgctctctttctgcctttagttgttgaagtatttatccatcaataactacatataataggtgatatgtagatgagatccgactctatagggattccatctgcttgtgataatgggtacatcacacctccctgtatattctgaaagacaggcattcactttgtcaaacagtccttcctaccatgttatgtctaaaaggatctcaccagtgctgctatgctgtcatctttaacttcataagctcttctgttatgcatcttctaccagtttgtaaggcctctggagacaaatagcagaccctcagtttctttctgttgcctacagtgcccagcaaaaagtttgcctcaacagatttgtcttaaaaccaacgcagtagagtaagaagttacctgtctcaagatctagatgcgaattctaactctagctctggacacatagctatgagtaagtctcttgtatttcttgtctttgtataatatttctaagactagaaaagcaatgaagactggaaaagcaagagacttacccataatttttaatgtagagaaggagatgatgaagacagttatgttaaatgctctctgtgaacaaatttcagggtcactgaagtcggtagatgtgaagtctggttttgaatcttacatctgcaatttactgactgcaaataaaatgacaatctccctgaatctcattttcatcagttttaaaatcaaagtatttgtagcatttatgacacaagattgttttgaagattaattatatgagatcacatatataatgggcttagcccataatacctggcatatagtaaaatgttcaataaatgttagctattttaagacctttaagatgtgagagccaagaagcattctcttgagcggttcttgccagatggtttccttactctgggtttggctgtttcttgggaatgtgttcagtgaaaaaaaattcaacaaatcaattaacaaacatccaccaataccttctacatgcaacagaatgcttcaggcactgtgcatgatccaataagagtaagatgtcttctccctagaagagataatttaattaagaagataaagcaacacatgaaaacaaaactaaaaattcaaagtaataatggattctcaatgggtaatacatgctttgtttcctaaaggaacacactctttccagcccagattgttagggagagctc

SEQ ID NO: 1880463 - DNA, 4001 bp, Homo sapiens
tagctcaggtgaattctccaaatgtgtctaggatacctggatgatattgaggaaagttataaaataatgatggaaaacaattatatatgcaattttgtgctactcagatacctttttacattagactctggactaaattaaccaggggcattttgcagaacccctgatttgacataaaatgttgtatccactagcactgcccctcatgccccaattgtgaaaagttatctcatgttgcagaagatgggagagcagtgtctgatggcagcatgctatgggaagtcatgcaggctggtatggttataaccagaagccaggtcacatgtagccaggtggtgaatactcatcaaaacagggacaaccatggcttgacactaatgagcctctgagtggaagaagagtaatcattgcaatcttacaaagttcagaggtcagcatactgtgatcttgattccagctggagctatacatcattcaaccagccactggtcatgccacattttatcaatgctaagagcaaagaaatcctgcccatcataaaagacaaggccctatctcaagattttaaaatctagtttggataccagtctaggggaaaactagtatctcccaaacatccttaccccttccttgaaatctctcttgctcctattctgattcttgtttctttcttcctttctattctaatgattttccctaattttacacccaggaataattattatattaatagtttctattataataaaagcttacatttttctaagtgcttactttgcgccagactctgtctgaaaagcttcgagtatattggtccatttaatccccataataaatttagaaactattttaaccaatcatatattttacttccaatatgaatcattcagaagtaaaatgacttgcctaaagtcatacagtgagcaagcaggggagctggccttcagatcctgcaacctcaccttagagcttgatctcataaggactgctgtcctctctgctcactgccttgtcctcacaggccaatttcgtcacacgtgtgttacaggtgactccaataggaaatccagcttctctttggcccatacgacgtttaaaacacctcttaaaagttttgcctttttgtgtgacctctgccatttttgatggtcccaggaatggcatgtatgactctccaatctgcttggctcaaggttgactttttgtggctcaaggttgacttttcatgactcaagattgaatcaccaataacgtctttgtgaactgtccataataaaaattaggagggtctttaggaagatgtagcttttattaggtttaagaatgacaaaatattaaaatcagacctaaattactgttcatgttataatttaaattttgggagatgtggtaggggctccaccatctaatctaaactatttctctccaatggaaagaggaaagtttttgcaatcccaaatggctaacttcgtgatactacagagagtcttatgccttctttttatggatagacatacagtagtgacaatgatgctgaaagacttaggtccatctgagtttcaaacacatggccaactaaaatgggagaaaacattttctgggtccacctaccccaggaagggggctcatgaatgtgaggaatatttcagaggaaatttgctaatcaacaaagcaactaaatagcaggtagccaggctctctggcaacaaaccaaatccctagaaagaatcattcacccttaatgctggagaggtcatcaagtccaaccttccaaaattgcaccctcttactcagtatgataatttcctcctacatcttaggaatcttcttctctagcttcaccttgaaaaacaatagcagtgagatgtttactaactcctatgcccacctgctctctttctgcctttagttgttgaagtatttatccatcaataactacatataataggtgatatgtagatgagatccgactctatagggattccatctgcttgtgataatgggtacatcacacctccctgtatattctgaaagacaggcattcactttgtcaaacagtccttcctaccatgttatgtctaaaaggatctcaccagtgctgctatgctgtcatctttaacttcataagctcttctgttatgcatcttctaccagtttgtaaggcctctggagacaaatagcagaccctcagtttctttctgttgcctacagtgcccagcaaaaagtttgcctcaacagatttgtcttaaaaccaacgcagtagagtaagaagttacctgtctcaagatctagatgcgaattctaactctagctctggacacatagctatgagtaagtctcttgtatttcttgtctttgtataatatttctaagactagaaaagcaatgaagactggaaaagcaagagacttacccataatttttaatgtagagaaggagatgatgaagacagttatgttaaatgctctctgtgaacaaatttcagggtcactgaagtcggtagatgtgaagtctggttttgaatcttacatctgcaatttactgactgcaaataaaatgacaatctccctgaatctcattttcatcagttttaaaatcaaagtatttgtagcatttatgacacaagattgttttgaagattaattatatgagatcacatatataatgggcttagcccataatacctggcatatagtaaaatgttcaataaatgttagctattttaagacctttaagatgtgagagccaagaagcattctcttgagcggttcttgccagatggtttccttactctgggtttggctgtttcttgggaatgtgttcagtgaaaaaaaattcaacaaatcaattaacaaacatccaccaataccttctacatgcaacagaatgcttcaggcactgtgcatgatccaataagagtaagatgtcttctccctagaagagataatttaattaagaagataaagcaacacatgaaaacaaaactaaaaattcaaagtaataatggattctcaatgggtaatacatgctttgtttcctaaaggaacacactctttccagcccagattgttagggagagctccctaggggagggaaggtttaagttggcattatttccacctcctccacagtaataatacattgtattctcaattccaccaaaacaaaatcaaaataaagacaatgcaagctccttcttctggatgtcttctcttagtaaatagcatcatcacttacctagaattccaaggagaagggctccctaaaaccctctttccctcaactaccatgtctatttggtcatgaacatcttcagcacctagagctgaaaatactcaaatctgggtccttcttcccaaatcctctgtgccaattgaggtttcattgctactgggtctctgatactgtcttcttcagcgttccctttctttcacttccacatctccccactccatttgttcaggtgatgaccattgtggtgttttccccaaggaatgaaggccacaggacagtgactgttgtgcctgcctcctggcatctggaggatggatggttttattccagtcataccacagctgtgaattgtcctctgattatcatgctttttctaatctccattgtttctcacaccaggaaaacccttttctcctacttctccattaagaacacccaccatcctgtatcttaaagaacatgtagaaggtatcacatcctttagaattccattcagtgtctccacttccaggaagcctgtgccaataccttcctagtgtgaatcaggtactcctctgagctagtctagctccctgggctgagctcagtgattcctcctaattatgctgaaatcatctgtgtctatctgacttgttcacagatacagagcttcttcttcttttttttttttaaataaaaagaagacaaatcatgggtcatctatttctgtgtcttgtctcctgtgcacagcgtaacacagtcttaagaaatattggttgaaagtgagt

SEQ ID NO: 1880464 - DNA, 4001 bp, Homo sapiens
tgaattcatatgagatgtggtcatttaaaagtgtttggcaccgccccccactctgtctcttgcgtattcctgcttttactacacgacatacctactctgtcttcaccttctgccatgaatggaagcttcctgaggcctccctagatgccaagcagatctgagcaccaccatgcttcctgtaaagcctacagaactgtgagccaattaaacctcttttatttataaattacccagtttcctgtatttctttatagcaatgcaagaactgcctaatgcatatatggaaataagacctgcatcattttaaagcaatgttccaacattgcaattaaaagtgattcacaagatgttatgagctgaatgtttgtgccgacccccccaaatacatacgttgcaatctaaacccccaatataatagtattaggaggtgaggcctttaggctgtgattaggtcatgaggatggagctcatgaataaaattagtgcccttctaagaagaaacagaagaacgatgatttttctctcaaccatgcgagggcataatgagaggacacccatctgcaaaccaggagcagagccctcgccagacaccagatctgccagtagcttaatctaggatctccagcccattactgcttggttggaagtagtgatgaagtgtcttctgtgcattccttttaaattgatgcctcccatgtttctggtaaaatactaaaaaataattttgagtttttagaggacacaaagaattcaagctgggtgcagtggttgatgcctgtaatcacagcactttgggaggccgaggtgggtggatcacctcaggtcaggagttcaagaccagcctggccaacatggtgaaaccctgtctccactaaaaatacaaaaattagccaggtgtggtggtgcatgcctgtaatcccagctacttgggaggctgaggcaggagaatcccttgaacccaggaggtggaggttgcagtcaggcgagatcgcaccagtgcactctagcctgggtgacagagccagacttcatctcaaaaaaaaaaaaaaaaagaattcacattaaaaaggccagaactagataagacacctaggacacaaattttaaggagacactctttcttagtttcctgcaagtgttgaccttgtatttgtagtacctccttaaacgatttgccctgaatgcctctctgccttcaccttagtccctgttcagcttgtcccaatatgaaataaaacagacaatgggcactccaaattatggaaatatcaaaggagaaagggaaatatcagcttggggagttattaaaccttttggactaaatgtatgcatcttctaggggctttggagataatattttagaatctataatatagttaggttgcttatgagtaaaataaatggcctgagggggaaagttttttgtaattcaaaaagtgaactgccatcagctgatgattagttttaaccctcttgatgagaatgcattattcacttaagatattaaggtggtgaaagggagcaggcagagagccactcatattcagaacttttaatataaagctataaaatgatattaaaaaatgaaaaaaattcccttgaaagacataatgagaccagaattactcagtaaaaaattagataacttgaataatcttaattctactaagtaagtggaatttgtagtaaaaaccttccacaaaagaaaattcaaaacataaatatattcactagcaaattctacaaaaattctccttaacaatttatagtaattctacacaaattctttcaaaatatgagtaaaagaccacttcccaacttatttgatgaagctagcattaaactaacattgaaaccagaaaaagatatcagaagaaaaaaagatacatagcataaaatcacttacatatatgtgtgagatatatatatgactgatatatatatgatatatatatacatatgacagatatatataaacacaaatgtccttacagaatactaacaaattgaatccaccaaaatagaatgcatcatgatcaagtagagattagtctgagaatgcaaggctggttcaatatttaaaaataaaatcaatctgtacaattcatcatgaaaaaactaaaaagtgtaaaaaaaagaaattatattgatacatgaagaaacagtctttgataaaattcaaaatgcattcatgattctttcaaaagtcagcaaattagatatagaaataaacttcctcaaccaaatataagacatcatcaaaaaaatcatgctactactattaaacattatactagagatcttagcaagttcaataaacacaatacagaaaaaagacaagaaaactgaaaataaataaaacattattattattattattattattttttgagacaaggtctcgctcaggctggagtgcagtagcacaatctctacttgctgcagcctcggtttcctgggctcaagtaatcctcccacctcagccttccaagtagctgggactacaggtgcctgcaccaccatgcctagctaatttttgtattttctgtagggacacattttcgccatattgcccaggctggtctcaaactcctgagctcaagggatctgccgccttggcctcccaaagtgttggaattacaggcatgagacactgtgcccagccattttctttttctttttttttttttttttttttttgtagatgacatgaattggttacaaagagaatccaaaagaatctttaaacagaattaatactaagtttggaaaggcatgagagtacaatgccagtatagaaaaactaatggtatctaaatatgttagccacaaaaaatgaaaattgatttgaaaaatggtatcatttacaatagtacaataagcttgaggtagttacaaaactttaaaaatttatgcaaaatctgtatgctaaaattttgtttcaaatattgatgtaataaataatgtacaatctaattaaatggaaatatatactttgtcatagaatggaagattcgatgttgtcaactctctcaatttgtctatagattcaacacaattccaatcaatttatatagaaagacaaagtaactagaacccataatacaaattgaaaaagaaaaaacaaagttaggaggactcacattgatgcccagatttgatgtaaagctacaccactcaagactgacattacagaaagagtggacatctagatcaatggacatgaatagaatccacatatataatcatgcgtatatgcccagttgatttttatctaaggtgcaaaggcaattcagtggagatgggatagtctttacaaatgatgctggaacaatcagatttctatatgtaatacaagaaaccacaatcaatatcttgcactctacacaaaaattaactctataaggatcatagacctaaatacaaaactgaaaattacaaaatttctagttgagaacataggaggaaatcttatgatttgaacttagattaaattcaaaaaaatcatctattaaagaaaaaatgataaattgaatctcatcaaaagaaagaacatctactctttaaaatatagtattgaaagaaagataaggcagctatacattggaaaaatatttttaaatcacacattttgcgaaagacttgcatccacaatatacaaagaatattcaagggatggtttaacatccgcaaatcaataaatgtgatacaccatgtaaatggaattaaaaacaaaaatcacataatcatctcaatagacacagaaaaagcatttgacaaaatccagcatcactttatgattaaaagcctcagcaaaattggcatacaaggaacatacctcaatgtagaaaagccatccatgataaatacacagccaacacaatactgaccagggaaagttgaaagcattccctctgagaactggaacaatacagggatacccactctcaccacttctattcaacatagtactggaagtcctagccagagcaatcagacaa

SEQ ID NO: 1880465 - DNA, 4001 bp, Homo sapiens
atacttctaaaaatggtggtcaatccatcagataagtcaaatatttacccagtgatatttttagcatattatttgcttagaaaaatgcttctttcctaagaaaaagggacacttcttactctggctgtgttataattttgagagatatcgtgaaatatctcatctctttatgtaatagtccttttacgtgacattttctttgtaaagatggaattatgaaaaggtaaaaatcaccataaaaatagtcatttgtgcctctaatcagatgtgactcttaagattctgaacattatgtatccaacaatgtttatggttaacaaacaaactacatatcttgcttataaataagtatatagacagacacacacaaaaatgagtgaatattggctctaaaaagataaccaatgatcctaattatgatatacattcagtggcttaaaaaacagtagacctatttccattttactaaattaggttttcaagaggtgcattattaaaggctatattttctatttggtagcctaaaatttctctaaatagttggttactgttaatggcgcaaacatctgttttcagaagtaactattattcctgtaagaagcatgcgtactctcaaacatgttcccatatttttttttaaatgctatacttatttaaaaattttcccttagggagcaaaaataaagtatacagattatcatttttttcattcctcactcgactacgtctaacaacattaagtatgtggggtgagtccatgctacaaaatagcaatctagttaatctcttgtgaaaattgcctggcctctcctacatgacaggggggattcagctgtagcacccgcctgtgccgccttcagtgcctgctttagcaatcccaatctttgctttatcttctccaacaaacggctcatgttgccttgaacagaaattatatttcttgttcgaaagagcagattttaacttttatttcctctaaaaagatcgcagcgctatgagaataaaatctattatttttcactcctactatattcagatcattctcattttaaagctaagcatgatttttgctatagcgtaaagatagcaaatcaatatggaatttgccaaagattttcaaatgcattctctttccgaggcccaaatggtaggtgccctcacactttgcaagcaaataatgaagctgagctgaaatatttcaatccttttctctagagtgtggatttgtcctgcagttgtggggaggtgggtgtaggttcaccttgtgctccaccccaccctccctccggtggtgttcccaatagctgaaaaacgtgtgagctgtaagagaaaaacaagacctagtgctcgccgtgcgggagtgaagatgagttttcacacactgccttggattttatacatctccagactttaagtcacccagtatgaatgactgtaaattcttttggttcctatggccctggaaagaataaattgccagcattatcaagatttaagttggtctgaatattccaagtattcgatgcagtgtttttctttaggatgagtcggggaagtgggggacgggggcgggaatggcttatcgcaatggcggtaattttttcaaatcatgatctgtgtaaaacacggtattattttatgatattagaatcctcagagaagatccaatacttaagaaatgtagtattaattgcaggagggcacctgaaaggaagcagattcggataattttcccagtcctacacggctgatttctctggtgaagggatccgggcagtgtcttaggaactgctcaaagttcccagatacccagtgctggggggtgtggagaaggcgagggtggcgacagaccatacctatgaagcggtgattttctttaattgcccccagaatatccgtagaggtagtagggactcaataaagaaacacaaaggagacgaacacggcacgatcgccggggtccgcggctgctctgcgaggcccagcgcgccccaggtcgcggctccccggccgccagcgcacctttccatctccagggaaaatatttagacgggaaactcgagtgcaccttattttctctttggtttatgagtgacccagaaggcttctagctcacaatcgcacgatttcaggacgaggctgccggagaagcgctggcgaccgaggatgggggaaggacaaagaggaagaggaggcctgggaaggagaaaggagcggcggaggggcggggagaggacggggcggggagaggaggggcggggagcagagggagaagggaaggagggcgccgggcccctcgcagggacgccgggcggggcgcgggcttgctggagcctgcgggacccagagcccgctccggagccagccctgggagtggccagcttgaacccgagggccccgcagaccgttactccggcccccgcccggggcggggcgcgcgggggcgcggcgcagcccaacccgcacagccgcgtccccaaacaccaccgaggagggaaaacagacggagaaaaaggacaaaacagaaaaatgcaaaacgggggagggagctcaccgcctctcgagctttaaattgatttctttgccttacaaaaagggagaaagggaaaaggagagcagagcccacgtgccgggaaggttgctgtcttcaagcgccaccttccgtcggccagggccgccgcggggctaccgggcgggctcggggcggcgacccgggggagcggccgagccccgcgaggggctcgccggggagcagctgcgcccaccccggggcaggccgggcgcggctgaccgcgagccgggcggaggccgccgtctcaggctgggcgcgtgcccgagtgtgtgcacccggggagtgagcgcgcgccgtccgctgtcgccgtcgggcctcccggggactgggcacaaaggcgcgcggggcctctcccgggacccggtcctcggttagcgccggcgcccgaaccatcccggttcgccccgggccgcccgctccccgtggtgccgcgcgccgcttccgagcatcccgggaacaggcgcatctgtgcacacacgcggattttttaaaaataacatatttctagacatgcctcctctccccccacccccatctttgcaaagcagcccggagggcggggtggaggggcggggcctccgagttaataaaggaagatgggcggagccggcccccagccattggctagctgggggagtgatgtcacccatatgacaccctgataactagttgagagagagacctcaactttttgcagaaggagcgcgcgcgcctgggagagctcggggtccggcgcttgcggtaggagccacgagccggagagaggggtcccgggctgcctcgaccgccgtcgccaccgcctctcctgtcgcgaccgcagctcccaccgcgccggcggccgtcgtcgccgaagccaccacagccgctgtgtgcagcctggaagggggggcgggggggagggggggagccgcgaaagcggggtgccgaggactttgcaacttgcccaggaaggtggaggggtgggagggggagggggacctccgcacgagacccagcggcccgggttggagcgtccagccctgcagcggatcatggtgcagcaggcggagagcttggaagcggagagcaacctgccccgggaggcgctggacacggaggagggcgaattcatggcttgcagcccggtggccctggacgagagcgacccagactggtgcaagacggcgtcgggccacatcaagcggccgatgaacgcgttcatggtatggtccaagatcgaacgcaggaagatcatggagcagtctccggacatgcacaacgccgagatctccaagaggctgggcaagcgctggaaaatgctgaaggacagcgagaagatcccgttcatccgggaggcggagcggctgcggctcaagcacatggccgactaccccgactacaagtaccggccccggaaaaagcccaaaatggacccctcggccaagcccag

SEQ ID NO: 1880466 - DNA, 4001 bp, Homo sapiens
acactgcagaaatctgagcaacacagaaacaggttctgacttctgcccagagaacctacactccagaatgtctttatttggctgtatgtgtaaattgaacccatcattgagagtctaaatgttttaaaagaaagtaagatgggaaaaggaaaattacttgattcttcagtgcaattattttaaatttagtaattcccattcaggcaaacattctgcatgcccaggtgaaagatgtgtgtgtctgtccgatccctcacttgttcatctttctatacgaaaccggacatttgtatgtactcatgatgaacaaaatacaagttttacagtagtttaatataaggaagctttgacaaaaataattatgttgatgctggcattatttatactttccttcttccctgtcccccgacaattgtctaaatggtgaaagctaaaagtaaggagatttagaaaatacaaaaaccattagagataatgacacaaacaagcgagaaagagagaaaaatgtcacatcaaatcttttcacctaaaatcaagacaagtaacatttagacaaatatcttatttttaattatatatgagcaaatatgtgtgtcataaagtgctatatacattgctgtattaacattgtattatagttattttccacaccattaagtattttttaatcgacaacattttaggcaattgcactattcgtttatatggatataccattgttactttatcgagacatatgggtcacagcttgtgggggtttcctgtttgggctggtaagcttcttatgtctaagtacttgcacaagaatcatgactttaacaaatagacttactgaagctaaaatcaggaggttttaaaaattcctgctaattattaacaaatgagagtcagaggaagatgcagtaatacatatccagtagaaacagctatagcccaaatgcttgcgggccgtcatcactaccatctcactcaattaaaactaaagaagaaaacctgtaactttgcatcagttagtactgatgtaatcctagcattggtacatcttttatgcttattacaaaatactatgaacttgcttattagtcatctatgaatatcattttgtcattgtattgtattttattgatcttatctttacattcattgtatgttatttataattttgatctatttaccaattaatttatcagtcacagttgcagcaatacattcgagtgttcatttagaaatctaaatgtctcctttgctgctactataacatgatatcatctcttgattttaggcttagaaaatctcaccctgctcacacacatttaaaagaaaaacatgaaatattgcgcgcacacacatttcaaaagcacaatattaaaacaagcgtcctatgtgctctacacagctgaggaaacggaatcatattagtagtatcgaccaatcacatccatcattctgctccaacagctaaaccattataatcaattttctgcttaggattctcttaatattagcttcggttgtaaaatatatgcataattctctagacaatatgttggtttattttgctcatttaaaacatttatgtatatgaatcctcttcagtttttcatgcctttgttttccaaatatgatacattttagtttcacttatgtttatgtatatggttgtggtttttacattttcattgctatatacgtcattttacatatgtatagcgcagtttaattatatattctaatgttgaggaatactttattcttttcaatatgtttctattataaaacatgttgctataaacactgtatcaaccaggagagaaacattgccagtagtgtgaacatttcatgtgaagaattgttaactagtaagacctactcttaactactataaggaatgaaagagcgtgctaaggagtacaaaagtagcaaacacagaaagcagcaactacctcagaggacgaggaacaaggaagaaccaggctgagacccccgcctctttggagaaggctttactgcgcaggagcagtacctgctgggagaagggacttgctggaagacgtgggtagagccggtccattggtccagtgcaccaagaagtcaagaagttttcaggggctcaggatgcagctggcccatcagagtcacagagattaatgctactgagcctcttgcacaccaacttgctggctgccatgctacaagcagcacaaaagcaccaaaaaaagggagcacctctcccctgcgactgttttacagtgccccacctagctctgtctagagacagagcctcactttgagacagcagctagagaactgttcacagggcccatctccatatcacaaagcagggtcaagaatggcggtctcagagctgggtggcaataactcataacagacgcaaatctcttcatgttaatctagtgctcctaaacaggaggttccaggacacatgcctgggagaagaggtacttggtcaaagcatgtgtgcatgtcatcatttttaagaaatgctaaattactgtccaaaattattttaccattttatattaccatatgtgaaatgctaaatcactgtggctttaattttcatgtttatgatgactaaggtcccgtttattttcatgtttttatggacatttctattttcccttctgtacaatgatggcttatgttttttgctcattttcctaatgtgtgtgtgtgtgtgcacgcgtgtgcacgtttgtcctttttaattggttttatcagttttttatgtaacatgtttatatattatgaactcttttgggttatatgttttgcaaatatcttctcccagtggttaatgtcttcatggtgccttttgtttaatataatttattaattttatgtaaaccaagttaacaatatttgttttccttttagtttgggcatcacagacttgtttatgaactcctttatttgggaaactaaatattctgccactttttcctaccattttttaaatttttgactttgcattcaaatctgtaatccatgtgggtttaatttttttgggagataggtacatagaataagtatatattttactttacaaaataaatatgaattagttgctctagcaccatttattgaagacggttttgtactggcttatgtacaataaaactagttttttcataaatacaggtttttattattttagggccatttattctgtttctttctgttctgatctatttatatcagtcagtaccagcctataccatcctaaatattgtagatttatattaactaataatgtcaggaagaatgattctctccatctgctcctttctcaacaatatactggcaatttttgaaattctatataatttgagaatgtacttgtcaaattccatgaaaaactgaattcttgaaacaaggtttgggaagagttgaagtttttacaaggagtccttcaatccatgaatctaatacatttctacattgatttgagtcttacttaattactttgaataaaggctcattttttttccaaaaggtttgaatctactggtggcatccttctgcttgtgcatgctttcgtattttaacagtggtattttctaaatgctgtagtccatgtgtggaaacgcagctgatttttcatgaggatttcataactagtctgattgtggtgtaaaagctaaaaccagggccatctggggaaaccaggagggcctcccctggcctgaccgcaagtccctcgcctcagtttgcttcagtggttccgccccctactcaagccactcttctcacaaatagggtcaggtttgcgccctgcttgcccctgtatagagggcttcagctctctgccagcctgcagaattattcaaaaaaatccagtcatgacatcccatgggaaccagggcaccacgccctcttattactgtaaagcggcctcccatggccctgctgctcctgctgtttccacgtgcagcccctgtggcttcacatagcgtgaggtcttccactcctgggctgtc

SEQ ID NO: 1880467 - DNA, 4001 bp, Homo sapiens
gttttttttttcctgaatattttccatctatggtgattgaattgcaggtgtggaagctgcagataggaagatcaaccttaacactgtttggcactcacatctgcgggaggccgagcagagacccagagcccaggtctcacagccaggccgtccagagggagccctgtttccatcatcgagcagctgtgtgaccctgagcaagttccttaacttggctttgctttacatttcttcgccagtcaaataaagataataatatctctcttactgggtggttgtgaggattatataagttaatagatgaaaagccctaaaaagaaggcctgcacatattaagttctatagaagaatgtattaaagaaaacaactaagttgggttagaaaaattagttaattgggaggacaataaatcggctccattcatgctcgcactacacaccctgatggaataccaggttcagctacaaaatagaattactaaataataatagagagcagataaaacacgtgatcttgcagcagtgacgtgttttgaatatgacggggtgtggggagattcggggatggggaaacacaaagctctgggaaatcaagaaaagcagcaattcctagagtcagttgccctcgtaacacagccaggagagctcagtctatgtttaagctaaatatgatagagtgtaacatctatacaaatgtaaggggaaaatcaacaggtctgggtaaaaataatttctggaataagataaggtattcctgcattctcagtctttagtctatgaaaaccgtcagaaaataaaaacgggaaaactaaaatgcctcccaagaatgccatccttttttttttaacattaaaaacattctctaaggaatagagtttcctcattactgctgtgaaatccacatgaatactaaagaatgtatgttttctccaaaaagagtgtgtgcctgaacataagattaccacgcacgctgcgatgagctgggaacaccatctcatctctgcacagagccgccgtttcaaagacgcaagagctgggaatctcagcaaatcaaattgcacaacatgaagcgctgtctctatcgcgcggttagcttactgctatcatttgtgggaaatacgaggcgctaaaattctgacaccacattccttgcagagccttgcaacgggaagaagaaatggcacggcgtgaacccagtctctcaaatgagtcggccaaaccttgacaattgatctagcgccactgcagtttatcccacaaaagccttaccctaagtccagcggatccccacgcaatctgagagtgccaggcaggccccattattccaggaccacaaagggagcccgtgcccttggcgaggactccagggctctaaagatgactggatagcagcagctgtcacaaagcctgttcctaggcataacagaaattggaaaagtttgtttccagtgcctctgcacactccccaccccacccttcaacaccgccttccatcgttcccctccacccccttgcgtgcagcagtttttgctgtacctaaaaggacttgttttgcaagtgaagacttgccgccaggagaaggacgctgccatgacaggcgctttacacacgtgttctaatcacagctatcctgaaagacaaactatgttcgcatcctcattttacagagaaagacatgaaacctctatgagtgaagaatttgccaaaaggggccctgcctcagccccctgggccctgccatactccaggagagacggtcagcaccctgggtcctgggcagccatggagggaggccacacaccttccgaggcatccagtgccaccacagacacagcgccttctcctctgcccagacctgccccctgcttggggcttttggaccctctccccacatccagtgtgcctactgtgttctctcctcgggaggaccctgttgtctgctaaggtcacaatgacacccagtgtggaggcaacgtgggtggctggtgactctttcctcatgccacacgctcagcacgcttccagggagcccttgatgggtgggcccagcgctgttcccacggcaccaagagagacaaggtctccaccaatacagcgtgagcagggagggggcagacgaggaaggacagttctgtgtcccagcatcagtgactgggttttagataagtaggtctaggtctcctctggcctcttccaccctcttatgtatagatccataccaaattgtttaaatgccctgactcttcatctgtaaaatagggcaatgaccgcccacactgctcctgctgcctcttctcaacaagggggttgtgcagatccgagagggaagccgcacacaggaaggttgttgagatgggagagggagaccgcgcagcttacaggtagatgctgcttctgaagctgctggcggattggggtgcgcgtcacaaggtggagtttgcttttagaacccaaatgacaaagatctctgagttataagcacctctcacctcaaccagcagcagcagagggggctgagtggtcatcacagggtctcctaggaacacagagacgacctggcctggccctgtccacttactgccggtgagaccctggccatgtcacttaatgtctggcaaactcacttttctcacctgtaaaatgggttcctagccctgcctcgcctgcttgctgggtggtgaggatcacagcctggactgggagatgggtggggcgtgcatgaataggcagagaggaaatgaaaggctgctccagcttgcccaagggccagagacggtccatgcttggtgtgctggagttggggctgagagagagacagtgttattttcctggagataggacttcttatttcgctggagtacccagctttggacaggaaatcacttgttcattgttatcagcctgggagaggaaataagggcccacatctctgcactgcttgccctggaatgtgatttattggaaacactggataactcatagatgataaaaacaactgaaatgaggccctggaagctgctctggcctgagctcagcgcagccctgaggcagcagccgggcagggaagcctgagagctgctggggccgcagggactcggccacgtccagccacacaaaacaaaccaaacgtttcgggcgatcctggggcagcatcctttcctcatcctgcctgggccaggagcctggggctacgaagtcgtaaagacttacccagtgcattctgtccagaatcaggggcccctctcaagagaaaatacagcatcacaaaagtccacacggaggcacattggcggctgtcatgctttgttgatccccgtgacagatgctgaaacaccagctagtaaaatggacactttggggctgacatctgctgctgtgcctgtaatgagcacttcctgtatgcaggcagctgggtgccaggcacaggaaatctacacaggccacagaataatttgatttgggctttctacggagtgcgcgccgtctctgagctttcgtgatttcatcttccggaaggcgaaaatcatccctctgctgaattgggttttgatttgctggtgttcacctgacaggacgcatctcccgcgaagaagcagtgtttgactccgtgctgcagggttgttttgtctccgaaatgcaaaccagctacttttttaatcccatggagaccgtccagacaccagacattactatatccctggaattattccctgggcagccgcaaatgaagctgggaagaactgcagtggagggtggaggacggagggtggagggtggagggtggagggtgggaggtgggtgactgggagcatttcctgtggtggaggagctgatcacacgtacaggaagggaacacctggagccctggctggcaaccctgtccagactgcactcagcatccacagcagcacgcacagggcagcaggagtgcttcctcagtgcagagagcaccagagctgccccaccttctcctagccatctgcaactactggcccccaagga

SEQ ID NO: 1880468 - DNA, 4001 bp, Homo sapiens
caacatcatgatctcctggaaagagaggtgagcaaatgcccagttctgccctgctgttcctcagcacctggcaccatgccggacactagctaccttctgtgagcatcacttatactgtccattttcttttggtcatgtgcaccctcatcactgctctgctagactcttcttacatttaccatttcatcttatattttagttaattctcattgcatttgaaatcttcccaacagactagatccataagtacgttaagaatgtggaatgtgtctgccttctatactaccatctactcaattgccgtggaccatgcctatctcataagcagatgctgaataaatgaataaatgaatgggcattggggaaccatatcctgaacttcccaactgaagcacttctcctggattcctagtgggcagctttgtacatagaagttgctccacacatgagttcatgtccttcatccttggcagcaagcagtaactacttatccatggatcagggtagggagaacaagaacctcagggataacaccactgaacctgcagcttcatttcagcctgcagagaaaatacaactgtggctattgagccaggcaggtcaagccttcctgggtcatctaaaatgactgcatgcttgctcttcagtcctttccttgcacctgcatttctgaggtgcctttgccctctggcttccaggtagctgtggctgattggaggaactggtaaatcactggagggccaccagaaggaggggagaagccggccattcctccttctccagtccctctacttcctgccttcttgggcagcagttgactcctgtgtggccgcagctcccttgggggcagcccccaccatcattctagtacctgctagatgtacagtactaaatttttaaaataaaatacaggccaccagttaaatgtgaattgcagataaactggatactttttttttggagatggagtctcactctgtcgcccaggctggagtgcagtagagcgatctcggctcactgcaacctctgcttcccagattcaagcgattctcctgtctcagcctccctagtagctgggacaacaggcgtgtgccatcacacctggctaattttttgtatttttagtagagacagggtttcacaatgttggccaggctagtctcgaactcctaacctcaggagatccacccgcctctgcctcccaaagtgctgggattacaggcgtgagtcaccgtgcctggtccaactggatacatttttatattacatttttgattatgataaagtacacataacataaatcttaccattttaacctttttaaagtatacaattctgtggcatttaatgcactctatactgacttaaaatactagcaattatttgttatttatttgaaattcagatttaactagtgttaaatacaataactgttattgttaatacaattgtagtagggaattgtattgtattgtaatagggtgaccgttgctcctgggctctgaaaaagcacctcttgttgtcacccctccagtccaaggaggtttttctagcacctctgtaaccaattaccttcattaaagtctctgaataagacttagcgaactccctccctcctgcttccctggctggaccttgactgtacaaacaatgagaagtacccaccctccaatcaccaagagtccagatatcacaataaggtcccggagtgagctcccatgtgcttccctcccgcccagcctgctccatcatcaacccccttcctcatcagctctcaatcctccccaactccagaaagcaggccaggtgtctctgtaattctcaggtgcacccccaccccctgcctggggtgattggttccatgtgtctgtctgcggggccacccggccccctcctggccccccttacccgccttccgcccacctgccttccttcctcacagcttcgctctcgcctcgctgagcccttcctgtcgcacgtctgacacgtcccctgcgtctgcgggctctcctgctccctccctgccctctttcagacaagacaaagaaaagaaaagggtggctcttgttgcattcactacttttattaatgaatgcaagaacaaaatcagctggccctgcagacgtcctgctgaactggggtgctgtaaaaggagatggaatcctagcattttggttttgaaagggacttgaggggcgaattaatctcattcctgtacaatacggggtgcctctcccaaaatcacgaaaaccagaaacgcggcaggagagtcatgaacccatggaggtgaacagttcagctgctggaatatagacaagtggttcccaaaagtactttacatcctgagagcctgagtgtgtagtgagatggattggcacagcgctacgccaggtgcgtgtggcctgtgctgctggggcagtgtgtgttgctgcaccacaacgtgatagcgatagagacggagaacactcagaaacttcgggaactatttgacatctctgcaccttccaacgcctaatcgttttgctagtcattcactttatgattgtattaagtgtcagtctgtgatgaactaaggtgcaaaaacgggtgctttgccagaggtgatttgaaaagcactctttcggagccacactcaggagttgggtccagttttggaaagaggataaatgtctggaggcaagtgacttaacctctatggatctgagtttctcctctgtaatatggggacaatcttgactcctacctcatgggactgttgcaagaattctacaagtacatgacataagcaccgtggggcaccaggcacacagtggggagggtgtgtgattatttgtagacgcttcttgacttgagttgaccaaaccaccaagatcattgtccactgactctctttctgggaatctctgaggacgtagcttctattcccactctttgatggctgttataataattactgatcttaaagttcgcttctttccatggtgacatttccatcccatcctctgtcttgactcacgggacctacaagatgaaacctgggatctctgcattggacccgagcactgggtccaccctgaggcccccttggagctgatgagggaagccaagggcagttatgggggtctgaagagaaggtgttaagccatgagagggaaaggccacaaaaccagaatcacaaaataggcactaaaatcgggactccacaagggcagcagaaggcagaccattagaaagaaatgtgggacagtggggcgtcattgtgttactgtaaaggagtcccaatccagacctcaacagagggttcttggatctcatgcaagaaagaattcagggtgagtccatagagtaaaatgaaagcaagtttattagagaagtaagaaacaaaagaatggctactccataggcagagtagccgcaagggctgctggttggctatttttatgattatttcttgatcatatgctaaacaaggggtggattgtttatgagttttctgggaaaggtgggcaattcctgaaactgaggattcctcccctttttagaccaaatagagtaacttccacatataatgagcagtgaggacaaccataggtcactttccttgccatcttggattcagtgggttttggctggcttctttacagcatcctgttttatcagtggggtctttataacctgtatcttgtgataccagtcctgtcaacctcctatctcatcctgtgactaagaatgcctaacctcttgagacctctcagtaggtctcagcattattttacccagcccccactcaagatggagtcactcttgttcgaatgcctctgacaattgcagcaagcttttggcttattcatagcatccttttttaaaaaaaaaaatatgtttatttattgatttttttgagatggaatcttgctctgtcacccaggctggagcacagtggcgcaatctcggctcactgcaacctccacctcccgggttcaaacgattctcctgcctcagcc

SEQ ID NO: 1880469 - DNA, 4001 bp, Homo sapiens
tatttatttatttatttttttgagatggagtctcactcagtcacccaggctggagtgcagtggcacgatctcagcccaccacaacctccatctcctgggtttaaccaattctcctgcctcagcctcccgagtagctgggactacagacgcatgccaccatgcccagcaattttttgtatttttattagagacagggtttcaccatattggccaggctggtctagaactcctggcctcaggtgacccacccacctcagcctcccaaagtgctgggattacaggtgtgagccactgcacccagccaaatatcctcatttcatagaacaggatggcaggcccagaaggtcaggtgaacaacccagatgatgggcaatggcaaatgttccctcttgtccacaccagtgctcttacccacccagggcagtgggaggcctatgagatctctgacattgttttcaaacatgtttggaatcacaggcaagtaaagactactgctgtccaagaagaaaataaagatcacctgtaattttcccatcccagaaataacttctgtgaatgctgtggaatatatctgcctctgtgcttgcctctccccctcccttctaattctatgctcaacactagagaaaacagttttcaagcacatatataagggttatgacattgtccgtataccaggcctcaaaggattacttgataaattccaaagaatcaatgtcatacagatcatgttctcagaccagaatgccaaaaaattagaaatgaataacagagggatagtttatacaaacatattactggaaactaaataatatattttaaaaggtaaaaaaaaaaaaaaagtatagcaaattgctagttgcttagagtatcaatgaaatggcaatgtatcaaaatgtgtaggacttacagcagtagatagaaattataacttcaaacacaagtaaaactgtaaattcaagaagttggaataagatcaacagagccaagaaacaagaaggaaaaataagtaaagaaaggcaaaaatcaataaaatggagaaggaaaaaacagaaagaaatgaccaaatcaaaagctaattatttgaaaagattagtgaaataaaattctggcaagactgatcgagaaaaagagtgagaaaggccaggaacggtggctcacgcctgtaatcccagcactttgggaggctgaggcgggcggatcacaaggtcgggagttcaagaccagcctggccaatatggtgaaaccccatttctactaaaaatacaaaaattagctgggcgtggttgtgcgcacctgtaatcccagctactcaggaggctgagccaggagaatcgcttgaacctgggaggcggaggttgcagtgagccgagatcacactattgcactccagcctggagcaatagagtgagactccgtctcaaaaaaaaaaaaaagaaaaaagaaaaaaagaaaaagagtgagaaaatgaaattgcaatagataaaacctacaatgaaaaagggggaaaaacaattacaggcacaacaaagatgaaagaataatgtaattgcagtaacccttctgaagtaacgttgtcaaaatatcaaacctaaacctgatcatggatttgagatgggatagttcctttgacccccttcatgggcaggaactggagtggctcgtttcactcagcccgtcactggccactcctcgcatgggggagcgtaagagcaagcgggtgcaggaacccaagcaaacgaaccccagaacccgccggtcgctcctctctggagggagcaggctctatgcatgctacacagcagtgtccatgcatgtttcaaccagcgctctttcagctctgccgtccaggtacggccaagtgccaaccagctcagtggagagtcagggtggtagcccctgccctcttggcacctgagttctcgtttggcgtccaggaagaatcagctcacacgaaccgtttgaaaggtgatgaatgcggaagacttcattgagcggtgggtggctctcagcggaaagggaggctggaaagcagatgggaacgtgagctttctctgaagcccggcagtctccggccaggtccctctctgaagccgcaccgtctgaagttagccgcatctatccattgtctctgacactcagctgcgtgtatcctcgccgctcagccgcttctattgcgctgccagctgaagtcttttatgggcacaggataggggcggggcaggccaaaaaggcaacatttgcttggaaaaccaggatcacctgttttcacttagggcggtggttcctggcttaggggtggggtttagctgggagcccagcccttctgtatcagattgagatttaactaccaatttacaggaatacagaggacaagggaacgtgtcaaactagagatgcaatcataggaaactctgggaggaaaacagaaagctgaaaagaaacagaggttatgagaaattaaaaggcaggtctgccaagtgcaatgtgtaaactttggattctgattcaaatgacaaagttatctcccccgccaaaaaaaaaaaaaaagacatttgtgagaaaattggaagtttaaacactaatggggagtttcttgatgttgataaattattatctggggaggaggtaatgacactgtgaacaggttgaaaaagagtctttgtcttttgaagatttttaccggagcatttgcaggtgtcattatacaatgtcagagatttacttcaaagaattgtgaggggatgtgggcggggctctagatgaaacaacattggccatgaattgataactgctgaagcaccagaggtttatcaatccacttttgaatgtattcgaaattttctaaaaaaaaaaaaagtttttagagtattatgaacaactgtatccaaataatgtgaaactttagatattatagacaactttgtggggaaatactaaatgccaagatatagtatacttgaatagactaacaagcattaaagaaattgaaacgctaatcatagctcctctccctaaagcccagatagctttacaaatatgctctacctgtcttcaagagacagatttttttatctcacaaattgttgcagcaagtgaaaaagagaaaattgtccagccttttttatgaagctaatgtaatcttgattcaaaactagattgggccaatacaaaaaaaaaaaaaaattacatgctcattgtatttctgaataagtgatatggtttggctgtgtccccacccaaatctcaaattgaattgtatctcccagaattcccacgtgttgtgggagggacccagggagaggcaattaaatcatgggggttggtctttcctgtgctattctcatgatagtgaataagtctcacgagatctgatgggcttatcagaggtttctgcttttgcttcttcctctttttttttttttttttttttagacagagtcttgctttgtcacccaggctggagtgcagtcgctcaatcttggctcactgcaacctccgcctcccaggttcaagcaattctcctgcctcagcctcctgagtaactaggattacaagcacccgccatcacatctggctaatttttgtatttttagtagagacaatttcaccatgttggccaggctggtcttgaactcctgacctcatgatctactcgtcttggcctcccaaagtgttgggattacaggcgtgagccaccatgcccagccactttttcctcattttttcttgccatgtaagaagtgccttttgcctcctgccatgattctgaggcctccccagccatgtgaaactgtaagtctaactaaacctctttttcttcccagtgggtaagaaataccaggagtggggtattgctgaaaagatacctgaaaatgtggaagtgactttggaaccgggtaacaggcagagattggaacagtttgaagggctcagaagaagacaaggaaaagtggaaaagtttggaacttcctagagacgtgttgaatggctttgcccaa

SEQ ID NO: 1880470 - DNA, 4001 bp, Homo sapiens
ctgttgtgtgtggtgtatgtgtatgttgtgtgtgtgtgtgactgtgagtgtgcatgttgtgtggtgtgtgcatgtgtgtggtgcatgtgagtgtgtgtgtgacttgtgtgtggtgtatgtgtgtgttgtgtgtgcgtgtgtgactgtgagtgtgcgtgttgtgtgtggtgcgtgtgtgtgtgtgtgattcatgtgagtgtgtgttgtgtatgtgtgttgtgtgtgaccgtgtccgtgccacacagagtgaaatctcaagctacgtttttcttttttggataaacatttaaaccaggggaagaggcgtggggccccgctgcatctatcccgaggctgcgtccacagctccagtggcccctgctggtctgactgtgacggctgcccggcagtgccgagcctcggctcaggagtgctttggccagagctgtgtagacaaaatgtcaataagttggccccacttctgtatgtgtgtgttgtgtgcatgtgtatgtgtgtgttgtgtgtatgactgtgtgtgagtgtgtgtgttgtgtgtgtgatgtgtgcatgtgtatgcctatgtgcttggaaccttaatcctcaagtccaaatgctgatggcatttggaggtggggcctctgggaggtgattagggttagatgaggtcatcagggcgggccccgacggggctggcagctttgtaggaagaggaagagagacggcagggcaacacccctaccctttgccatgtgatgccctcggctaagtcatggtgcagaggggaggccctcatctgatgcacccccaaccatggaattccagcctccagaattgtcagatataatttttttctttataaattgtccaatctcaggtattcagttattgcaacagaaagcagacactgatgagggctttggagcaatgcagagctggtcccagaggcaagatggagggagcttgtgcagctctgggcgtccctgtgggcacctctgggccaagtccagcttcaccttcaccctcctgatttcccacagcaggcaggagggtggtggagcccacactgtggggcaggagagtctctcagactcctgggaaggagcaaggtgcccaaacgaggacagacagaggctgcttatctccagctggagtaagagcgaaagagctggccactgtcacttacatttttgcagcgactcaggcaggctgggtgtgggagcttcccaggggaagagaaggcacccggtgtgggcgtgggagctttccagggcaagggaaggtacccggtgagccccagtggaggctgctggcctggaagctggggcggcaactagaatcggggcatcccgtgtgcgtttaaggggagcacatttgtctttcttggtttgtcctcagtgggatgtcagggcaggagttggggcagctgtgagttattaaccaggtcttgggcatctgggactgactcttatgggttgcttgattcctagattggggctagagataggggcctgacttcccacaggcgtaacttactgagggcaggccagcatccatcctggctgctgcaggtgacgggttggcttcctgggctggctgctgcaggttgtgggccatagttccatttgtacagatggtcatgccattgtctctttgtatatccagcctctcagaccacattctggctccagcccttcctgctgtgggaccttggacacatcccctgactgtcctgtgcccgtcttctcagtggtgaagggagcagtgaccatgcacatcactgaggacagccatggggatgaaacacggcaggccaaggcacagcaaggtgtactgaagtagttcagaaaagcccagctctccctccacgggccttcactccgtgctaccttggctggaatgtggccaacctttgtgttgaggctagggcttcttctccaaacacatggaattcatctttgaatcacacgttaggcagctccaagcatcccctccaaggtggtctgctgacagtctcttctgctgtctgctgactggactctgggatgcttgtgaggcagttgtggggtggagcaagtaacaaaggctttggaatcagaagattggagttagaatcttaggtcagtaattcgctgcctcggtaacctccatcagattccgcccccctgaggacgagtctcttcatctttatgaaggggatgtggtattggcacccctggcttggatggagcatgaggcagctacacggtgctgggtgtggtgtccatctctccctctatcgtgatctgctctctctctctctctctttttttttttattttctttcccttttttgtgaaagttactccatcccagatagctttgcgaatgacctgtgtttcccagcattctgcacttgataaaactagttcggattgcttttctttagaagctattttataaagaagtttgctagatatctatctagatggacacagatgtattgatatcatatattatttcttcttttggaaaggagtcaaagagcctcctgtcatcttgcaggtaggtgggcagcccgagatctaaacttcccatgggaaatctccacatgtaagccccactcagaatcccggggcggcaagggcaggttaggacttaccacggtgttccaagctccatggccgtaggtgggttgctcttagtcactgggggacagaagcatggatggtaagagctgcttgtcttaaatctatcgactgaaattataatcaaggatgggttgatcactactgggtgttttggatctacttttgcaaagttggagtctaagagagtccccagaagccaccaggacgacatatggtctctgcaaatgatgaagcatttcatgaaccatcacaacgaagaagacccaagtcacagcatgccaggatgaacccagcaaacaccacacagtttcactcaccacacagaaccagaagttgactgctgacggccctctgagaggctgccatagtttgttaaatatttttcaatcaggaaacacactctgagctcccttctgcagctgggtaggtgctgagctccagaggttaaaagacaaatatgtgttcacattctggaggttatagcatgctcacaattaaatggatttcatttcagaatattacttgtcccggattgcacacggcatgtgtgtattacgtagatggatagacagattaacatttatggaaacaaatcattgtctgcattatcagattgtagtaaattcttataattttgtgtggcctcagcatctattttgaataccagtttaactttcgcagaccagaagtaagtctcggtcattcttgacacagtttctagttgtacaccacaccaaagtggctcaagctggtggctcaagattcagaatttagaggcatttctcacccagcaagtagagcttctgctttcctgcccaggcttcctttttagacaaagtctcaccctgtcatccaggctggagtgcagggatgagatcttggctcactgtaacctccgtttcccaggctcaagtgattcttccacctcagactacccagtagctgggactacaggtacgcaccaccacacccagctttttttaaaaattgtatttcttttgtagagatggggctttgccatattgcccaggctggtctcaatcttctggactcaagtgatctgacctcctcaggctcccaaagtgctgggactacaggtgtgagccactgcgcccaacccagtcttcctttaaatggaccattcaggcctttgcccaagaacttaaaagtatgtaaatcattcccacacgctattcccttacacacacacacccacacccacacccacccacatatatatgtaaacatactgctggttcccactcactctctctgcctgactctcatcccattgcacgtgaccgggggacggaggactgccctccaatttcttacaccctcccgtctgcatctgtaagtagtaaatctttgagctagtttcctgttgtgtggaat

SEQ ID NO: 1880471 - DNA, 4001 bp, Homo sapiens
gagaagccttccaggttgataatggggctcagacagaagagggaaagagcagagaagcaacacgcatgtgtcttttgcagccagtatgcgatgttagtccagggtttggaaccccttccaggtggatcacggtttcacacacacacccaactgtgctcatctgtcttttattaccccatgttccactctcctgggttcttttcttagttcctttcagccctctccttcctagaacctcttctcagaaccctacagttcagtgagagggtgagaaaaaaagatacatcctaaaactcccctcgaggaacgaggcacccccgtgacatatccggaaacaggccagccctgggccgacacgtccatcctttcttgatttcggccactgtagagcccaactctgacaggctggactttcctgtcacacctaccgatgtcaaacccacgcccttccagagtccagatggataccctccgccctgacccgcttcttggaacattgactgaagggtatatacataggggtagaggaaggctccgtgcactttagacacgtgcgcctccccctcgccctgctgccacatgcagaatgtacactgatgacaaacagacacacttaccagggcacatgccagcggcgtccatcctccttcccggccaggcatcagcaagcgagacggccttgaggcaggtgccatcgccacagggagagtggctccgagctcccgatgtctccctgggagtcgaggcattcaggtaccccaaagccagtttcgagcctcccgggcggggtggccgaagaccttgacgaggctgggcgtccccctccgcctcccgctgtgcttccgcgctgcttcctgctctgcactacctccgccgccgcaactgcccagcgcccctctctgagaagccctctgcctgctgcacgcagcccataggttccgctacatctgggatgcattgccccttaattgtcaatcccattattgtgatcaagtgaacgttgctaatctctacatttattgtttaggtaaatagaggctgcatttaatcaatatgcagggccccagccctcgcagcgccaagtaacttaagtcaacggtgaagatttcagtgtgtgcataattacagagctcgcggaatcatcggtccagctcaattccacgtctcttcgccgacctgggggaggcggaggagggaatgggaggaatctccatcctccaaggggtcgagggccagctccttcagggcaagtaaatgacttcgtggaggtgacaccgcgcgcctggcccgcgccctcggcggagcgccctgtgagcgcgggggcctgaggcgggactggggactgcccccaacttccgagcggcagaatctggcgcttggcgccccgactctacagcttctggacctctcccctcccaaatttgcctcaggaaggagggtggttccgcgttcggcaggtccccggcaggcgggaaagcgggggcggggctctggaggtgggttgccccaagttcgcgacaccctgccccagcacgcaggctccctcctctcctccgcagctgcggggagcagcagacttccttgcccgcggggaactcccaagaatcccacgattgggcgcgcagagcgcgggttatttgcgcttcttcttaaatagctattgtttcctaatttaagaggaccttcgccgggctagaacgtcagggattcgcagcagggggtgggcgggtctggggagatgggcggttcgcgccggcgaggggtggtatcagctccttacagtagcttggctcccggagtggtgtcagagtgagggcctcttggtctcggcggggaaagggttagctgagaatctttcggggggcggcggaaagaacccgacccccgcgacaccctggagtggggcccaagaagctgatcctcaagtttgaggcgccaacacttctctttcggcaactctgttgtcgcgagtttctctttcttctggttcctctttctctgctccattcccggacaagtcggacgtaaacaaccaataacttcagttgtaaccagacaccccccttgcatggaattgtccggctttatgtaagcaggattctaaggtcaaatcatttgacagtttagggtgccattgcaacctcccaactaaattacagctgaagtttgaatataagggcccttggtatttgatggcagctggctgtttttaattttcggaatggaacagttttcgtataaggtatccctccctgctttcttcttcccttaagttgaacagcatttggaacaagggggaaatgaaacacaaatatcggtgcaatcctgaaaacctttttctctctattactacattcagagcctcccctctgcccggcccaagctactcccaagcctgtaactctcctcatcagttgggcagacctcttaccgctgggctgcaaaccagtgctgcctctgcctctacaagacagataaatacggcgtcagactcttttttttttttttttgaaaagagtctcacccagtcgcccaggctggaatgcagtggcgtgatctcggctgactgcgacctccgcctcccgggttcaagcgattctcctgctccagcctccctagaagctgggattacaggcgcccggcaccacgcccgcctaattttttgtatttttagtagagacggggtttcaccatcttggtcaggctggtctcgaactcctgacctcgtgatccacccacctgggcctcccaaagcgctgggattacagacgtgagtcaccgcgtctggtccagactcttttgattaggaatgtcaacttaaccttttctggatggcagttgtttttaagctaggataaggaaaagaaaggcaacagagctgatagctagggctcctgggtaagcacaagccctttggaggtctcaggaggtgggtgtgaattaaggcccaccacttaaggcccaccacttaaggccctgtgaccttgggcgggccttgaaacttgtgtttccttctctctaaaatgaagctaataatttcgactttgaaggattgttatgaaggttaaataaaactatataggaaaattcctaacaatgtgctccatacttattaatagttgagctaaaaaagttcttgccttccattttccactgaaataacattcccagctaaaacttactgtgaaactaaaggcaaagccaacagccgctataaaacagaattttagtgtgtgtgtgggaagcacagggcctagtacagaagcaaggttggatgaggatgaatgcaatgacagcctgcagctgcctgatttggaaggagtaaggttagctgctccagtcagccacacatttcatggtctggctttcatagttctccaggaggggaagaggaggccttgtctctaaaagtaatagctaatatttattgagcggttattatataccaggcattctgccaagtgctttacacacagcatctcatttaatccacacaataatcttaccaggtgagtcttactgatatctttttaaaaacttttattgtagaaaatatctgctgggcacagtggctcaagcttataatcccagcactttgggaagccaaggcagggcagatcccttgagcccaggagtttgagagcagcctaggcaacatggtaaaaccctgtctctataaaaaaatacaaaaattagctgagcatggttgtgtgtgcgtatggtcccagctactggggaggctgacatgggagaatagattgagcctgggaggtcgaagctgcagtgagccttgattgcgccgctgcactccagactgggagacagagcaagatcctgtccgaaaattgaaaaaaaaaatcaagtatttatttagaaatagacagaatattttaacgaacccctctatctccatcacccagtgtcaacagttgtcagctcatggccaaacttgtttcatctctatcccatccatttccctcttccttattttgaggcaaatc

SEQ ID NO: 1880472 - DNA, 4001 bp, Homo sapiens
ggtaaagaataaccaggcagaggaaaaagcaagtgcaaaggcctaagagagtctgtacatgaacgtgattacgctacaagagtgtactcagggggattttaatgtctttagtgatagtggatgccctcttgcatctgatcactcggctgagttctcatagaataaagcattcattcccctagttgcgagactatcgcagctgatgtcttttagctgaatcccactccaggaattgcccagagcctaagacagtctctccacctccctggaagcagaccacatccagtgactggccacagagttataaaaattcaacccctcgcaagagtcatccaagtccttagtgccccatgggctggcttgattcttctatcttgattgcagcacagcccacctcctctctctgcccagtcctgctttcttcactgccctataggtattgattttgagagcgattctccacagatttccatctcagcatctctttccctggggcatccagcttaaaaccaaggttgatcaatttagttacttataaacattaaacgatgacagcaggcctaagcaacaaagcaagaccccatctctatcgaaaaagaaaaaaaaatcatctgagtgtggtgtcacacacctatagtccagatactcaggaggccaaggcgggaggatagcttgagcccaggagtttgaggctgcagtgagccatgattgcatcactgcaccccaggctgcactacagagcaagagtctgtatcaaaaaaataaaatataacagcagcaccatcaccaaatttagaaatcatttaagagtgccagtgttttggctgggtgcagtggctcacgcctgtaatctcagcactttgggaggccaaggaaggcagatcacgaggtcaggagatcgagaccatcctggctaacacagtgaaaccccctactaaaaatacaaaaaaatagccaggcgtggtggtgggcgcttgtagtctcagctactcgggaggctgaggcaggagaatggcatgaacctgggaggtggagcttgcagtgagacgagatcgagccactgcactccagcctgggcgacagagcaagactccatctcaaaaaaaaaaaaagagtgccagtgtttttaatccatttgtaattaaagataatatgacatgaagtactaattggtgtccattcttttagttttgtcactctaaaatctgtacccacactgttgagtattgcttcctaaccacaaatctgatcatggcaatcctttgctaaaggccttcagtggcactcagtggccttgaagacaatggccgagctccatggtccacaggtctcttcacaacctaacatctgccttcctgtgtaccccttccactgacctgattcaaccctggacccatggcgtttgagttatgctgtttcacatcctcttgcctgcctttgaacctgtagttttctctgcttagcaaatccctttttattctttaaggccaccttttctgaaagccttccttagccctcatacccagagttcctaacaccctcttgtgcctctactctatactgtacactttttattgttgtacatatcattgtaaacatctgcccatttctgctgctcaactgcactatcgtttccttgaagtcagggactatgtcctatttaatatcgcccccttcagtgccaagcccttccgagacactcaaaaagcctgcctcaccctgatttcattaggaaaatagtatagacaagacacaaaacatatttgtaaaagtgatgccttactagcaaccattttacaattatgaaatccatcatagtagaaaggttacctttcactaggccctaataaaggagggtctattagtccattttcacacagctgataaagacatacccaaaactgggaacaaaaaaagatttaattggacttacagttccacatggctgaggaggcctcagaataatggtgggaggcaaaaggcacttcttacgtggtggcagcaagagaaaaatgaggaagaagcaaaagcagaaacccctgataaacacatcagagctcgtgagacttattcactatcacgagaatagcacgggaaagaccagcccccatgattcacttacctcttcctgggtccctcccacaatacgtgggaattctgggagacacaattcaagttgagatttgtgtgggaacacagccaaaccatatcagaggggcagatgtacaacgtttgtattgtaaatgtagctgccgggccccaatctccgccaagtctcagaggtctacaatcagaggactcccacagactactacattttcatactcacccacttccgttaaaccctctaattagcagtttccactctgttaacaacttgtcatgagtatttatttgtcttccggttgacttaaaatgagagaaaacacagtgggcaaatcagagcaacacctgagtgaactgtttatgttcacaagtgtgaaagctaccaaagccatccatgaattgaagaagaactcttggtttgccaattaacagagaacaagagtatgcttccagaaaccttcctggggggcgctgcattttaaaattgaccattgagaacagcaatgatgagctcaacaagagatataatcttaccctcctgacaatttgtgttcagaagggacagtgttctagcagaaaagtcagtgactttcaagttagaatacttgtgtttcaattctcttaagagcatgtggccttcaggaagatatttaacttcgcttagcttgactctcctcatctgtaatacagaattatctgtaactcacaccatacttgtgagaattaaataaataaggtcatatgtgagaaagtgcctagtctaggctcttgcttgattaaggtttgaataactcttcactcaaagcaagaagtgttttcaccaaatgcattttccttatgttgtaaaacccaagcacagcaaatcagaagaaattgattcttatggattaatatcatcattcaaactcaccggcatgagtttaagatatgttgattttgaatttctcatgtcaatcttctatataatcagaaaatcactttaagaagctatgacagactgccaaccatatatacgaggctgaaatacatttgatttttttccctaaataagctgtttgaagaatgacagctagatagtaaaaaagaaaatcaacccctctgcaaagttagtagctttatataccttttcatcccagaaaatacctaagcagattaaaagctttctacacttctgaaaagcccattttggtctcaccacctgtgttctaaattgtacaataatggaattttaaaaggttgtgatagtaaatctctccaatcaacgtattataaaaccaaccccaccaaaaatttacctccacagcacagtatggaaaaccaactgctcagatctgagaaatgtaaaatgttgagcttatttttttaatcatgttactcattgattgtaaggttggtaatacttagacacaatgcttgaattgagaaaaaaataatctacaagcttttgtgtcttttggtatgcaaaatgataagtcctgtcaagtagactagaggataaagcaaatctttattaaataaacaaaaaactattaatcggcctttgctgtagccctgcttgatgcaagttatattacttgtcaagacttttgtttagtcacaaataaaaggttcagtggataaaggtttggcctttcgctacatgttttctgccaaactgtgacctgaaatgaatgaattggtattgagtgggtcctcctgactctgtaatttaatgctgacagtaattagctaacaaggtggtgttataatgaaagcccagggcatggtgtttatgtgattttacacagctgcaatagattggcacctcctttttccatctttttcatttactacctctgaaaaagaagaaggtgcaagtcataaaagatacaagctgcttgactctctgataaatc

SEQ ID NO: 1880473 - DNA, 4001 bp, Homo sapiens
tgtacattttaaagtaacttaaagaatataatttgatggtttgcaattcaatggatacatgcttgaggggacagatacccagataccccctcattcatgatgtacttatttcacattacatgcctgtaattttttaaaataagtatttgtttcctctttagtactattctaggtaaacgcaacagtctaagcttgctcattcaaactgtatcatagtggggaatagtgggtcagtggtagattggagagtagaagccttgtgtgtgttactgttattttaaaattcattgtaaaatattgcagatatactagaagatataaactataccgaagtaaatatctatgtacccatcattcagttttagaagtaaaacattgcaaaggctgttggagattcctgaatacctaaccttttcttcttatgcaccctacctacctgttctcagacatattcattatattgatttgcttcttagtagtttcatgcacttctgcaagtaattattatataattgtgtatctttaaaatcaaatataattgcttttcatatgttaaaattaacgtacatgatgtactatatgtattcatttatcaatggtttttccattcaaaagtatgtctgcaagattcatccatattgataccagtaacagatccatttctatttgttgctgtataatattccattgtatgaacatatcaacacttatttaccgatataattacatttattgtttattctttgtgtatattgatgaagatagactttactactctgagttcatacagatattcctgtattcatttttaatttgctagaatttatttttgtatgtagtttagaggaagaatctaatttcatttttttcataaggctaactaaaacaaaatgccatttatgagttaatattttgctcattgatgtgtgataccagcacttatatgtgtcaggtttcccttgctctacttgcctatgcctgtgtcaatatcacagtattttagctataataaagatatagtagatcttaatagctggtatggcatacatacccatacctacccatctcatttatcaaaaataatttgattcttcattacttatttctcttctacatatattttagaataaatataatttttggcaaaatattatgttattggcagtgcattaactttatgaatacatttagaaacaacatctttactagatttagcactttcagtctatgaacatggaaaatttacttctttatgccatttaaaacatgattataaaactttttattttcttttagtgattttggaaagattatgttgctgttgtgtatgatcccttttatctaagcatccatatttactggaataaagtatcaaaatatttagtaattttatttagataagtatcctgtccatattttcttgtttagaacaaaagtgccaatgcaggcacgtcgtgggtgatcaggccacacttccactcagatggagtggggcaagttccaaagactagtcttaccaagtcaagtcaagtcaaaaccagaacaaaagtgccaatacaggcacaccgtgggtgatcaggccacgcttccactcagatggagtagggcaagttccaaagacgagtcttaccaagtttcagatgtccggactccaagtgccagttccttcccggtgttcagccactgtgttaatcctccacaggggcctgctacgtgctgttctggtgaggcgttccacccaggcaattttctacccaggagtgctctttggatcacgtcactcaggctggccagagtcccctgcagggatgctccacagggcaggcctaagctgcctaaggggctacctcggccatccctcagttacctcgattcccggtcaggggaccaagaaatgtagaaggacgagccgcagacaaaacctctcagacaccaagttgtagaaggaagggctttattcagctgggaggatcggcaagctgctgccttaaaatccgagcaccccaagtgcacaatttctgtcccttttaagagctcacaacactaaggatttcacatgaaagggttgtgattgatttcagcaagcaaggaatacgtgacaggggctgcatgcaccagtggtcagagagaaacagaacagggcagggagtttcacagtgttcttctatacaatgtccggaatctacgaataacattggtttctaggttatgagttgatttttaactactgggtttaggccaggcaggcccaggcctggttttgggcctggcactgggctgcctgtctttgatttcacttccttgtttttttcttaaaacaggtactgagtataatacaatatgagaggatctctctcttctctcactatggtattttttttaaaatgtgtactctttacttgcagggtacaggtttcatatatgtgcattaaagcagacttttgttatgttgttctaatgttctctttttttttcatttttgtctatttgatttatcacttacaaaaacacgcatgctaaaaacttccagtctgacaggggatttgtgagttttatcctatgatttttatccaatttgctttatatattttttcttttttaaaaaattatttctaatttttatgggtacatagtgggtgcatatatttatggggtacatgagttatattaaggatacaagcatacagcgagtaataatcacatcagggaaagtggagtatacatcacttcaaacatttatcatttatctgtgttacaaactttctaattataccctcaattatgtaaaaatgtgcaaaagattaatttttcctgtagtcaccctgtagtgctatcaaatactagatcatgttcattctatgtttttgtacccattaactatccccacttgcccacccacctcaatccctactacccttcctagcctctgagaaacatcattctactgtctccatgagttcaatttttcatctgtaactcccccaaatgattgagaatatgcaatgtttgtctttctgtgcccggcttatctcacttaacataatgacctcaggtaccatccatgttgctgcaaatgacaggatctcattcttttttatggctgagttttactccattgtgtatatgtaccacattttctttatccattcttctgttaacagacacttaggttacttaaaatgtctagaatagccaattttggctattctgaatagtgctgcaataaacacaggagtgcagatatctctttgatcaactgatttcctttcttttggttatataactagcagtgggattgttgaaccatatggtagctctagttttagttttggaggaacctcaaaagtgttctcaatagtggtagtactaatttgcattcccaccaacactggagaaatgtacccttttatccacatcctcaccagtattttttattgcctgtcttttcaataagagccattttaattggggtaagataatatctctcgtaattttgagttacatttgtatgatgaccagtaatgttgagcactttttcagatacctgtttgctatttgtatatcttattttgagaaatgtctatttcaatttttacccacttaaaaatcagattattagatttttttcctattgaattatttgagttccttatatattctggctattaatctcttgtcagaggaatagtttgcaaatatgttcccctattccgtgggttgtctcttcactttgttgattgtttcctttgttgtgcagaaaggttttaacttcatgtaatagcatttgttggctgggcactgtgactcactcctgtaatcccagcactttgggaggccaaggcgggtggatcacctgaggtcaggagcttgagaccagcctggccaacatggtgagaccccatctctactaaaaatacaaaaattagctgggcgtgatggtgggtgcctgtaatcctagctactcaggaggctgagagaatcgcttgaacccaagaggcaga

SEQ ID NO: 1880474 - DNA, 4001 bp, Homo sapiens
attttttttttttttaatagactttcccctcctatcctaggctcaactccgaatggattggattgcgagtctgcacgtgagaaaaccgtttggcttggcttggacccctgccgccccccacctcctccacacacacccagtccaggggtcccctttatcaccctttgcttgcaactccaaaagaagttgcccacctcctgagtcacaacacaaggtcgaataattcctctagatgaaagatcagtttcatttcaaaacgagaataggttcctttttttattttctccacatggtacaaaataaacagaatttgctttaaaaaaaatcattagctgtggccaaattcgaattccttctacagcctgtgtgttcaagggcagaaacattgtatctcttcgggcatctgggccgccaagctgagcggggggaggggggagcggctgtgaaagttgaggaaattgacagactgagaggtgaatggggggacaggcaccaggtcctggctggagggaattggaaaacaaaagtgcatccttctcaccctgcctgggtggagggaatcctgagggaggtagtttgttttgcccatggaaaccccaaagaattatttttcccccttcaatgttgattgcaatattatttcacatttccgtgtatctgttgttttaatctctttcgtctgcgctaatctcgaagtggattattaatggggaagacagagaaggagagattcatttgcaggacttattttgctgtgtgaggagccgaaagccagcagcccccagtcctctctcgacttttctctgcgtcctgtgctcctgcatcctcctgatcccacgatccccattgtccccgaactggccctcggactgagggagtgttcggaacaaatttatattccggcttcctcccgaccccatcacctctgccacgttgggaactctctcggccaaatgcctggggaggggcgtgccagtcaggaaccaggggcaaggcaacctagccgcagcgctcacccctcgcggagacccttcccgtgccaccatccaaatatctaccttcatgggaacctggaagactgctttttcaccccaaatcaaatactggctagtcggaactcccagtgataaatgttggggactgcctcctgccacttgagcaattcctgagtccagggtaatcagatgattaggtgtttttaatggaaatacttagggtttttttttttttttttaagtcagatcctaagtaacctgacatttaatatacataataaagacaagtgttttgttagctattcgattggatcctttgacctgaggttatgcttgtgtgtgtgtctggtctgtaagcctccaatggctacctgggtgcctgaagaggagtcttgcctgtaataactctatgcaaagggctccttcttccttaggagtggtggaagggtggctgtaaagcaaacgtctagagaaagctggattccaatcttttaaattaaaaaagaggaaaaaaaggaagaggaagaaaaatggacatgaacagtggtgctaaatctcagaagaggaacttgataagtcacacatatatttagtatagatatataataatgaaagaaatgtaaaatataaaattaagaatgtgcctgacccatgttgaaaatctttgattttatttattaataatttttaagctgaagatcctgaatgcctttcttctatagacactttatctgtgatggggtggggggagagagttaatttatccagcagctattttcattataataaatacttaaattaggaaagaggtgagtaaccaactgtgaaaatctactttcttgcatcctagaacaagatctagctgtggtcgtgctaggtagctattaaccacccccaccccactcccccgccccgcaaaaaaaaatacaaaatacaaagacgtatacctctgggagtgtggatgtggcaacccatgtggtggcttgtccctcctttgagtgcaattgccagtgactcttgcattcaaagtcttgctttaggcacacattcaaagcacagttcaaagcagtttatcttaatatagtgttggatcagggtattatttgtttcagatttcatcagactggaaacaggagggtgtaacatatttaacaatattaaagcttaaaaattggtgtgaggcagctctctggtcctcttaacacctccacctttacctttccgaagaatcctaaatgctgtgaggctagaagtttatttgtgctctgaggttctcaagcactttcactctttaggaaaaaaaaaaaagtctcacagttatttaagaaattgagcctgaaccatccgaggataggagatttcttccttttccgataaatgcctgtgctcagcatcctcaaatttggctgtctttatttacttctatattagttccaattatgtgcagtgtaaaccagctttttgattaacaaaacagcagagcattggttaagaacacttaaacttcaaaaaaattcccctgggaagtgggctctgaattggttaataatgtgcagtacttgctaaattgctgacttccagatgtggaaaatatctttcttgtttaggacctatgtaacctgattggattacgacagaagcgtcacgttggaagcttttgagtgattatttaattaaccatacagtagaaagctgtattctccaggaaatcccttccatatttgcataaccaatcccttcagagcaaaggtggagtcttttctttttaatcttactttaattgtaatatcaaaaaatatatactccaaaacttagaccccatgccgtttaatatcatgctctcccttccctgctaagtttctctatggcctttctcgtttctcctcctgcctccctacacactctcccttactttgtagtgaggtctccccgaggtgtagagagattcagagatcggccaaccgagtgttctattttaatttacttagagaccctttattaaaatgccaaactactttttaatattgggatccagtccagaaattcatcatgcacacaccctaatacacatgccctaagatgcagctcccatgcagcatttttttttctggctctggtacctaaaaagaaaaaaataacaataagagaaagggcagagaactttgttccagaagctgtactgagatacctacacaatttgatgtgcatctcaaatctggtcattagagatatctgtataagaagagactatctggattgaggacccgggatctttccctttaactttcgccccttggagttctccagttctgtgaatggtgtgcaccgttttccgccctgtactctgtaggatttagtgatgaggataatgatgccaaaggcttgacgggcggggaggggggggtggagggggggagaagggagggaggggggagggaggcgaaggcgaaagggagggagaggaggaagggagggaggtggaatttcatttcttccactaaagcgtttgcggagacttcaaggtataatctatcccagatcctttcccagagagaaacttggcgatcacgttttcacatgatgctcacgctcagggcgcttcaattatccctccccacaaagataggtggcgcgtgtttcagggtctctcgtctctctcctacagaaaagaaaaagaaaaaaatgtcattagaagaggcgtaacacgtcagtccgtccccaggtttgtgtttcctggagtggccgaaagagatcagttctaacctgctctgcaggaataacggtcctgcctcccgacactcttggcgaggtttttgtacagtttgctccgggagctgtttcttcgcttccacctttttctcccccacacttcgcggcttcttcatgctttttcttctcaccatttctggccaaaactacaaacaagacttcgcaggtaggttttttttcctccccttttctctctttttatccctttttggtgtgctcgtcctccatcctcctttt

SEQ ID NO: 1880475 - DNA, 4001 bp, Homo sapiens
tatcaaaagaaatctgcttattgcaactcctcccctaaagattcattcaacagtgtgatggctctaatccctttttcacttttctctgcctaaaacaatctgaattgtacctccacctaatcaactatcctcttcatttcttactcaattatctcgctacctctttactatatatagaaatctagtctttttcagcagcattaaaaaaatgtcttctaagaaggatagagaccttgtatccttctataaatgggaaagggttataaactcttcagtaatgtttaatttataaccttactacttacttagtccctatctttcttagatctcttacctataattgagggagtgaatgagtgaataaatatttgaaaaagaaattggtaatgacatcgtgattcactgacaatatgccaagaaagaagaatgaaaactgttagaattaaatatttgtgttattttaaggttttgaaactctgccctttcttttagaggtctaagtcattagatcccaatatctttatttaatttttatatggtagagatctaggaagaacataattgagacatgtcatataattacttcctgatttgatgtgccattttaattaatttggggttaagttcccatactataggataaaatggtggggttcatgttatctctttaattttcccattactctggggaggagaagggagagtacttaagcttttcatattaaagtttctaagctgataaaaattcaaggttagcacagattttgtgtggttcaagtaagacacacactatctgaggaatatttaggcgatcaaatatatttttagaactgtctcagagttttttttttctctgacaaaataatacagtttctaggaaaccactgaaagactattttttaagttagcttcatgatgagaatattttaaaaaccatcagtacgtattttttactgaaacatttctctattcaaaacaagcagatgcactctgactcaatatcaaactcaaaatcattactgtttatatccaagattatcaagtggctaaacttatatctgcctgctgtttgtcaacacttcctcctcagctggccaagtgcacagtgactttgtttgacatcatttggcacacaaattctccaagtttaattcttcaggccagcacagttgcaagtttctttagtccttcccctcctctggattattccagaacacctccccttttaaaaggggaactgctgcccaattatctagggcacagctctctatgcataaatctctagtaaggtacacatggatttttctctccccaaaataacttcttgagaatttcatgccccagggaataatgaagaaaatgtgattcagttccatttccacttaatgacatatattaactttgtaatgaattcataaacttaagtaactaattattctaaaccaggagttagcaaactttttccataaagagccaaatagtaaacattgttggcattgtgagccatatgatccctttcacaactattcaactctaccactgtagctcaagaacagccataaacaattcataaaaggatgagtgtgactgtgtaacaataaactccatttacaaaacaaatggtgtgccaggtttgacccataggccatagtttcctgacccctcttcaaaactaactattaacatgtagggagcatactggcataaatgaaaaaacacggttattgaagtcaagccaacatgtattcatatcccggctccagcaatttatataatttgggataaatgataagacctatttaaatcttctttgtcatctgttaaaggaaattgtatctcccatcccacacacgttctatgaatattagatgagaaaaaatgtttataaaaagttttaacagaaatttttacaacaatggacataaaaataacattgctatttatgtgaataataaccattatttcaaattctatgaaacttacctcagattcagtttcatgcttgactgagaatggcttgtccttatatacactagatactttaaaaactgtgctagtaagtgaaatgcaagaaacacatgattttagttaactatttgagcagtaattgtcaatctgtaacttgggcatgacaaaaaagtttcatttaaaaatctattatactttttattcttcaaatctagactcacaggttattatcattttaatcttgaaaccccatcttaattagtaatatagttgacatccaatataattttgctagatttcaataatataattagtcattgagataatcttcatagtgaacatatttaaattatttacaaaattagtttggtttacaatatttgtaacagtcttcaaacgtgcatttggttattctgactacatactaatgtcacggttttatcacagttttatcatgttaactttttcaaatttcctactttaaattttatagggaaccaaaaatgagcccatatagccaagacaatcctaagcaaaaagaacaaagctggaggcatcacactgcctgacttcaaactatactacaaggctacagtaaccaaaacagcacagtactagtaacaaagcagatatatagaccactggaagagaacggaggccccagaaataacaccacacatctacagccatctgatctttgacaaacctgacaaaaacaagcaatggggaaaggattctctatttaataaatggtgtagggaaaactgtctagccatataccgaaagctgaaactggacgccttccttacaccttatacaaaatttaactcaagatggattaaagatttaaatgtaaaacttaaaaccataaaaaccctagaagaaaacctagacaataccatttaggacattggcatgggcaaagacttcatgactaaaacatcaaaagcaattgcaacaaaagccaaaattgacaaatgggatctaattaaactcaagagcttctgtacagcaaaagaaactatcatcagagggaacaggcaacctatagaatgggagaaaatttttgcaatctatttatctgacaaagggctaatatccagaatctacaaggaacttaaacaaatttacaaggaaaaaaaaacaccatcaaaaagtgggcaaagaatatgaacagacacttttcaaaagaatacatttatgcggccaacaaacatgaaaaaaagttcatcatcattggtttttagagaaatgcaaatcaaaatcacagtgagataccatctcacgccagacagaatggcgatcatttaaaagtcaggaaacaacagatgctggagaggatgtggagaaataggaatgcttttacactgttggtgggagtgtaaattaattcaaccattgtggatcacagtgtggcaattcctcaaggatctacaaccagaaataccatttgacccagcaatcccattactgggtatatatacaaaggattataaatcattctactataaaggcatatgcacacatatgtttattgcagcactattcacaatagcaaagacttggaaccaacccaaatgcctatcaatgatagactggataaagaaaatgtggcacatatacaccatggaatactatgcggccataaaaaagaatgagttcatgtcctttgcagggacatgaatgaagttggaaaccataattctcaacaaagtaacacaggaacagaaaaccaaacactgcatgttctcactcataactgggagttgaacaacgagaacatatgggcagaaggagtggaacatcacacactggggtctgttggggagtggggggttaggggagggattgcattaggagaaatgtctaatgcagatgacaggttgataggtgcagcaaaccaccacggcactatgtaacaaacctgcaagttctacatatgtatcccagaacttaacgtgtaataaaaaaatttaaaaataagaacagtaatagaagcaatcattaataaaatctatttagcctgtatctta

SEQ ID NO: 1880476 - DNA, 4001 bp, Homo sapiens
cctggactattaaactcagaccacatgtgacaaactgatacacttctagctgctgtatggagggtaaaagcagtaggctcaatctggagctattgccgctacccattgaggaggatggtgccttgaacctacctgcaaagtagccatgaagatgggaccggaccccaatagaacatcctttgcctcatatagtggaaatagcacaaactctggcctcagtgagagccaagttctgcttttgagttcattacctttttgctgagtgaccttgaacaagttactaagcatctctaagtctcatttataaacccaaattaaggttcttttttgggggtgtgatgactaattttgagatggccttcagacaaactccaacactggctttttcgtgggtccccaggctgatggtctgctctggagattgtggacttgccagcctctgtaattacatgagccaatcccttaaaataaatctctctttccaaatatgatacatacacatttacacatcctattgattctgtgtttctggagaatcttgactaacatgggggttaacttcctattaatttatatacatagaacaaactgcacacacatgaagggcacagctcagtgaacctttacaaagtgaacacaaccaccatttacaagaatatctggaatattagaattctgtgaagaaagttatagcagtggtgtaatgtgttactctaaatccctacattggctgggtgcagtggctcacacctggcaggcaaaggcgggcagatcacctgaggtcaggagttcaaggccagcctgggcaacatagcgagatcccatttttgtgaaaaatttgaaaaaaatagccaggcatggtggcatgcgcctgtgatctcagctacttgggagcctgaggtgggaggattgcttgagcccaagagatcaagccttcagtgagttatgatggcacaccttcactccagcctgggcaacagagagagacccggtctcaaaaaagaagaagaagaaaaaaaaacctctggaaccataactatttaaaaagagcgggtgtggtgactcatgcctgtaaacccagcactttgggaagctgaggcgggtggatcatgaagtcaagagatcaagaccatcctggtcaacatggtgaaaccctgtctctactaaaaatacaaaaattagctgggcatggtggcgggcgcctgtagtcccagctactcaggaggctgaggcaggagaatcacttgaacccgggaggcggaggttgcagtgagccgaggtcatgccactgtactccagcctggcgacagagcgaaactccatctcaaaaaaaaaaaaagataaaacacatcaagaataatgcaagacatgggagaaccataaatcagagttagaaaaactctgaaatgtgatttgacaggattcagaataaatttagaaatgaaaggaaaagtaatttcaaaaaggaagactaaattgaaagaacactggagtgacttaacacagcagatgccttaagagaaatagaaggtgaaaaggaggaaattatgaaaaattgaaatgaaattttaaaagagatgaaaacaattcaaagaaagagaaaattacaaatatttgtaattttatgaagataggcaatgtattagggttctccagagggttctccagagggacgtatgtatatatgaaaaggagtttactagggagaattggcacacaccatcacacggcgaagtctcatgataggccgtctgcaagctcggggagaaagaagccagtagcggctcagtctgagtccaaaagcctcaaaagcagggaagctgaccgtgcaggcttcagtctgtggccaaaggccctagagcccccagcaaaccattggtgtaaatccaagagtttaaaggccaaggaacctggagtccgatgtctaagggcaggaggaatgaacagaagcatctagcacaggagaaagatgaaagccagaagactcagcaagccagcttatcccaccttcttcccactgctttgttccagccaccgagcagcggattggatggtgcccacccacattcagggtgggactttctctcccagtccactgactcaaatgtcagtctccgctccctctccctctccctctccctctccctctccttctccctctccccacggtctccctctccctctctttccacggtctccctctgatgccgagccgaagctggacggtactgctgccatctcggctcactgcaacctccctgcctgattctcctgcctcagcttgccgagtgcctgcgattgcaggcgcgcgccaccacgcctgactggttttcatatttttttggtggagacggggattcgctgtgttggccgggctggtctccagctcctaaccgcgagtgatccgccagcctcggcctcccgaggtgccgggattgcagacggagtctcgttcactcagtgctcaatggtgcccaggctggagtgcagtggcatgatctcggctcgctacaacctccacctcccagccgcctgccttggcctcccaaagtgccgagattgcagcctctgcccggccgccaccccgtctgggaagtgaggagcgtctccgccttgccgcccatcatctgggatgtgaggagcccctctgcctggctgcccagtctggaaagtgaggagcgtctctgcccggccgccatcccatctaggaagtgaggagcgcctcttcccggccaccatcacatctgggaagtgaggagcgtctctgcccggccgcccatcgtctgagatgtggggagcacctctgccctgccgccccgtccgggatgtgaggagcgtctctgcccggacgccccgtctgagaagtgaggagaccctctgcctggcaaccgccccgtctgagaagtgaggagcccctccgcccagcagccaccccgtctgggaagtgaggagcgtctccgcccggcagccacctcatctgggaaggaggtgggggggtcagccccctgcccggccagccgccccatccgggagggaggtgggggggtcagccccccgcccggccagccgccccatccgggagggaggtggggtcagccccccgcctggccagccgccccatccgggaggtgaggggcgcctctgcccagccgcccctactgggaagtgaggagcccctctgcccggccagccgcccgtccgggagggaggtgggggggtcagccccctgcccggccagccgccctgtccgggaggtgaggggcgcttctgcctggccgcccctactgggaagtgaggagcccctctgcctggccagccgccccgtccaggagggaggtggggggggtcagccccccgtctggccagccgccccgtccgggaggtgaggagcgcctctgcccggccgcacctactgggaagtgaggagcccctctgcccggccaccaccccgtctgggaggtgtacccaacagctcattgagaatgggccatgatgacaatggcggttttgtagaatagaaaggggggaaaggtggggaaaagattgagaaatcggatggttaccgtgtctgtgtagaaagaggtagacatgggagacttttcattttgttctgtactaagaaaaattcttctgccttgggatcctgttgatcggtgaccttacccccaaccctgtgctctctgaaacatgtgctgtatccactcagggttgaatggattaagggcggtgcaagatgtgctttgttaaacagatgcttgaaggcagcatgctccttaagagtcatcaccactccctaatctcaagtacccagggacacaaacactgcagaaggccgcagggtcctctgcctaggaaaaccagagacctttgttcacttgtttatctgctgaccttccctccactattgtcctgtgaccctgccaaatccccctctgcgagaaacacccaagaatgatcaattaaaataataataataataataataataataataataaaat

SEQ ID NO: 1880477 - DNA, 4001 bp, Homo sapiens; identical to SEQ ID NO: 3266

SEQ ID NO: 1880478 - DNA, 4001 bp, Homo sapiens; identical to SEQ ID NO: 3265

SEQ ID NO: 1880479 - DNA, 4001 bp, Homo sapiens; identical to SEQ ID NO: 3267

SEQ ID NO: 1880480 - DNA, 4001 bp, Homo sapiens
ggaggagaagggtgaagaggaagaagaagagttggaggaggaagaggaggaagaagaggagacagaagaggaggagttgggcaaggaggagatagaggagaaggaggaggagagggatgagaaggaagagaaagtgagctgggcgggcatcgggcccacaccacagcctgagtcccaggagtccatgcaatggcagtggcaacagcagctgaatgtcatggtgaaggaggagcaagaacaggacgagaaggaggccatcagaaggtgagcagccaggccccagtgaggacgggagggaggcgaagtgcagaaggttcctaggaggcagtgggatgccaaggatggctgctgcctgtatgcacatctcatcctaattcagtgcttagtgaggtcatgttggtagcttaaggcctctgtgggagtatccgcccggcaccaacactgaactttattcttttttctctaagaactagttgttgacatttaccaacttaccaggagaattgttatagtctgcaaagtcttgtaaatgggcttctagagccagaaaaggaccacctgtcttgcaggtgggacttcccgccggggctgccctacagatgatttatgtcattgtagggattccctaggccccacccagtcccttctgcgccctctcatcacttccctacctttctctaaacttggccctgagatgcctactacatcgcctgggtttgaatcccaccccttaaaccagcagcatatttggcaacttggaatcttttagccacacttggaacgtccgtaacattgaaacaagaatgccccatagtgtagtggatgaggggagtcgaatgggaatctccgtagagctcgcggcacaatgtaccgcacggacaggcgagcgaggaggcgcgcgggcactgcggccgccctcatgctagcccccgccccctcgcaggctcccggccttcgccaacctgcaggaggcgctgctggagaacatgatccagaacatcctggtggaggcgagccgcggggaggtggtactcacctcgcggccacgcgtcatcgccctgccgccgttctgcgtgcccaggtaagggcgccgggaccagcggccgcgcagaccgcgcgagaggggccacgggggcagccaggctctgcccgaagcctcgcccccacgcctacctgggactttttgtcttccaggagtctgaccccggacacgctgctgccgacgcagcaagcagaggtactccacccggtggtgccacttcctaccgaccttccgtaaatgcccgcgcccagcctctccgacatgccgctaggggtcacgcctggccccctctccaccgccagtaaaagcatctagtcttttttctgtatctaccttgactttatttccccgacgagggggaacgcgcgcgcgagctctgagagggaaggatggcagggagcagcccgggcggactgcagaggcgcggcgggaacttagggcccgggaggatgcacctctccgcccacactgcagctggactgagacctggccgctagctgccggccgctggaccgggtctggccagtggagggcgctccggacggggcctggctggcctttgccccagcgcaccttggtgcacagtaactgagtgccaggcctggccagcgaagcaggtgtccactgggcagggcggccacccctcacctttccgcgccgcgcctgctcggaggcttagcacccccagggccagccccttagcatttgccgagctccgagtgcccaagaggctggggaggaagaactgaggcacgccgcggagggccaggaactaggctggggcgggtcgaggtcaccactggatttcgggccacagaccctgctaagcgactcccactgtgaatcagtcctcagacgaggatggatacccacctctcggttcctcctaacccccgcccgggagcttctgtcctctgcttctcggctcctccctcccagaggcaggtgggtggaaaagtgacatctggtgttgttccagaggcgcccagggtccccagcaccctcccctccgcccccgccaccaaggcctcggagaagctccggtctcagagcccgggcgggggaggggggagcgctccgcctccatgagtcaatatttgccccgagcaaacgggcgcctggacaggtgtgagtgtgtgtgtctgggggcggggactgaacaggcagtataagagcacacggagcccgggctccgggacaagctccaaggcgtgggctggggacgaagccaagctaggctgggccgggcggaggggccaggaaagccgggcggagggtggctgggaaaggaggggcgggccaggtgcgcacctgcggtggccgccgcggccgccgacgtgtcagccgcagatgcgttcaggtgagggcggaggctagcggggcgctgtgcagcactgagctcgcggaagaccaggaccaggagatcaccgagggcgaccgccaggccccgggccctccgctcccgccccgcgacgagcccctcgcacaaaccggacctgagcgttttgttcgttcggctcgcgtgaggcaggggcggcctctcagcaccagcccgggggccggcctgatcgccacgcaggcacctgccgccgccaccgccaccgccatctcaaccgtacgggtgggagaggctgtgcgccgctccaggggagatccggctcccatccggccccacccgccctgccttgccctgcccgcagcttctgggctgccaggctccattctgcgtcgtaatacgggctgagccggctccagcgggtggcgaagggggccgtggcccagaacagaaacccttctggaggtggaaacccggattctagtccgcctctgtccccgcgacttctatggccttgggcaagtcatttcccggcctcttggttttcccatttgctcagtgaacggttggtctggcctcccgcaggggctaggccctccccagcctcctgtcccggttcctgggctcctggtcatgctggggaagatgcaggccctcacggagttggagccaaggctgaggtgtggaaaatctgggcgggggaagctgagggccaccatggagcctcaaatccactcctcggatctctgtggtgctgctgacatcctgagatgtcactccctgacactcccttggtccctctttcagtctaaaaacgtctgagacagtcagactgactgaaaaggacaagcccccaggcacagcggttcaccaccttcctcaaacctcagaatcccacatcctcgcttccatcagctggggtggggtaggtaggtggccctcagctcaggcagaggcagccccgggagatgggaaccagggtcagaagtccctccaaactgcatgttcctagaggtgctggattgtcccctccaccaccacccgctctagtgcccctatgtcacccaactacccagaggccccaaaggatctgctgagcccgagtccgtggcacagagagagaagggggaggggcgagatggcgttggacagatcccaggcaggtttagggagagggtggactacagcagggctcttcgtggagcagccccaggggcaggggaaggtccttgggtcctgggctagggtgtgtgcagccctctcctggcccccctgaccaggctctgtcctgggccagccctttactctgcctggcactgaaagatttgcctgtcaggggcctggcatggtcctggtgcaccttccctgtgtctttgagggcttccccttccctccccaaccatgtcaggggccaggattccacatcctgggtttgcacaacaaagagatctctgcttggaatgaccccctcccaaacacacacacacacacacacacacacacacacacagccttgaggggagggtggtgagaaggaggcagccacccagtgggcggggatctttcctggtgactgagaattactgccccttcaccccagggcctaatttccccagtccccca

SEQ ID NO: 1880481 - DNA, 4001 bp, Homo sapiens
ggccacagctcctcaccttctccccattccagccccacccgcccgggcgcagaaagagccgcgcccccagccctcccgggcaggacagccgggagcgcacctcgagggcccgggcagcggtcgagtggcagctgcgtccagcccatgcgggagctgctgcgggttacgggtggccccagctccaggctcctcctccagccggtcccccaccctccaccccttctcgactccgctctgcaaatcgaaggctttccggagcagcctaggagcggccgcgggcgcagcgaaggcggcaggaggagcgcagcagccttcgggcagccgcggcggcgtcgctagagcagccggggaggcgccgcggtgcccggcgcgccctccaagctaggagaggggagaagccgggggctgcagctgggcaagggggaggaaagtgcgtgtgcgtgcacgcctgtgtgcagggcagagagtgcggggggcgacagtctcggcttagggcggaggagagggcaggggaacggcggtgcagctcccccgctgtccccgaggatttcccgcggcagccccgggctccccagtgcccctcaccatggacttgcgcggagttgggacgggcctcggcagcagcaagcggctggctgccgggccctgggggagcgcgggcgcgcgcgcggggatggcgaggtaggatggccacccagcgcgacccccgccgccccaacccagcggcccctgggcggtgccgctgactcgccggagcgcacaggggtgtgggcggaggcggcctcgccgcgcccgcgccttcgggagtcgcctcgcctcttccacccacttgcacctgccaccccgcggataccatgtcgaaggcggccggaggcgcggcggcggctgcggcggcggcggaaagttgttccccagccccggccggctcgtccgcggccccgcccgcgccggtggaggacctgtccaaagtgtcggacgaggagctgctgcagtggagcaaggaggagctgatccgcagcctgcggcgcgccgaggcggagaaggtgagcgcgatgctggaccacagcaacctcatccgcgaggtgaaccgccgcctgcagctgcacctcggcgagatccgcggcctcaaggtgagcgcgggccaggtggggaggcgcggcgcggctgggagcggggtgccccgaggaggaggcggggccaggcaaactttccctccctccctcaacaggtgaccctccccttctcccggtcggcaccccctacccccagtccccagcccctgtgtaacttttccaaacttcggaggcgtctgctcccctcctctccccaacacggggcgctccactgtctggctgttcggggaggcgctgaggacgctggaaagcagggagggaggtgaagggcacgcgaacctttcatttcttagggaggctggaaaatctgtgcctggggagccgggtttcagtcagttaggcggaaaggccagtgagggggtgaatccaggggatcttcgccttggagggtcgggaatgcggctgctctgggccagcagctcttgggcgggcagagggcgaggaaagggcgccactgccagggagagcggctggcggggcgcccgggagaagcagcgggcgccaccctcagagcagtcttgtgtcaccgggtacataggagttcaagctctgccttcacgtcttctcccaattcctgtgctttccctctcccggagtttggaaggcatcccctggagttgccttactccccttcccacttaaccccaggttgactgggggaaagaggaggagcaaagagactcagtatggaaggagcagcattttgacagagtaccccaagtgttggtcagtgatggtttctttctgagccagcccccctgccaccctcttctaggaaaagaagggaaacgtaccccaagcccactaactttcttttctccttggagagcgccgggtctgcgaggagtgtgcctgcccagctgcagtacactagtggccgggaaccgccctgctggcgagcaccacaaacttcctctccttccagctagcgctggtgcctcctggtattccttcctctcattgttctgctttgtttgtaggaagccagacacaaacgaaatcactgcagggacttcagggagcaaattcccgaaggcacaagctgttcttttcccctttccactcctatccccacatatcagacagtagatgctgttccggaattgcctcagtgctccagctctgggattctggggcaagaaagagtgggaagagtggaatgctcaaggctcacctatgtgctgggcccagttcaggtggagatggccgtctcccgaggccgaaagtcattgtcatatagtccctagagtgggtgcaggtaggaagattcctccagtcagaaaaatgccaaggcttactctctcctgtggttgaattcattactaacagagtgtttattaagtgccagtctctttggggaatagaggcaggctagtgtagtaggaagatgatctcagaggtgggtttgaattctagaaacctcatttgccaggagggtgagcttgggtaattactttctcagatcctccttttattcaccaatacaatgcaatgataataactttctgagggtgttatggcaataagttatgattatgtaggggaaggtttaatacttgactataaaatggtagttactgtcatcaggaaaggacttacaaatctatggctgtgtgtccccaagattttggtttcttaggcagagctggacaagggggcattagtttgtcatcctctaatttgagtttcttccatggtctgaacaatagtgtgatttagaagagttggaagagttattattaaatgttttaatagtatggagcatcaaaataatagctcagaaacacttgaaagttcctttaggttatgtggattgactgtgtgtgatgtctgtgtgtgggtaggggaggggaatggtagagtgggttggtagagtgcctgggcttcattccagtagcttcatgtagagaagtagctattaggtcagctaaaggcccgtacacccaagtaagaaagtctccttgtgatctagattcatgacctggcattaaaagacttgccagtctacttccttatcaagttcagaaatgatgggggcaggttgctttctgatgcagcttctactcttctcatgtcatccctgggctgctgcaaggagcggactcccaggcttctggcccaccctgggtgtgctgtggttttactctttggagaggccagccttctcccttctcttttttattttggctcagagcttccttggacaccatagtaatccataaatgtggttgattgaataaatgatgggtacatatatttattttggcttaactggaagaaaagaagtatttttttttgttaagggcgtgggggagcgtctgagggcttggcattctcagttgagaactataaatgtaggggaattaagaccataatacattttcttttttatgcctctttctatgagctgactttgaaattgcatctaaatatttgtaaggctaccaggtgttattgtagctgtggacacaggagatggcagcatcagttctttacttttcaggggcctgtggccgggtcctagcactgattgacttgtttgtgtttagatatttgggaggcagggcagtgcaggggccctgagaagtggaaagataaagaatttggattctgataatttgggcagctttggccaattgttaaactctctgtctctcggttttctcatctgctcatggggattttaattccacatgaggttttatgaggatgaaatataccatagatgaagaaaccccagtgaagttagatagttttctcaaggtcacacagacataaagtgttcaaaatcggcctgctttccttttcttttggctagttgacattctttgcttagaatgtgtggtcctggaaggggtggatgaggga

SEQ ID NO: 1880482 - DNA, 4001 bp, Homo sapiens
ccactaggatttcaacattgtgttagctgcctggcccctataagcaactgcatttgtgaccttaatttagaagttaggtaagtgcttggtttaccttgttttttacagttaatttcttgttgaactatagcatatatactgaaaagtacacagggcacagcctgatgaactttttataaagtaaatatagctatgtgatcagcactcagatcaagaaacagaacatccctaacacccagtaccctcttccagtaactgtcacccacaaggctaattaaccatcctgatttctaacaccccattcaaatgttaacagttgctgaaaatgtccagtagctagtgaaagagatgtttgcactctacagataggaaacaagatattgagagatggaactgttgatttaaataaaattttggatgaaaattttcctgatttaggggtaggttcggtaacgttaattgttgtgtgtgaatggtttggggataagaggaagcaaatatggaaaaacgtataatttggagatttataagtatatattaaatgattttgtcctccaaaatgataattttctttgaagagagacttgtgagtatcatctttatgaattagttttaaaatataattcaacatataagaattccatttattcaacttttataatattgtgtcagtgaaacacaagactctgcctgttctccaccccattccattcttctggtctgatatgtctgcttcttgcacattgacagttctaattatacacattcaaaagggttttgaatgccaggtaccacaattcaaatatattagccacaaatttttgaattacattagccacaaaatctcactgttatattcatgagtcatgtccatttggaggcctataagcactagaaaccaaatgagttatctcagtacatttaaatggctacagagtgtatatcattttttgcatgattaaacttaggattgctttttgcaagttttaaagattctctgtaatttttttttttttttttttacaactcatgaccctttttcccccttctggagtatataaatatgtgtaaatatatatgtttaaatgttttattttttaaaattttttttgtatttttgtttttcctctagataaaagttaaacagctagaagaacaagtacagtcttttactgacaccagcttacagaatgatcatctacgcaagatgaataagtatttacagactaaatatgctcaggtgtgattaatatctacaaaagcggattgctgctatatttcgtttttaagaaattgtttgatgtctttttccccactttaccacacaatcccagaaagataaatatgctgtcacttgactcagtttaacaaactttttttcaagcacctagtacatacaaggttctgctaaagcctcagaaattgtaaagatacctgaagcaggattgagacattcaacttgcttattatagttaggaaatgtactccataaactttattagagaatagaaagttatgcttttcagaaaaatagattgtattactgaacattcatagggagcattattatgagtagaagcagtgagaaatgctttcataaaggcagtgctttttaaaattttggcagttgtgaggaacaagtatctttgttttttgaattaaaggcaaactcagaactcagtgccaagagggtacacctgcagcaggcagatgctcacctgaaagaagtattggtaatgaaagtgcttacttgtcagcatggtggctcttgaagctaaaaacctttcatagttcacataatattttaacgaatgaatagaaaaagttaagcaagataacaaaaacatttagtgaagaacataccccaggaaggtgttaccagaagaaagtgactcatttcaattatttacaaatttagcactcatatcattaggttattttttaaatcattaactcttaataaaagcatatgtaacttctgtgtctatgatatttgtgtatctatacccctggtaaccaaggaactaaaatatgttttcaaatggaatactcatagagttctaaccacttgactctgctgatgagtgatgaggtcacagagttgttaaaggaggcctcattagatgcgctctctgacagggaagttggcataaggtctgtttctttgctgggtcatattttacagtgtgatctcttcactctgaaagcagagaaacacattttcaatatattttccattacggctccttctagaacactgtgttgtttctcctagtaaaggggctattccttgaaaaataactctaggtttagctgattttattgtttttattaataattgacgatgcctctaagaaaaaggaaatccccagagaggactgcatcttcaaaatcccccgaaatctctaggtcccatgtaaacagtataaaggaaagaacgtcatcagttggtttgcctagtgttattccaaactctacacgccgtgtgagctttgcacctaacctgccttctatgaaaacatctcaggatattggagactctaggatctctctaaagactcttttgaatgctattaaaaccatggagggaagactggaaggcaaaatagagattctagcctcaagacctttaataaatgatgaatcaccaaattttcttaaacaggactcggtaagtgaagaccacaaattaaatcttaaggaagttttaaatttatacaagaatgaaatattaatccagaaatataatgcttgaagatatgactaacaaggaaataaggttcttcacaaatagaaaaaagactaatatagattgaaaccattatcctagccatcacataattagttttagacatagaacatttggcgtaacagtaactactgagttttttatataattttgattttttaaaaaattcaaaatttctacctaatcttaacatttgagctaaaatgcttggataaagcctcattttcaaatagaaaattaattcaagaaaccccaagaaatttaacattggaaaatattttcttgagaaaacttattagagcattcatctttatctgatatttagaaatagaaaatactatagcttatcttctagagtgggctactattaccggaaggagggctgtgagtgttagttgtccaggtccttggtgttttgaacaaagaattgaaaaaatcgcgcaaagtaatgaaggaagcagcgaaagcagggatttattaaaacgatgaaagaactccatagggtgtggagttttctgggttttaagtactccttttgaggtccctatggctacctcttatctggatgaaggatttggcctgtggctaattaaaggctcaggtgaattgatgccctatgctgatgaagggatggcccatgcttggctccgggccaatccaagacactctccctttccatctgagacatggtggaagcgggaggagtgtagggagagtagtagcctttgatcctttgctacttgctggggagatggggtttttccttttggtgtagcttttgtaagttggtgttaattggacttagcttcccggtcgcaagacccaggtgttttccttttgatccagctttgggaagtcagcaaaaattggcctcacttttcctgtccccagaccttggtgtttttccttgatccagctttaggaaatcagcatgaattggccttaggttccctgcctccagaccctattctcctgcctcactactatttagatgtcttctgtaaacatctagtggcatttttgcatttatatgtgtgtatatacatactgatatatacatacacttaaaaaactggtagaatttttaaaatgatattcttgtatacttttctagaacaaaattcagtagattatcaggacctgtaagttgccgtcttttgcacttttctgggatccttttctgtagaaaaagttaaatattttaaatgttacaggttcaagtttaaggatgttttataacgttgaggtagat

SEQ ID NO: 1880483 - DNA, 4001 bp, Homo sapiens
attttaaaataagagacaattcctctaattgacaacaaaatcaagtaaaggaaaggaagctaggatttttcttctgttatcaaacatgtaggagcatatagccacttttctggtcatcagttgaatactgaaaatgtcaatcaggtgcaacttctttgttgtgagggtaggcaacaaagtatgcaaaagccagaaactagtggcttgcaggctttgatatttaattttacaagatcaactaaagattctcttttttcagtcataaatacctaggaaagtgctatatgtgtttcatgttcttgcacctcatgaatgaggtcgtgatagctgtggtggcaatctctgaaattcttcccagaactcaatccttaagaaccaggagtatagtttataattaaagtgaaaatttattttagaaagttcaattttagaatctataaaataaaaaacaaaaaccccaagcctacgtaagtaattttaacgtaaaatgttaatggccccaaactctaatggtggaataaggacaataacatgaagtatatgatatttgagataaaatatagctatttaagaaaagcttcttactctccttgagccttcatctataaaataaggataataaaactgtgtcattgtgttactgcaaagattgattaaatagatacgtataagatgcctaggttatggccattttttatatttaacaaattcctaattctttcttgtttctacaactgtactaaattattttaatagctgcaaaagtattttaacatattgactaaccatttctctgttgctagacatttggactgttttcaatggtttggtatctcttcgtatataaatttcagaagacattcggacctcctgtaaaggccaggtaatacatattttggggcttctgggaccacataaggtctctgttgcatattcttttaaaaaatttcttgttttcttttaacaacccttctcaaatacaaaaaccattagcatgagggctgtgtaaaaacaggccacagactagagctggccctccaacagcaatttgcttagcccttaattgagagtttttaaccagtctgggcctctttggaagttcactctaaaggcataatctcaattttagaagctggcaacacccaagagagcaattgttagtctctagtcccatggatgtggtgttcttcagattcctctgccaatatttttcttgttaggaaagcatgatgtgaaagtggtgacaggatggagaatgacaatggccagtgtatgtgagtttttgtctaagctaattcttatgcaagacaccggctgaaacaggtgaggagcacttttcacgtgctatcttccagaaatgaattcaatctgtaaataactgagatgtcttcacagctcttgggtaatttttgtctgtagcaataagaaactttatctctattaaagttaggaaggggttaggatccagtaatgaatgaaatgagaacttaagttgcaactcagtttctgtacttacttgtgatctagcattaaacacagtgccaggcacgaaataggtggtgagaaataagaaaatgatagagctatttgctctaatggttagaggcaatgatggtcagctttgagttactttggtgaccccgcagggaggaagagcacaggtggaacattagaatctctttcaggaaaaggatgccgctggatccatcaggtccagtagcactgcccatttctcctgctccaaggcatctgccctcgaaagcccccaggccacacccgaggacaccacccagggttctaggacacctcgagggcggacgtggtttggctctcggtccagctggaccgggctgggccaaccgggagtcagctcgaactcacctgcttggcaggtgcgcgcttcccgaggcgtgacaagggagcgccggcgcggtgggtggggggcagagaatgtgaagctccagacgcatggcacccgccgccaagtcgccgcggtggctgccgggatgcgccgcagcgaatggtcgcgccgggcgccgctctgagtgacctttcacccgcgcccagcggttccgggcggcagcacaaggcggtagccatggcggaggcggcggctgcagcgggtgggactggcttgggcgcgggcgcgagctacgggtctgcagcggaccgggaccgggacccggacccggaccgcgccgggcggaggctgcgggttctctctggccatctgctgggccggccccgggaggctctgagtaccaatgagtgcaaagcgcggagagccgcgtcggcggccacggcagcgcccacggccactcccgccgcgcaggagtcgggcaccatcccaaagaagcggtgagtagcggtatgtggaaggagttagcgtcgagggaccaggccgggcctgtgctgcaggagggcacaggcgaggtgggaagggaagtgacacgggtgggcggaaggcatcccggtccctgaaagtagggacccacctctctttcgagagagtggactagaccctggattctgtcaggaagggggcgggatgggatggtggattttggtcactatgtgagggtaacaggcttgaagaactctcgttggagaagggtttaaaggattcctttttcctgagcttttagtgccaggaattcattttttatcttgaattaatacttttggtgctgaggtcttggaatgggtagcagaggttctatttttctccgaggagatataaatttgtactagatgatagatcataggaatctctctcattcgcgaaagcctgctgtgggggaaactggtggtgccctggaaaaaggtgctgactggtttctgtggggtaagttccacttgcttaggatcaagatgtattgactttgagggaggaaaccgatgaatggtaagaagccataaactgcaaacactagctagtggtttaaggtgtggtggtatagctactgagctctgtgtaaccagaagctaaaagacaagagtctaaccgatgagggatgtttgtaagagatcttgactttcgatgtttttggagaaatctttttttttttttttgtatttttagtagagacagggtttcaccgtgttagccaggatggtctcgatctcctcaatctctgatgaaggctattaggagaagctactttctgacgtgtggctttgtcaccgtggataaatggataaaccgagagtgaaaaaaataagtagctaatgtttaaagtgtacttttaagtgtgccaaagtgtgctaaatcctttgtttcttcccaagctatgaggtatgtgcggttttctcccattttacagatgaataaattaagtctgctggagtcttagcagatatgctgtgtgacaggttagaatttgaaagcacatcaaattgacttcatggccaagttcctaagctatacttgcttctgatgaattaattcaacatacatgagtctttacaaaatacacactgtaccagcaatacagaaatttaaaaatacggtatttactcttaaggaaggaatagcttagtaggtaaaattataatacagcgttataagaaacttaactgggaactataccacctggtcatttaacccagttttgggtttgtgtttgttagtgcaaagatgttccaaagtaaagattgtctgagtaaattttggatgtttgcattactaatagtttgccaaagggggaaattgttcttggcatacaaacagtatgttcacaggtaaagaagtgagagacaaattagggaactgctgagactcaagtgtagtaggagagggtgagaatgacaggggacgaagactggagaggtgaatcttgtttacaggattttacgtggggcaatacatgattagatttacctttgataaaggtcacactgggagcaaattgaagacagttgagcattttggcagtataatggctgggaacatagacctggatttcaatttccactacaccgttacagctctatgatcttgg

SEQ ID NO: 1880484 - DNA, 4001 bp, Homo sapiens
gagttaacaatttccttgaaatcctgtgaaatagatttgcacagacaccttgtgagtgattggtattggaggtgttcaagaaactgttcgaaaaagaacaaaaacacttccctcgttattttctctcattttttgatgagaggaaaatttgaaacattattcttgttgttgttggtaatagcataatgacagtgggaggggtacaaggggataagaaaaatgtcatgatttttttccggtcctgccacatgtaacacttactctgttacctaaattttatagttagatcatatccaatctacttattaaactgtgttctatttaccagtggagtttttctgcagtggttgcgtttcactgtaaggataatggagttcctctcctctgctttcctcagaggatggtcctttaacatagccagaaacaagccctgtggtttgaaggtgagctgtgaggatgggactaattgatatgcaccagtttacaaagacagtcttatcatccgagaatacaccatctttttctctggataattatttcttacatcatgcttgattcctacattttgttgggtctcaacattggctcacgaatgctgttaatatttattctgtattgataaaaagtctgtcttgccactacaagtaaatcccccatttaatattttcttctttagcatagcactgtcattttttgtgaaaatggttatgtttatttattacaatactgagtcatatataaattttcaataaaagcagaaactttcttaccttaaacacggctgctactttcttgcaatgaaaacttgacattggcttgaatggaagtttgtctatccgtaagacttttcatgtggaaaatggtcctctggaacttagggcaggatactgggctgcatttgaagctgaataagtttacaccatcccagagggggccctactgacacacgaatgcgaattgaaaagtaattagtcatattcttaagcagtataaactatcatgtcttttgtaaagggtcatctctgctaaagatttgaggaaatttgtgattccacaccaatgaaaaaccaatatttatatcttgaattttccacgtcattactttgaattgttagagttttgaagtcgtattagggagagtcgtgtcttctgataaccggcaagtctgtaggtactgaagtgaaaggaagagggttattgttggggggcggggagaatgtatgcaggtatgtgtgtatgaaatgagggaaagagaacttttaacaagaagttctaggctacagaaaaaaaaaaaaagcgattctatgctagtttccttcattcccccacaggggtgtccaaacaaagaaagcttgttcaacaagtccagaaacttagagaaaaaagtccactagcatttatacttcagcgtagatcgtatgtatgtgcacacaaacaaatttcgttccaagtatgcagccacctccagttgccagtctttcaaaatgataaaaacttgctacggtagaattccttcatgatgagcatttcttttaagttattgaaaagttattttaagtaaatgaagtcggtatttgccctctttattcgagcacgagagcagagagagagctgctgctctctggggaacgctctcagaatcccgttctaaccccgggaaaactcagcagacagaaatcgcccgccccaagcagcctggggcctgggcggccaacagcacccacccagtttacgcttgattcgaggaaccttcactcccgaggggcctcgccgaaaagcagctccttcgctcccgaagccgctcccaatcggccaactgacaacccttccctcgccccagatttgctaggatggtctgggaccgccgggcggcccctctacctgccccttcagctttagtcccgagcctctcggggtttcaatttgggctgctcggtggcgcccgaacgcccctcagcggcggtggagcgtggactccggcgcctggcggggtaaggcccgcggcaagggcgctgcatccggacatcgctgcgtggtgcccagacgctggctcccgagaacgggcacgagcccagcacgccggaggacccggaactcgaaagcccgcgctgcgggaaaagagactatcggtccgagggtcgcagaggagcaggggcgttggcagcgggcttgcttgggcacagtctgcgggccggagcagaacttccgcccctggtcagatccctcggcctcagatccaaagccctccccttgtcccaagtgtcctccagagcctggccgggcctggaggtcacctggatgctggatccttgtctccacacccagctccctcgccccttcccggctcgagggccttgagctggacggcttcacctcctccagtggtgtccccacttccccttcccgcaccgcggccgatgctggaacggtcatggcttctggcccagcatctcccacctggacatttgcctagcgacggccgcctcaatcctctgcgctgctttcaagaaactttcatcccagtctctctccctctccactctcctccctctccccctctcctctttcttttcttaatcctggggttttatgggctgagcgttaagaaaattcgcctgcaatttgggattagataaatactctaattaggaaaaaaaaaatccgtgctacttgatacctcccaacttccccgagaatggtggcagcatctggaaccgagagcgccggcctcccgcgaggcgtaccccggggaccgcgctggcacattccagagcgcactgccgtcccacctcgctgcgccggacccaggtcaggtgctgaggctgcaggcgaaacagggcctggtggagggaggaatgagttaaggtggaggaatggggcaaggtcacgcgccccggcactggagggccaaccccggcacacagcggactggccgggactagggcagcgccgggctatggacgcggacgccggcgaagcgcaccccgggacgtccgcatattctttcccccaaaactagtgcgctccagccggcgcctttcctcggaacctaaggaaggggtatatttcgttgctttctttaaacctcagcacgatcacagtggctccgagccgcgggcggctgaccgcgggcctcgcgggctactcctggtaggggcctgcgcgagcctaaggtgtgtccccgcctgggttagcgctgcgctctgcactgtttcttttcctcttaaagcttctttctcactcactctctccctccttctctctctcattttttccccatttctctcgttcttttattcagctttctctctttctctcccttttgtgaatgggccgcggtgtctttgttctgtagagaagcgcccgtgtcgctgacttttgtgaaccagagaaggatcttgtaaaacctccttttctccttcgtacgcccccactcccacccctcctcccctgcctctttgattagatgttccctcatcgtcaaaaaaaaaatgtaatttcgttggtctggcggccactttctttgaacattagctcgctttcagctccaacttcaattagaaggagttgattttgagagatcaacaaaagaaccgaccaaagccttattaaaggtcctaagaagatctcccgggtcctttgagaagcagttaaggaaacagtgtgccctccatcatattctgttaccgtattttattcggactccaaaggaaagtgtcgcttgggggagggggaagcactttgatgagcggcggccgcggccccttttcactcagcgggctcccccttcgttctcctcctcctcacccagcgcccggtccgctctcggcgcccgaccccgcagcccgggcagcgcgagtgctccccactgcgatgcgcctggaggctccttgacttgccctcacacttaatcctgtgcaaactttttaccccgcctgtcggggtgggggagtgggggagattagaaacaaggggtagaaattcctcgaaagggaataaag

SEQ ID NO: 1880485 - DNA, 4001 bp, Homo sapiens
attggcttgaatggaagtttgtctatccgtaagacttttcatgtggaaaatggtcctctggaacttagggcaggatactgggctgcatttgaagctgaataagtttacaccatcccagagggggccctactgacacacgaatgcgaattgaaaagtaattagtcatattcttaagcagtataaactatcatgtcttttgtaaagggtcatctctgctaaagatttgaggaaatttgtgattccacaccaatgaaaaaccaatatttatatcttgaattttccacgtcattactttgaattgttagagttttgaagtcgtattagggagagtcgtgtcttctgataaccggcaagtctgtaggtactgaagtgaaaggaagagggttattgttggggggcggggagaatgtatgcaggtatgtgtgtatgaaatgagggaaagagaacttttaacaagaagttctaggctacagaaaaaaaaaaaaagcgattctatgctagtttccttcattcccccacaggggtgtccaaacaaagaaagcttgttcaacaagtccagaaacttagagaaaaaagtccactagcatttatacttcagcgtagatcgtatgtatgtgcacacaaacaaatttcgttccaagtatgcagccacctccagttgccagtctttcaaaatgataaaaacttgctacggtagaattccttcatgatgagcatttcttttaagttattgaaaagttattttaagtaaatgaagtcggtatttgccctctttattcgagcacgagagcagagagagagctgctgctctctggggaacgctctcagaatcccgttctaaccccgggaaaactcagcagacagaaatcgcccgccccaagcagcctggggcctgggcggccaacagcacccacccagtttacgcttgattcgaggaaccttcactcccgaggggcctcgccgaaaagcagctccttcgctcccgaagccgctcccaatcggccaactgacaacccttccctcgccccagatttgctaggatggtctgggaccgccgggcggcccctctacctgccccttcagctttagtcccgagcctctcggggtttcaatttgggctgctcggtggcgcccgaacgcccctcagcggcggtggagcgtggactccggcgcctggcggggtaaggcccgcggcaagggcgctgcatccggacatcgctgcgtggtgcccagacgctggctcccgagaacgggcacgagcccagcacgccggaggacccggaactcgaaagcccgcgctgcgggaaaagagactatcggtccgagggtcgcagaggagcaggggcgttggcagcgggcttgcttgggcacagtctgcgggccggagcagaacttccgcccctggtcagatccctcggcctcagatccaaagccctccccttgtcccaagtgtcctccagagcctggccgggcctggaggtcacctggatgctggatccttgtctccacacccagctccctcgccccttcccggctcgagggccttgagctggacggcttcacctcctccagtggtgtccccacttccccttcccgcaccgcggccgatgctggaacggtcatggcttctggcccagcatctcccacctggacatttgcctagcgacggccgcctcaatcctctgcgctgctttcaagaaactttcatcccagtctctctccctctccactctcctccctctccccctctcctctttcttttcttaatcctggggttttatgggctgagcgttaagaaaattcgcctgcaatttgggattagataaatactctaattaggaaaaaaaaaatccgtgctacttgatacctcccaacttccccgagaatggtggcagcatctggaaccgagagcgccggcctcccgcgaggcgtaccccggggaccgcgctggcacattccagagcgcactgccgtcccacctcgctgcgccggacccaggtcaggtgctgaggctgcaggcgaaacagggcctggtggagggaggaatgagttaaggtggaggaatggggcaaggtcacgcgccccggcactggagggccaaccccggcacacagcggactggccgggactagggcagcgccgggctatggacgcggacgccggcgaagcgcaccccgggacgtccgcatattctttcccccaaaactagtgcgctccagccggcgcctttcctcggaacctaaggaaggggtatatttcgttgctttctttaaacctcagcacgatcacagtggctccgagccgcgggcggctgaccgcgggcctcgcgggctactcctggtaggggcctgcgcgagcctaaggtgtgtccccgcctgggttagcgctgcgctctgcactgtttcttttcctcttaaagcttctttctcactcactctctccctccttctctctctcattttttccccatttctctcgttcttttattcagctttctctctttctctcccttttgtgaatgggccgcggtgtctttgttctgtagagaagcgcccgtgtcgctgacttttgtgaaccagagaaggatcttgtaaaacctccttttctccttcgtacgcccccactcccacccctcctcccctgcctctttgattagatgttccctcatcgtcaaaaaaaaaatgtaatttcgttggtctggcggccactttctttgaacattagctcgctttcagctccaacttcaattagaaggagttgattttgagagatcaacaaaagaaccgaccaaagccttattaaaggtcctaagaagatctcccgggtcctttgagaagcagttaaggaaacagtgtgccctccatcatattctgttaccgtattttattcggactccaaaggaaagtgtcgcttgggggagggggaagcactttgatgagcggcggccgcggccccttttcactcagcgggctcccccttcgttctcctcctcctcacccagcgcccggtccgctctcggcgcccgaccccgcagcccgggcagcgcgagtgctccccactgcgatgcgcctggaggctccttgacttgccctcacacttaatcctgtgcaaactttttaccccgcctgtcggggtgggggagtgggggagattagaaacaaggggtagaaattcctcgaaagggaataaagtgcctaattttcaggaggaggtgccatttaaaagattcgcctagcttagagttggaacgaaaactcttttttgcacttttaaaagtccacccaggtagacgtgtttgggaagttttttcgggtgggaaatgggcttcgcccgtacgaacaatccggggaaatcgcctcaaggaggatccttacgcagcatgtggaaaaaagttgagggcaggggtctgtggccacattttccatcaaaaagtccctgttagaggcagtctaagaaagagagagaaagagcgaaaaagaaactttcctatcaaaatgtttcaattaagaagtagggtgtacgtgtgaggggaagaggacgctgggctccaacgtttcagtagaagcgcttaagacttgcaaacacccttggtggggacctggaaccccgggagatgccgacgagcaagcaggtaagtggcggcgccctcccagtgggtgctcttcccaggcgcgagagtccggaggggccgaggagagatctgcacgcccggagctgctcccgcgctctgcaaagtagcctgcgccggcacgagcagcccgcggcgtcggtctcaggtggcggcgccggggaagaaaacgctggggcccgcggcgccgggagaggggccgaggcccgggctcctccagcccgccgcccccgggtcctggcgcccacacccgagcggctgagccctgtagcgcgcgggagagcgaaggaaccggttctccagcacctcgcctcctccctgccactccctccggagcgccgagagcgcgagaagggcgggggcgcccagggca

SEQ ID NO: 1880486 - DNA, 4001 bp, Homo sapiens
tcaccataaagttctaaatatagtctgcactctacccgaggatattactttcatctttgttaaccagaaaatagattaagcaaaggttagctggtgagacatgtacaaatcctcaagtcaagctgagtattctgagagcctaaggtgaattttttcttttcccttaaaagtacaacttttacctgctgagtgtaacgatctattttgacttgtgcctcaggacagagttcgatatctttggctccacagacagcctgggcaatggtccttatcttgtccacaattggaagctgcagaaacacaaattataacaaaattgtgtaagtttaatctggttaaagattttttaaaaagtttagtgacacttactgtaattgcttaaaattcccttatcagggtaccccctcagcaactgcaggattccttgcaaaccctcttttttccttttagcaccctaaagcactgaaattttcagtgtcagaatagatcagatgtcaaatagcaaataagccttaggtgttcaggcaatttagaggctgcttagagcccacgtagaatctgcagagggaggccgggcacagtggctcacacctataatcccagtactttgggaggcggaggcgggtggattacctgaggtcaggagttcgaaaccagcctgaccaatatggtgacaccctgtctttactaaaaatccaaaaaaactagctgggcttggtggtgcatgcctgtaatcccagctacttgggaggctgaggcaggagaatcacttgaactgggaggcagagactgtggtgagacaagattgtgccactgcactccagcctgggtggagtgggactccgtctcaaaaaaaaaaaaaatctgcagagggaagagggaagttagtgccttacagagggcttctgactaggaagccccaggactgcggctgaccccttcctctccctgcctcacccctgcagaaagatctgcagaaaaagctggaaggggtgggacggtgtgtgtaggggtggggactggggctatgcagtttccagacctggtctttggcaccctctacaggacagttccattcccacacctgagctttgggcaactgaatcctatgccccttcccatccatggaacctggtgccagaaattcccaggacttacccactgtccaccacgccacatagcaagtgtcctcagtgtctgcagaccagaaacaactcccttgtgtctcagcacttggccacctgctgaaaccccaaactgcctgccccattgtttgagacccagtcaggccttggctccaaaagtcctcttggactgccgctggcccccagggtctctcctgactgcacctcggtcccagagctcccacgccgctgggccccgagccccatgccccgatccagctgtggctcctttatgggggctttgctggcctttcctaagggaggtgttttcccgagggcaggtggactgctcctcagactaggggcccttggagggccaggcctgggcttctacctcctctcgcaggctggtgtttctctgcaaatatggctcgtgtgtcctccttcctctcagactggggacccctgaggactgggcctgagttcccctctcccccttcagaatgggggttccctgaggactgacccagggcttccccccgtcccctccatctggctgttaatctccaacacttccacctccagtcctattctgcacagctctccccagcgctgggggctcagaggcctcttcagccttccccagggctggggctcagggagggcttcctcaggccctggccccagagtcagcctgcacattggcttggaggacaggcctttcctctgggactgtgaggcccagagtgcccacccagaactccacctctgacctcacaaaggcctgcttcagaactcggtctccacggcactgctggccggacgagggatgttattttgggcagtgcatctgaacttggttcaagtggcaccagccaaacccctgccttactgacctctcccctggaggagcaggaggagcgctcgaggccgccctgggagggctgagaggcaggctctggactggggacacagggatagctgagccccagctgggggtggaagctgagccagggacagtcacggaggaagaagatcaagatgcgctttaactgagaagcccccaaggcagaggctgagaatcagaagacatttcaggagagtgagtggggctccaggcagggtggggatggggcagcctcctcagtgcccagatctggaagggccattccctgggtaccatacagtgaggaggtgactgagggattgtttggggaaggagccctggctgggagtggaagtcccggctttcttgttatggtgcagtcctgtgttgctgtgtgacacaggcacatacaccttctctctgggcctcagtttccttacctgtaagttggttgttgggaggaccagcagtagagcagagatggcagggatgcactgggctggactatcagcagaccatgggggtgggacgaagagagagctgaagaccaccagcagtggaccacagggggaggcgtgcaggcaggagacgggtcagctgccggcttgctggagtcattcctcccatgcagtcccctcctgaggggctggagctggggctggagggtttcagcagtcagggctggagataagagtctgtgctggagctagagggaactgggctagataatcaggaggacagacagggtgaggggacttcgggctaccttcatgctgtcagagataaagataggagtacaaaggggaatttttgggtgaggtacacgggtgaaatgagttttcagggcctcatcctgtgtgttcaccttctgtgtgtgtgtgtgtgtgtgtgcatgtgtgcatgtatgtgtgtgtgcaggtcctggacagtcgcagcttaagttagcagcaagagggattgaggttaaaggtgtagcacgcaaatatgaggctggagccactgagtagaggctgagggcatctccacagtccaaagctgggctgcagacagggaaggtcaggaggagcactggagggtctggcctggggttggggtcctggggccagcatgggtggggtggggctccaggacgtcacctcattggctgagcaccactcctccctccctgttgcttggctgggctaagggagtggcactagcaggagctgccccagggcttctcccctggggaccaaggtctgatggaagtgtggggccaagttctgtgtcctccagccctagtgacctctctttggctcctcagcatctacaaatctgaaggacaaaacatggttcaagcatctgggcacaggcggtaagtaccccaccctcttctcaccctccagccccctgtcctccacccagcccacttcagtgccctccctgctccatcctcagcctctcccttggggcagctgtccccccttgacctcctcctccccacccacccactcacctctgaggtcccagaagaaaagcatcttccacctgttgcctgggctgggtcctggggtgaggggaggctcagaaatacttggatgagggtcaaggcatgcaggtggccttcaactcaactgcactcagcacctctcaccctctcaggctcagctgtctttggggtgaaaaagagccagtccttgcaatggccaaggccctgcctatgtagtccttgttagctttctgacctccccactccagccccctgctctccctcctccagccacactgagtttcttttctgtttttttttctttttttttttttttttgagatggaattcagttctgtcacccaggctggagtgcaatagcacgatcttgggtcactgcaacctccttctcctgggttcaagtgattctcttgccttagcctcctgagtagctgggattacaggattacaggcacacactaccatgcccagctaattagttgttgtttttttttttttgtat

SEQ ID NO: 1880487 - DNA, 4001 bp, Homo sapiens
gggtcttcaaaggtgaataggatctagatattcagaataagagggctttccacaggctcagtgaatgggaaaggaaagtgtggctgattggggaaagcgctagcacagggagcaagagatggggcgtggctggggaggaatggaattgtaattctagcctcacaaaggctagagccagcagggccttgggatcatgtggggaggaaaccagagatgtgtggaacaatttgctgaaggcagaaccaggcagggaaagggcagggtcaggttcgtacccttgcctctggccaccagggccaatgctccttccctgcagtaaacccgattaatctcctcaaactcaggtgccatttccttggaatagtatttaccgcggggcgcggtggctcacgcctgtaatctcacgctttgggaggctgaggtgagaggatcccttgagcctaggggttcgagaccagcctgggcaacatagcgagaccctgtggttaaaaaaaaattaaaattagccaatagtggtggcacgcgcctgtagtaccagcttcttgggaagctgaggcaggaggatcacctgtgcccagagagggcgaggctgcagtgagccatcatcgtgccactgtactccagcctgggcgacagttcgagaccttttctcaaaaaaagaaaaaaaaaagttgttcaagttgtgtagtgcacgggaggaaagaagtatgacaataacataggacagcagccggctctttttttcatcaggatgtggagagtgggcgccttgggaagacgaaattgagtatgtgcgggggaggggtcatatgaaacaaggtcgggaagggggcggggagagctggggctctggaggagcttggggctcgcgctgcgggggaggaagcgccttccgcggtcgctggggggaagtggttaggaggaagcacgggcagtggaggggactgctggagggtcccatctgggaaagcaggcacggatgcggggacatttccgcccgtcaccctggcaaagcgctcgcagggctggagggacagagttctcagatccaagtagagaaaaccgggaacggttccggctctggggactgacattcatcgcggcagtttctggtggcaaaacagaggaaacaaaggaatgatgaaatgaactgagctgccttcatgccccggatgaatgttcagccattagaaaagagtgaatcccagctgggatttggggttccacggtgtactagaaaagcaaaacaaagagaagcgcctactagatgccatcttggaaaacaaaagcaaacgtgtgtgtgtgtgtgtgtgtgtgtgtgtgtgatgttacatgggcatggggaaattacggaagtaaatactaatgcttgtggccgggcgcgtggctgacgcctgtaatcccagcactttgggaggccgaggcggacggatcacgaggtcaggagatcgagaccacggtgaaaccccgtctctactaaaaatacaaaaagttagccgggcgtagtgacgggcgcctgtagtcccagctacacgggaggctaaggcaggagaatggcgtgaacccgggaggcggagcttgcagtgagccgagatcgcgccactgcactccagcctgggtgacagagcgagacgccgtctcaaaaaaaaaaaaaaaaatactaatgcttgtgtaaattgggatggtggaaaatgaggaagagggcggcaggggaatccttagtacttacagagaaaacggagcaagtgtacaagcacgccaacccccccggtgcccaagctcggcgctcacgcggctaggatgacgcccgtgggacgccccaggggccctgctcgcagccactctgctcagggtcatttatagtctctccgttctttgttaaataaagacggtgagacacggacgggctggagccggcaggggtagtggagggcagaggggacgggtcggggcgcccctcgctcctgccacgctgccgccgccccagacaaagacagctgcgtacggcgggagcgcaggggcgcctgcgcgcagggcctaaatcgcctgtcccgtctccccctgacgcccacacacccaagcggcagcccactccccttctaccccgcagccatttgcttcccaccccttgattttcttttttcttttcccctcccctcagcatccccccaacctcctctgatacactttggctaattgtctaatgaatttacctattctaggtatttcgtataagtggaatcatataatattcgtccttctgtgtcggcttattttgcttagtacaaggttttttattttttatttttttttctttgagacacggtctcgttctgtcgcccaggctggggcacagtggcgctcagctcactgcaacctccacctccgggtttcaagtgatcctcccacctcagcctcccaaatagctgggactacaggtgcgctgccaccactgcctagctaatttttgtatttttggtagagaccaggtttcgccatgttgcccacgctggtctccagctccttagctcaaacgatcctcctgccacagcctcccaaagtgctgtaattacaggcgtgtgagccaccatgcccggccacttagcataatcttttcaaggttcatccctgctgcagcacgtatgagaacttcatttcttttattgtatttgtggtaatatgtacacaacataaagcttattttaatcaatttttaagtgtacagtttagtggcactaaatagtcacgtggttgtgcactcaccaccatcatccatctctagaactcttccatcatcctaaactgaaactctgtacccgtgaaacaactccctcattcccctctacccagctcctggcaaccaccattctactttctgtccctgtgcacttgggagcatcacctttctgggacatctgcaacggttctctggaggattgtctccccttttttaaaaatttattttcttttctttctttcttttttttttttggtagagaaggggtttcacttcattgcccaggctggtgtccaacttctgggctcaaggaatctgcctgccttggcttcccaaagtgttgggattacaagcatgagccactgtgccccgcctgtggtctcattttggagggcaagagggatagagatagccataacctggagaatattgagatgtggacaacaaggatgacaaaatttggtcctatgagaaatcatctgtgaggaagagtggagagaactgagcttgttcaagacagtgaggtcctgggatgatctcaattcatgtaagaaaaccaggaagcaaggaggtttcagtttatcaacagatttaaaaggcgcaagccttttgatataactagagaagagaagactcaggtgatcacacagactgtcttcacccaagtgaaggatgattatgtaggaaagtggatagaagatgctgtcaacagaaatgtaaacagaatcatgttaacaatttttcagtaggcacttttttttttttttttgagatggagtcttgctctgttgcccaggctggtgtgcagtggtgcgatcttggctcactgcagcctcctgggttcaagcgattctcctgcctcagccttccgggtggctgggattacaggcatgccatcatgcccggctaatttttgtatttttagtagagacagagtttcaccttgttggtcaggatggtctcaaaactcttgacctcaggtgatctgcctgcctcagcctcccaaagtgctgagattacaggcgtaagccatcacacctggccaatttttaaattaataatgagaggctgggcatggtggcacacacctgtgattccagctactcagaaggctgaggtgggaggatcgtttgagcccaggaagttgaggctgcagtgagctgtgttcacactagtgcactccagcctgggtgacaaagcaagaccctgttgaaaaaaaaattttttaataatgagatatctgacattcttttttttacacttg

SEQ ID NO: 1880488 - DNA, 4001 bp, Homo sapiens
tttagtattttgtgtgtttacatatattatggtccagaatcccagtgaatgaagatgtgaaaaatgaattctagaaagatgaaacatgacaagactttaaaagaatgttttaaaagacagagaaatcgctagcctaattggtaggtaacttgatataaagttaacttcttcacttcaggtctcaagaatgtgcaccaaagtgagtcccagaggttgctatggcaatggaggtaaacctgattaggtcggcattcactctgctttctaaggtaaggccaggggaaagaacataggattcttttttctttcattttttagatggagtctcactctgtcacccaggctggagtgccatgaagcaatcttggctcactgcaacctctgcctcctgggttcaagcgattctcctgccttggcctcccaagtagctgggtctatgggcacccgccccaccatgcccagctaattttgtattttagtagagacagggtttcaccatgttggccaggctggtctcaaactcccaacctcaggcgatccacccaccttggcctcccaaagtgctgggatcacaggtgtgagccaccgcgccccgcctaggattcttgaatcagacaaatccccactctgtgcctctgttgtatttcctctcccttctcttctccctcatttgtccctcttgcctccccagttctctccttttaccatcttttcctccctacctcttagcctccgctgcacttgacaccatcagactgtgttcttcctgaatgccctcctttctgggcctccatagggtgctgcattttcctgagtgccttcctcaccagaagttctggagggcatcatttctggattcatcatttctgactgtacccttggtgctcaggacctgtccatgggaggtgccaaaaaatatttgttgaccaaatgaatacatgcatgaatgagtgaatgaagacaattcctcagtctcttttgtgggctcctcttcatctgctcacccttcaatgaggacattctccaagatttcgtgcttagttgctttttcttttcattctgtacttttgtcctggatgacctctcttccctttgccttaggtaacattcaggtgaaaattatccccaacttttcaactctaccgcatctatttttcacgtctatatttccactgctttcagttggacccatgctcaccccatattcaacttgtcaaaaacctcatccttttctttcccatctttcttcctcttaagagctccacctccattgatagtaccaccatctcctcaacatctggatttaagctcagaggacccttttactctcctcctgccctccctgattcctgtctactgagcacagccatactctggaagttcatcctttctttcaattccatccccactacccctgtgtcacttcccaccaagatcatcaccaaaccctgggacgttttcttactttgaatctgcacttcccgtgactgctgggtttcctaaaccacagaactcctcattgtcccatcatgctcaaaaacactttctgtttctcattgcctccaaaataaagcccaggcacacaggctcctcgcagtctcgttcgatctatctttcctgcttcatcacccttccccatagcccccactctgccatcttcaatctttctgtctctatcatctccatctccagccccatctccctcttcgtctctgtctctaagagccttgccaggtttctgcagccaacagtcccttcatgctgcctccatgaccactgacatttctcgcctgcccggatgccatctctcactgctgtcttctcaaactgcttctcctcctccagggcccatatcaagtatcacctcttctgagcagccttttcccaaaccttcagtcaggattgagggtgctctcctctgtagtctggtagcatctgacggtgcctccctgagagcacagcccacagctgtcaggtgcaggtgggtgggcagagggagacagtgaggtgctcctgaagaacttgagcacagggatagaatgtttctcctctagagtgagctcataaaacaatgtgtcatgggagagaacaaagtgcctgctagctcaaaggaacaatgcctttgactagcaacagctgtagcctgtagccaatgacgtcaaggaagctgcaaaaaggctgtgttaacagaagcagggctgttagaggaaggccagagtcaaagaagcacattcttgcattttccaatcttttccaggggaggaatgctgatgggggtggggaggttggatttcaggcactggagtggtggtgtccagcaagggacagggctagtttctcctctcatcttaccttgacctgaacaaactatcctgggggccccctgctgtctagtcgtgctcatcagaaagtctcagtgtaagtagccacacttgaatgtgcgccgtatcatgtagaaagggtggctctctagaaattattctagtccccaaaaggactattccaccccacatgttcatttctagcctacaagtcagtctgtggtttgggcatcttcagtccatcaagaactctgtggtcatgcccaagtctagtttctgggcctgcaagtcatggaaatgcccctgggaggcagccgtccagctgtccccctcagcagccagggactgccaccctattcaagatgctacagccaagaattagagttaactgtgcccagcagtgtcctcccacaagaccacaggttcgcaggctttttctgtagagggccatccagtcaaatattttaggttttgtgggtgataaagtctctatctacttaactttgcccttatagtgggtgctcagcagccatagacaatatgtaatcaaacaagcgtgtctggattccagtaaaacattatttactaaaataggtggtgagccagattggcccacaagccatagtttggcaaaccctgcagcaggtcatgagttcttgacagtagtgactgagtatttcctccttggatccactcatatatgcctagggcatattacatcctcactgtgtctgtggaattggactgaatgcttttctcctaaatggcccacaggcctttgcatagtagtgatcacggtgaacagagaaccatcccatctgaaggaaccttagaggtaccctccttgtcagcaaagagatccttctgtagtatccttgacgcatgacatctagttagcatccttctgcgatgcctctgcctttgtgtgatcatccatttactcgcctgatagctatcggggactgttagcatgtccaacccacgtgtgatgaactggaagaatgatccatccctcttgtgttgactgccttccaagagctactcagtaaatacttgctatacaactgattatactagtaagctaattttgtgagccaattttggcagaagctgtttgttttctgcagaaattttaagcaaccaaaataaggatttgaagcagagaaaacatattatctactaaaagcctacagtggttccttccgtggctgtaaactcagctgtgataccacctgccttctgccggctgggatgcaggctgcagcgttgcccaagagtcagtgggcaaatggtgctcctcccagcttggctactcggacccagggatctcacagaagcctggcaaggctgacagctctcagggggcctgtgtgggttctttccagtgcacacattcactctggagcaagcctcagcatgtggaccggggagagagactccctttggacagtgagctgctgaagaacagagactgagaattaattgtatttgaatcctaagcagatgaaagaattctgaggacacagcaggtgctcaacaaaattcccatgtattgccgcaaggagcatttctttcttttacttttttttttttttcaatgagacagagtctcactctgtcgcccaggctggagtgtagtggtgcaatctccactcaccgcagcctccgcctcctgggttc

SEQ ID NO: 1880489 - DNA, 4001 bp, Homo sapiens
tgtttattacttgggtgccattccatgcagattggactctgagggtactagagcatatccaaacccattgtcacagtatttgttggttaatgatgtgttcaggccatgatttttctgtaaaaaattaccagcatgctgctcttaatttttttcagcctgtctagttgttgcccttttgctctcatgcaaacttttcctcagaggtgaccctagaagatgggaccctttgtgatggactaccccaaggcaatatgccccaaaaggtcttcatttggggcataacccgtgccaacacaaaggtactttctcaattgtgtgtatggtgcctcacccaaacaatattacagatgcacttggctttcatcaacctaatttgatatgccccaagcacagcaataggacagttttgcgtggccctttggaaacgcttttctttacatttccaggacctaccatagttggagaaccacgttagggctgaagacagtcctagtatatcattgaccaaccacataaccccaaggtctgtcctcagccttcagaaggaacatgcttcttacaccgatttcagctcagtgatatgggattcaaatgtatgacctccaaaatattaagagaataacgtgtgttgttttaagccaccaagtttgggtaatttgttacagccatgataggaaacgaatgcatccactttgccaggtttacctgcttttataaagcctgggtttaaccttttatctaaataatggtcaactcttcctacatcacgagcatttatgtgcaattaaaagccatcattaaattaagccagagtattaatatattcatagatttcaccaccacacagtaaaacattgaagtcaaatgatttagagcaaaccacctggctcacactttcccaacggaaaaaggtaaggctcaaagtgctgagatgaacattctgtcctagcactaggaaataatcattgtctgcctcaggcttaagtttaataaatagcaaattgcatacagatatttacaatgatcgaaagacaaacagaggtcctatccgtgcagtcccaacaataaagacaggcattggcataaagtgtttataaattcttgggtacagctgttctgaaagtaaagttcactttcaatcctaaaaaaagtccgctattcctccagatgtgcttaaaggcaaatgtggactggaattacttggtgtcaatggggagcaactgctctatgccgtttattatgaaggactttaactcaactctccatcttcctccacttccaccctttcttggccattctcaatgattctcttggtggtgatttttttaccatcaactatttcagtggaagtcgacatggacttgaagctgcctgtcccatcactaccgtaggacatgcagaaggaagaaaggcccccacttcccagggagccaaaggaacgaaatcctgtatcaaaagaagaaaaaccaccctcaaaagctggaaattcactgaaggcagagaaaaggggtgcagaccctctgcttctgcttcccagggagttcctctgaccccccaaaatattctccagcgggtttcccaagaggtcaaaggagaatgggtcccggccgccaaagaactccctgaagacctcggcggggtcacggaagctgaagacctactcgaaggggtccttgaagggcctgccgcctgcgcagccgccctccgccctcgcctcgccatagcggtcatagatatcgcgtttctacgcgtccgacaacacctcgtaggcctcagccacctgcttgaatcttctcaccgcttcctccctgtcctcggggtttttgtcggggtgccacttgagcgccagcttgcggtacgccttcttgataccctcggacgaggcctaccggggtactcccagcacctcgtagtagtccactatgctggactgccaaagagcctgcggggcactggcacagcgagcggcaaggctgccagcacccgcgcacaggtcagaggcttggcgacctgggccgcctggagggccgccccttatgacgcagccacatctcattggccgaggcctgtgagcgcctcgcatcccaagatgcagtgctcctgggactggccctgctctctgtgaggctctgtgaggccctgtgatgctccaagaccaggccccgcccactccggcctccaaccagccatggtctccaaaaaggatgggaaaaagaggttggggaaaagagagggccttgactttggctgcctgaagaactgtttttcttaaagtaggctttatatcagtctttttcctcggccacaggagggaagagggtggtgggagtgagtttagtctgaccggggctgaagacatcctgttgtttaggactgcggttctccaacgttccagccccggtgcccatttgcttttgttcatctggattatgcctatcatatgtactgcattagagattaaaacagaattaaaaagacatattcattgggcaatttaagaagaataaacccatgacacactaacaaacctttttatgtaactttttttgagacaaaatgtagtgagaagagtggcatcgttttacagtttttgcatctctctctttagtacttggctctatagagaggtggattctcatgtcagcttctgcattctatctattgtgatattacacatcccccatgtagcttctggaaaactccactgtacacttgtgggagaatgacaatgagaaaatcaagtaacattattacggaaatagttttgactttgtaaaattctcctgaaaaattactggggatccctaggatttcctggctcatactttgagaatcgctagtctagcagagtagtccctggtattctgaagggattagtttaggacaaccctccttccccataccaaaatctagatgctcaagctccttttataaaatgacacagtatttgtatataacctacccatatcctcctttaaacctctagtcatctcttgattacttttacctaataaatgtaaatgctatgtaaatagttgttttacagtattggttttttatttgtattatttgtactgtttttttttcattgttgttccccccaaatattttcaatctgctgttggctgaatctgcagatgtgaagcccaagtatatggagggtcaaatgtgcatgttattcacttttcttgactgctaaaacaaccagggagatcctctcagacaaaaggaaatacagcactatttactgtatcgaaaccattaagacttgcaggccgtgtgtatagcactggggataaacatgggatgcagtgattatttccgctagaactgctatataatgacgatgaattttggggggactttttttgagatctgagttctcttcacctcctccttattctctttttgacactggattctttgctttgataaattgtggggcaatacactagtaaaggtcactcaattccaaggggaaaatgattaaccaaagaacattctaacggttcataaagggtattaggtgtaatgaggatgtgttatctcaccagaacaaacttctgagtttatataacctctagttacataacctgaaacccggacttggcacttggtaagcacgcaatgaacagtcatagtaagctggccaagggtagagttcagtttgaacaaagcaatttgagaacatcaaaggaagtttggggaacagcaagggatccagaatggctagagggtaagaggcagagggagggggcaagcagaagggctagagaggaggaatgagcttggacaggtgggctggggtctatcccagagttttgagagcaaggcagaggactctgaattttctgtgcccaggaagctgctgaccaaggttccagaagtggtggtgaggtggggttattcaggtggcagccgatgcaatgattcagaagggacagctgggggttgggggacaggggggctggggccctgaaatgggaccatgacagctgggt

SEQ ID NO: 1880490 - DNA, 4001 bp, Homo sapiens
gcagtctgttaaatagctcaattagtgagcagcgctctctcactcgctctcttgcatgcactctctctctctctcattgaattttgccaagtgcatgctgcattgttggaaggggcagtgccaaattagcctagcaacatccctttatagccctaacgtctgggacacctcagagcagcagagaaatcaccgttccccaggccttgccgggactacgaggcagcagagagcattgtggcaggacggtttttccttctgaagggtggttaatgagcaatgtaggtgaagacccctgagagatacctgggcatcctgcccacccaaatagaagaccgcgttgagatggcagtcggagatggagcccatgaccagagagagggacagaggagaggagcgcggggacagtgccggacacaaagtaaaagcgctgccagttcatttaggtctgaatgattttaagtaagccttgaatcttttctttaaaaaaacaatagcagcaatataattcttaaacaaaatatataagccaaaaatgccagtgcaatgtaaatcagctgtctgcctttaacaccgtttattccagagctcagccatcaatttctcattctgtcttcctataaaagaaggtttaggcacacaccctccacctaccaaacacacctaaagtgagccctcaaattggtgctatatttatgtctatttgtggttcaaccagacataaacagtgtcagaaaagaacaaatgagaaagctgcattctatacagagtacacaagccctacataattcacaacccctcagttgaaacttgttgcagagctctgaaaattcatacagaaagcaggacattcatgttataaggtaaacatatttagtctgttgtctgtttcagtaacacatttattggtacaggctatgtgatactgatgtattcattacatcttggcatttacaatatacagtatttcgctgtttgactcattacagccttcataccaattaggtgaaagaaaatattgtttgcaaaaatacttttagggggattacatttatcctagaatattatgtatcacaattttagaaacattaagccccaacatttacatataattattatggttataccctagagaagatatttaaatgtctctaccctatctattgggtatatgtttcccttggaaggaaaaccctgtcaaacaattagagtgccgaaagaagtgaaaatattcttggttgctaaattggagtaaaagttgccccaagataaaaatttttaatgtaaaattgcactttgattcgggtggtttatttttgttatgacattatgggaattttattctttgaattttaagcataaaatcatacaactcaattatcaagatatttgcactgagaaaatcaaatactgaaattagaccggtagatttttatgtggacttgaatctgcttctttgtaatttccgtgggtacttggaagtgttttgccatgaatgctaatgtgctttgtgttttaagtagtgattctgcacattttgaaacacaggcaaatttgagctggggatacaggcagagcactttgttggatgctgctgaaggaaatcataaaggtccttcaaaaatgaaatctctaaatatgtatttttcagatggaaagacattgtacctatgaaagcctgcctatcttttgtctggatatataccttaataagaaagataaagttaattttaattttaatagtaagtcctcactaccttcacacatagccatattttctaaagggcagaccaaaggcaataagagatacctgtataagtcactagtaaaatactgctttaggataatccctcatctgttcccccacccctttttttttctgaaaaaacaaggaaggaaaatgagagagagaaagaaagcataatcaaaagcctacatgacaaagagttgacagtcagattctgtggtaaatgattccagagtcgctggcctgcggagacgctgaggaagtccccagcagacctgattaattccagtctctccagctgccaggggagcagagggtaagcagtttcgcagagaggagcctattaccactactaggctgaaatagatctaatcaactcacagccgctcaaaagaaaactttacaggtttagctcactaaggcagtgctttaaaatgatgactacaaaggaccatgggagtctaaaagcatttagtctttattgcagctcaaggaaattttctgctgtggttaggccatgctaatttactgaacatgacaaagcctcctagactgtgtgacatcatttgtttaaaggccccagtgctcatactggacaatttcgaatactactttttttttcttcaaaaacagttaatttgttgatatttcatcggtttgggctaattacatgcaccattataaatgtctgaactaacctactttaacatttaatttaaacaacaatgctctgtaatttgtcatggtgctcacaaagtgatgagtattgcaactttgttttctaagcaatcaacattttatcagtgaatcttaggaggaaactcctggcagaaaggagatcctgggaatctgatacagtgttcacttcccttccccagcatcagaatttaagttatatagcaatttgtgtcagaatagtcgaaatggattgaaaactatatgaactaataaacactatagcaaataaagttctagatttttaaaagtattttgtaccctaggttgggttttataaccaccttctttttaatggaaaataaacagagggaaaattattaaggccagattgaaaccaagtagccatttgtcttttttttttttttcagttgttggaaatcttagtaaagatttgcagagtaaaatctgcttttgtttaaataatcaagatttggaaactgcacgagttacatgatatgttgtttagaatgctgtgtgtgatagcaaatatgcacacacatgcttatgaaattcattgattactaatgaattccctgatcataccaccaacagaaaattaaaggggagtactcaagtcattgaatttaagttaattacagatgataatctgcaaactgcttccttcagaaattttaagtccaaggaagatacagtagaacccaaaagatgaagagtgaggaagcagagataagataaatgatgggtgcacgttgtgcacatgtaccctaaaacttaaagtattttaaaaaaagataaatgatggaaagttggaacttttatcgtcacttctgagcctctctgtttagacattatgtcaatgtctaacccccattatgtcctgggggttagaggtgtgtgatgcggggagagggtgcagctgagcaaggctactaggcatgccacaatttcagaaaagcaaaatgtcccaagaaaaagtcccaatattgcactgggatctgacttttagatgtagagaaacacacttgcctgatgatcatttgcatagaactgaacacaacacctagtaatatcgttagtattgttatatgagttatagttgttattcatatgctcagagctcttgatcatcagtttttttcccccttaaaacagatttttgagctatttatccctagctgattcagaggtcatggaggtgcctggactttcctacatgtcaaggagtccaagatgcatcataaatacccatatttgaatatggatttggaaatgtctaaattttatcagaacattacctttggttctgttatgtccttgaactacatcactggagttcaagcaggatttgtgtttcagatcagcaaaacatttccttttctgaggctttttcaattttgtctcattcgaataatattaaactacttaaaatgtcaacaccaaaaatccagcagtacctgtagactagatataaatgcctatggaaccacagatctgaacaggtcagtcctccaggcaccaagggccagatttacgtctatctcttgcagtgacagttggt

SEQ ID NO: 1880491 - DNA, 4001 bp, Homo sapiens
aggctctcaaccctggtggcacttttgaatcactcagtagcctgaaacttactactgcccaggacgcatccatatcaattacatcagaatctcaggggtagaggctgaactggatacagtcctaaaagctccttagctaatgctaaccaatggcaaaattgagaatcactagcattgggttctttctatttcaaagttcaaagtgttggtaaattcccccaaagaagtagattgccatcttagtagccaaaaaaaaaagaaactccaatcacaaaagagtcttaaaaataagtatttgaaaggagagggggttaatgcatttcaggtgactaggcaggttctagttacatgaatccaaactaattcttaaataaggttaacccagttatattggccattgagtgcccgaggtcagaacctggggagggaagaagatctagatgccttctctgatttaatgactcaatcaatgatgttatctcagatggcagaagcaaggccaaagctggggacaaaggaacttccccctcctttcctttacctgctctctcgagggataggacatatggtagaatgcatctgttggatgtggtcaagcccctttggtgtggaggtttttccatcaaaacctctctgacctgcaggccagagagggagacgtatgcaccagagctttttttttttttttttttttttagatggggtcttgctcttttgcccaggctggagtgcagtggcacagtgatagctcactgcaacctcaacctcctggcctcaagcaatcttcccatctcagtctgtggagcagctaggattacagccttgagccacctcaccctgactggcagagcttttcaactccacacacaagcctgccctgtggaccctctccagcaggcttcaagagcccagtgggaagcggcaggggtgataatgcagcagcccagagctgaagggggccagttcaagactaagagggagactgaacaaaaacgctctccacctcccacacacttgcacaacgcaaaggagatgcagcatggaccctgaggggtctaaagattggctgtcatgactgtgccaggcactgtgccagggcctgaccgacgttgtcacccatgatcttcatgacttctgacggcccatcatactgtaattcaggcctcagatttcctgaatcagagcaggggctcctgccattgaagtcctgcctccctctccactgtcttagttcttgtccagtgcaagaaaatagatcaagaagggtcgcttggaagctcaaactctttcgaagaagctcaggctatcgcagcgaaacagaccctgagcggctgcgcagcccttctgctgtgtcccgcaggcatcggaagacccggggctgcatcagcactcccggggcccacatcctgcagccttctttccgggcgttttcctgctgccttggagttctgtggggacgcgcattggtcaccaaacaagggtgcgcgcctcactgagtgaggatggcccctaatctggagccccagcaccgatccctgctcagccccggagagtgggaggcttgtcgggtcgcttgactacaacgtgcgggctgcgctctagctggcggtgcgcctcccagctgagcagcccaatgagcagggaaccgagaaagaccgaaagcagaggggttcctagtcccgctgacccccaagggccctcattctctgcagccggccgtggcttccagcgggttcgctttctccctgggagtcccggaggcgcccggcaccaggagggcaacgaaggggcaggaggcgctgccgtccgggcgccctccgagcacagccaggaagtcctccttacctcatgggtctgcggctcctcgccgggctgcgggcgcaggcagctcaccaccgcggctaggccggccccggacatcgcggcggcgggcgcggcgagcggggatgcgcgggcgtcggggcggcagccgcaacggactctgccctcctcgtgcaggccggaggccccgcctgggcgcgcggcgctcggtccttcacgtgaccgctgcgggtgggcctgcgggcggaggacgggcgacggcggggcgggctcccaggctccggccccttccctggcggcgcgctgggcccagcgcagggaagcggatccggcagggacggggagtgggacgcgcgaggggcagcaggggtaagagctcgggcgggtggccgcgtgggttaaaggtcaaaggtcacctccgcaaatggcaccaactgtgtagcctggcagtgggactttgtccagctttctgatcagtagaatagaaggatgccttcctccaagacctgtttggagaattaaaccagctaatgtaggagccacggctgccgctggggagggcccagtaattattagttccctccccgtcctaggggaccccccaggagagcgtagtgtgggctcctagtggggcctctcgaggcaaatacctcccgagagggggcgcgcgccctcccctcttcccatggggcgcccccagttccagcctgacctggaactcagggttgccagagctgctgaattttcaagagaaagcggaaatctgagttttaatgagaccgctcctgattttttaaaacgttgatcatgaagttaaaacaataataatggtaagtacttgccggccaactgtcaggtaagccctggcgggcaaagcaggtggtcctgggctcctgtaccaaccaacttcactgactcctcccagaggagggagaagcctggcgggactgtgacaatccctgtcacctggcatgaggtgtgatgtccctctgggtggttcatcaagacttggtgctaggccaagccagtggctcatgcctgtaatcccagcattctgggaggccaaggcgggagtgacaagtgaagccagctggacttcctgagtgcagtggggacttggggaacttttcttacaagaggattgtaaaatgcaccaatcaggaacttttctgtcttacaagaaaattgtaaaacgcaccaatcagtgctctgtaaaatgcaccaatcagcggtattctaaaagtagccaattgcggggaggattgaaaaaagggcactctgataggacagaaacggaacatgggaggggccaataagggaataaaagctggccaccaccgcagccggcagcgacaactgcttgggtcccggtcagctttgcggaagctttattctttctgttttcacaataaaccttgctactgcagggtccctgccatctttaagagctgtaacactcaccagcaaggtccatggcttcattcttgaagaccaggaacccaccggaaggaaccaactccagacacaagaggattgtccaagcccaagagtttgatacctgcctaggcaacatatccagaccagatctctttaaaaaaaaaaagagctgggcatggtggcaaacctatagttggctagtctaggcagagatgaaggatggcttgagcttaggaggttgaggctgcagtgagtggtgattgcaccactgtaatccagcctgggcaacagcaatactgctctctaaacataaaaaattaaataaagacttagtgctaggtgctgatttctggcaagttccaggtgggagactggcaggcagcattatagtcctctaagagaattcaaaccctaatttctgggactatgaatctgttactttacaaggcaaaagagccttgtggacaggtttctaatcagttgactttaaaatagggaggttatcctggatttatctgggttggcctggtggaatcacccttaaaccctaaagagcaagacaggggagaggagacatttgaagcttatgaaagactcagtgtgcctggatgggacgctgttgcctcgaggatgaagggaactgcaaggaactaaagttctgctgacaatttgaatgagctcaaaagtgaattcttccccagggccttgcagaaaggaacacaatttgctgacacctttattcc

SEQ ID NO: 1880492 - DNA, 4001 bp, Homo sapiens
ctggtggcacttttgaatcactcagtagcctgaaacttactactgcccaggacgcatccatatcaattacatcagaatctcaggggtagaggctgaactggatacagtcctaaaagctccttagctaatgctaaccaatggcaaaattgagaatcactagcattgggttctttctatttcaaagttcaaagtgttggtaaattcccccaaagaagtagattgccatcttagtagccaaaaaaaaaagaaactccaatcacaaaagagtcttaaaaataagtatttgaaaggagagggggttaatgcatttcaggtgactaggcaggttctagttacatgaatccaaactaattcttaaataaggttaacccagttatattggccattgagtgcccgaggtcagaacctggggagggaagaagatctagatgccttctctgatttaatgactcaatcaatgatgttatctcagatggcagaagcaaggccaaagctggggacaaaggaacttccccctcctttcctttacctgctctctcgagggataggacatatggtagaatgcatctgttggatgtggtcaagcccctttggtgtggaggtttttccatcaaaacctctctgacctgcaggccagagagggagacgtatgcaccagagcttttttttttttttttttttttagatggggtcttgctcttttgcccaggctggagtgcagtggcacagtgatagctcactgcaacctcaacctcctggcctcaagcaatcttcccatctcagtctgtggagcagctaggattacagccttgagccacctcaccctgactggcagagcttttcaactccacacacaagcctgccctgtggaccctctccagcaggcttcaagagcccagtgggaagcggcaggggtgataatgcagcagcccagagctgaagggggccagttcaagactaagagggagactgaacaaaaacgctctccacctcccacacacttgcacaacgcaaaggagatgcagcatggaccctgaggggtctaaagattggctgtcatgactgtgccaggcactgtgccaggcactgtgccagggcctgaccgacgttgtcacccatggtcttcatgacttctgacggcccatcatattgtaattcaggcctcagatttcctgaatcagagcaggggctcctgccattgaagtcctgcctccctctccactgtcttagttcttgtccagtgcaagaaaatagatcaagaagggtcgcttggaagctcaaactctttcgaagaagctcaggctatcgcagcgaaacagaccctgagcggctgcgcagcccttctgctgtgtcccgcaggcatcggaagacccggggctgcatcagcactcccggggcccacatcctgcagccttctttccgggcgttttcctgctgccttggagttctgtggggacgcgcattggtcaccaaacaagggtgcgcgcctcactgagtgagaatggcccctaatctggagccccagcaccgatccctgctcagccccggagagtgggaggcttgtcgggtcgcttgactacaacgtgcgggctgcgctctagctggcggtgcgcctcccagctgagcagcccaatgagcagggaaccgagaaagaccgaaagcagaggggttcctagtcccgctgacccccaagggccctcattctctgcagccggccgtggcttccagcgggttcgctttctccctgggagtcccggaggcgcccggcaccaggagggcaacgaaggggcaggaggcgctgccgtccgggcgccctccgagcacagccaggaagtcctccttacctcatgggtctgcggctcctcgccgggctgcgggcgcaggcagctcaccaccgcggctaggccggccccggacatcgcggcggcgggcgcggcgagcggggatgcgcgggcgtcggggcggcagccgcaacggactctgccctcctcgtgcaggccggaggccccgcctgggcgcgcggcgctcggtccttcacgtgaccgctgcgggtgggcctgcgggcggaggacgggcgacggcggggcgggctcccaggctccggccccttccctggcggcgcgctgggcccagcgcagggaagcggatccggcagggacggggagtgggacgcgcgaggggcagcaggggtaagagctcgggcgggtggccgcgtgggttaaaggtcaaaggtcacctccgcaaatggcaccaactgtgtagcctggcagtgggactttgtccagctttctgatcagtagaatagaaggatgccttcctccaagacctgtttggagaattaaaccagctaatgtaggagccacggctgccgctggggagggcccagtaattattagttccctccccgtcctaggggaccccccaggagagcgtagtgtgggctcctagtggggcctctcgaggcaaatacctcccgagagggggcgcgcgccctcccctcttcccatggggcgcccccagttccagcctgacctggaactcagggttgccagagctgctgaattttcaagagaaagcggaaatctgagttttaatgagaccgctcctgattttttaaaacgttgatcatgaagttaaaacaataataatggtaagtacttgccggccaactgtcaggtaagccctggcgggcaaagcaggtggtcctgggctcctgtaccaaccaacttcactgactcctcccagaggagggagaggcctggagggactgtgacaatccctgtcacctggcatgaggtgtgatgtccctctgggtggttcatcaagacttggtgctaggccaagccagtggctcatgcctgtaatcccagcattctgggaggccaaggcgggagtgacaagtgaagccagctggactccctgagtgcagtggggacttggggaacttttcttacaagaggattgtaaaatgcaccaatcaggaacttttctgtcttacaagaaaattgtaaaacgcaccaatcagtgctctgtaaaatgcaccaatcagcggtattctaaaagtagccaattgcggggaggattgaaaaaagggcactctgataggacagaaacggaacatgggaggggccaataagggaataaaagctggccaccaccccagccggcagcgacaactgcttgggtcccggtcagctttgcggaagctttattctttctgttttcacaataaaccttgctactgcagggtccctgccatctttaagagctgtaacactcaccagcaaggtccatggcttcattctcgaagaccaggaacccaccggaaggaaccaactccagacacaagaggattgttcaagcccaagagtttgatacctgcctaggcaacatatccagaccagatctctttaaaaaaaaaagagctgggcatggtggcaaacctatagtgggctagtctaggcagagatgaaggatggcttgagcttaggaggttgaggctgcagtgagtggtgattgcaccactgtaatccagcctgggcaacagcaatactgctctctaaacataaaaaattaaataaagacttagtgctaggtgctgatttctggcaagttccaggtgggagactggcaggcagcattatagtcctctaagagaattcaaaccctaatttctgggactatgaatctgttactttacaaggcaaaagagccttgtggacaggtttctaatcagttgactttaaaatagggaggttatcctggatttatctgggttggcctggtggaatcacccttaacccctaaagagcaagacaggggagaggagacatttgaagcttatgaaagactcagcgtgcctggatgggacgctgttgcctcgaggatgaagagaactgcaaggaactaaagttctgctgacaatttgaatgagctcgaaagtgaattcttccccagggccttgcagaaaggaacacaatttgctgacacctttattccca

SEQ ID NO: 1880493 - DNA, 4001 bp, Homo sapiens
ggtgacaagaaagaacaatgtttaacaatgtgtgttttatttttcttcagtttttttgtttgtttgtttttgagacagagtcttgctctgtcgcccaggctggagtgcaatgacgcaatctcggctcactgcaaccttcacctcctgggttcaagtgattctcctgcctcagcctcctgagtagctgggattacaggcatgcgctaccacacccggctaatttttgtatttttgatagagacagggtttcaccatgtttcaccatgttggccaggctggtctcgaattccttacctcaagtgatctgcccaccttggcctcccaaagtgctgggattataggcatgagccaccacgcccagtctcttcggtttttctaatagaaaacctagcatattttaaacgattttgccacttaacacttattatggacccacagggtatgagggcctttggagatcatctaatcggacttcccacccaactacaggaatcatttcattgcaacaactctttaaacccgtctagaaaatgcaatgctctctccccttttccacggttgaacatcttcctcatggccctataataatcaatgataattaatgagcctcttcctctccttggacaaagaaatatgataggagaaatgtttagtttgctgatgcccatcatgggggaatagtccactggtaactctggcttttgggttcaggattagacagagtggttaaactaaaatatttatcgtaagtatgaatttgttccacaaacataacatttcaaaggtagctttgtttcctctttccttgcactgccagctattaactttcggttcattagtcacgattttcagaatccacttggctgccaccttcctgcagccagaccatcttggatcagagggtgggccagccattcccacgtcacacctgccacgggatcgattttttcccccattgaccacagtcactttttgtcaattaattaatgttattcacctggtacccatcttgtgaatggtaggtcactacggagcggattactacttcatatcccatcaatgacagagccatcattacgaaaaccttttctgacaaccactgaagagaaaccatctccacaccgtgcattttgcatcacttccgttgcttctttacctgatttatcacaaagactatgtaccacacatcttctttattaatgcattgacaatcagtgaagacaatgaaaacccaccacttttgtccgtgaactgagaaagaaaatggcaatgtcatatggcattaatgatgcatgagatctatgggtgtagtgtcacgtctaggcgtgtagtaatccagtcttcggccttactccagggagaaagattcagctttgttactttccagtcactctctcccgtaacacagcaccttggcacagaaagcagagcgacaaaacccagaatgaggacagttaaaattcaactcaagctacagccatcccaacggtcctccccagctcccgcggaatatttaccaagaccgtttaaagcacttaattaattcacttcagcttcgctggagaggtctcagggttcccgagactccattacataatatctttcacaaagtctattcccagctcgaatggaagatggattctcatccagtgtgcggaggttccatgcctttgcttccctttcccggagttcgatccggcgataccctcccgaggctgcagccatcgccccggccccgagcttctggggtacccgccactcttcgaactccaatctggccccgaaggtgcagccgcctcgccctcctggctcccaggccggccgctgcggccacggtgccagcgagcgcccgggacaccgcgactctcgctgctcgctgggtgcgccccaagcccatccgcagcgcacccgcggcgccggggccagagccgcagctcggtggcacggccggctcggtgcgccgggctcggggaggaggagatcgggaagaggtggaggcgtgtgagggagggaggaagggcccggccgcccgagagggggagggggaggcggagggggccggccgggccggggagggggggcagccaatgagcggcgcgcggcgcgtgggggtggggggaaggtctgggggaggaggtaggatgggggagggcgcagcccgagcggctgaggctccagccataaacaagcgcccggaggagcggcgcaggagtgaggcgagcggggcgcgcggagcggacgccgcggatcttgtgctgcgccaccgcgcccactcggcagctcgggaggcggggaccggcccggaggctgcgccgctgcggggccggccgactcggaggaggagagggaggaggcgccgccggcccgggctggagccgagcgcagcagccaccgccgccgccgcgccagaagtttgggttgaaccggagctgccgggaggaaacttttttcttttttccccctccctcccgggaggaggaggaggaggaggaggggaagctgccgccggcgccaaggctcgtgggctcggggtcggcgcggcccgcagaaggggcgggggcctcgccccgcgaggggaggcgcgccccgggggccccgagaggggcggtgaggaccgcgggctgctggtgcggcggcggcggcgcgtgtgccccgcgcaggggagggcgcccgccccgctcccggcccggctgcgaggaggaggcggcggcggcgcaggaggatgtacttggtggcgggggacagggggttggccggctgcgggcacctcctggtctcgctgctggggctgctgctgctgctggcgcgctccggcacccgggcgctggtctgcctgccctgtgacgagtccaagtgcgaggagcccaggaactgcccggggagcatcgtgcagggcgtctgcggctgctgctacacgtgcgccagccagaggaacgagagctgcggcggcaccttcgggatttacggaacctgcgaccgggggctgcgttgtgtcatccgccccccgctcaatggcgactccctcaccgagtacgaagcgggcgtttgcgaaggtacggccgcccgctgcgggccccctcccacctggcctgcgccgccccctcggcgctggttgtgccgaacaaagtttgggcgagactttctggaggaaagagggctctgcgggaagaggggcggccgccgcccccaggagagtgcccccgcggccctgcgttccctctccttgttccccccgacgcttaggcagtcgcgggcgaggttgggtatggtgggtgggggcgagcgagtggaggatcgcccctgtccccgcgcagacgcgcacacgtgtggccgttcctgctgggactgggtggcccggccttgctccccgaggtgggggcgccgcgggcggggggcactgcagattctgccgcgcgcgagcccctcggggagcccggccctaccgccctccccgcactggcgcagtgtggcaccgtgagccgcacgccggccgcgaaagtcctttttctgttggcggaggagacgtgtctccagctcgcactccccgagtgactcttattattttttccttgagctcttccttcaccccttcctcctcctccgcagataaatcagtttcagccgcggaatatgtcagcccaggggaagttacacacggtggttactcatttatttgcccattgtaaacggtcaaaggctttctctcctgaaaggaaaggggggtgggggttgcacctgggagtaaaaagttgttgctattagtggctgctttttaatatcagatacccgcgtgtttcctgtcgtgttgccggttcctcctttttgtttgtttgacagcggggattgttctgctggcttctccagcacgcattgtgctccgcggtgtcgagattgacggtgggagaaacagattagattagtggagtctttctcgttggggagccaatgttagtgcgtgttggctttaatccctgcccgcttgcgtcggccttcagggtgcc

SEQ ID NO: 1880494 - DNA, 4001 bp, Homo sapiens
tcctggctacggtcagaggaaagaaaatgggtgagaaccaattccagggaacgacccacggagtttttattctcaagaataccaaacagaacttgcagggtcctttgtgtggtggagggaggcagctgctgtggatgagtcatggaaaggccatgtgcaagggaaagaccttgaggttatctccggagaggggttggttgtaaacatcctcaatggcacctttgttttatcccactagttgccaaatacctgtgattctgcacagcgctcctggaatgctcagaaattatgactggttactctgtcaaagaaagtctttgttgtagaaacttcctcatttgttcaggcctttgggttctaagccctgagccatagtctcccccggttgtttgcctgtgtgggctagggagggtgactgatgttcaccgtggggtgaccaccttgtcctggtttggcagctgccttcctgcctttagcagtgacagtaaagcaaacccaggcggttggtcatctcggtgcactgagctgtacacaccagggacagtgctggatcctcacgcaggttcaatgagctgggcgatttgaggtggtagatgccgtcttcacatgattaatcattttgttcttggcattttcctagtaggtctccctgcttccttttgccagaaaaggtaaagttctggagaaagaggttttttcttggcttttgagttcaggccttacagaggtaaaaccgagtagatgtgggagaacatgtggtaaacagatacaactttcccgggatggggagagaaaaatagtgaaactccatctccactaaaaatacaaaaactagcccggcgtggtggcacgcgcctgtaatcccaactacttgggaggctgcggcaggtgaatcacttgaagccgggaggtgaaggccgcagtaacgctgttccctgcattggatgaagtgctccccaccaaactctctcaccggagagggtgggatctgcgggctccctgggtggcttgatttcgacaccctgtgggctgccttccactctggtactttcctctgcctgctgatgcttgaaattccttgaaccggccacacacacctgctttctggaatcagaacactggaaaggcttcctgggacgggagaagagtgatttacattcctgccgaggtgtaaagctgcggatggcaggttctctcctgagaaccggcttcaactaggaggaggaggttggaagcaggaccccgagctgacctgttgaccaggagaggagtaagcagaagggaggcaggagcgggcggaggagagaaggccggggagccgggatgggggtcaccgcccccggggagccgggatgggggtcaccgcccccggggagcccggatgggggtcaccgcccccgcccccgtgatgccgagctgaaaaagacagtctccaggtaggataatccgtcacactagatgcatatagcttcatgcaagaagagcgactgttgcgctgtcttctaccccctttggccgcgatcccgtgacaatgccggcatccgggcaccaactggcttttgcgaaccgctctccgctccccgcccggattccgaagcccggagccgtttacagtttgaggcgccgtgtgccgccccctggtggccggaggccgttactgtcgcggctgagggggcgtcccggtgtatccgcagcgcgccctggccgccctctggtggccggaggccgttactgtcgcggctgagggggcgtcccggtgtatccgcagcgcgccctggccgccccctggtggccggaggccgttactgtcgcggctgagggggcgtcccggtgtatccgcagcgcgccctggccgacccctggtggccggaggccgttactgtcgcggctgaaggggcgtgtcccggtgtatccgcagcgcgccctggctgccccctggtggccggaggccgttactgtcgcggctgagggggcgtcccggtgtatccgcagcgcgccctgtcccgccatatacattccgtgcttttcaaacacccgccgtgggctaagcatgggacccacgtggggcggggacacacggcgataaagagccaggccctcgctgccaaggagctttcccgtaacaccgatgcatcaaacaaaaggtagtaaaagtgcctgggtttttgcgttgaaatatctttcccttcaactccccacaaggtgcttttactccccgtcatcaccaccgcctgccagaggcagtaaacttgggtccagcgggcccctgtcaagctgcataaccacacagtgagaggctgtctagagaaaggcgtttgttcaggagcagagcgttgcaacggtaacacgcatgtcatagtaaactgtgcatattcgaggaggcagaggaagaaaggaagaggaaggttttcaaagagaaagtaaggaggatttcataattgttttcaaatggttatccttggctacagagatcaataacaaggggttgccagtccaaggttagacaggcagttgctgggcgaatgtccttgtggaggtttttttttgtttttttttttttatatatatgtgtaaggctgtgatggcctttgtgcaaggttatggttttgtagagccttttgtgttagtttttgttatcaggcatacaagtgtgggagtgctttcttcttagctttccctagctctatttgtcaagttttttttggtttgttttttgtttttttttcccaagatggcgtcttgctctgtcacccagactggagtgcagtggcacgatctcggctcactgcaacctccacctcctgggttcaagcgattctcccgcctcagcctcctgagtagctgggaggtgcccgccaccacgcccagctaatttttgtatttttagtagagacggggtttcaccatgttggccaggctggtctcgaactcctgacctcaggtgatccgcctgcctcagtctcccaaagtgctgggattacaggcgtgggccactgcgcacagcctgagtttttttttttttaaagaaaaaacattagtaactccattttgattcttacaacttccacaccacctagcactttatctccaaccctcggggacagctggtcttgtagactctggcaattctagacaataacctcacagacaaaccatgattactcatttccctggggcatggctgctctcagcccttctacatccccagtcctacttatttgcttatctcctggccaggcaaacctcctttccccatgaagtccttccatgcctgctccaaacccacatggcctctttattctcaggacttctctctaccattatttttttcgtttttttttttttttttttttttttttaatttttattttccaagtagacgtgaagttccccgatggctgaggctgtgttacaccaattttctacccatccttccttcttaaattatgtcccagagctcccaagtttctcttttattatgtacagaaactgccttcttcctttcaaatattggggctacacttaggcctcatcaacatattccctcaccagagatgggaagtagttaagtcaggataggctaagttattggcagtaacaatcctcaatctctgtgggttaaaataacaaggtttatttcttcctgatgtttcacaactaccgtgaatcacttaaggatagggttgccagatttagcaaagaaaaatacaagacattcaaatttgaatttcagataatcggcgaattttttagtataggtatgtctcaaatgttgcatactaaaaattattattttttcctaaaattcgggtgtaactggccatcctgtatttgagctgacaatcttgctgaggggtctgctccgtctcctcactcaggactcaggctaacggtgcctccactcgtcaatagcccagaagagagaaaggggatgtggtaatttgcacactggctcttggagtgtttttggatggagtaatctacaacacttccaatcgcat

SEQ ID NO: 1880495 - DNA, 4001 bp, Homo sapiens
gatgtcaaagccaacaagcaccagatcaaacaggctgtgaagaagctcagtgacactgctgtggccaaagccaacaccctgatcaggcctgatggagagaagaaggcatattgggatcatctaaactgaatccagctagttgattctatgtatatgtcttttcaccatttaaaaccaaaacaaaagcataggtcctctgacccttctgcacatccacacccaggcagacagaaacagttccatactcttttcaccatgtgtctgaggctctcttctcatacagagaggaaatgcatgaggcaatgaagagcactgaccataaagtcaagacatagctgggtttaaacctgtctctgccactcacaggctatgtgactttgggcaaattcctaatttccctgggtctttgtttccttgtctataaaatggtgaagcctacttgagagggttatgatgggtatcacatggggtgtatgattttctgtgttgctaattttaaaaatatcataagttaacccttttaaaacgccactaattattaatctcacagtttctgtgggttaggagtcccactcaagatgcctgggttctcagttcggggttttaggcaactaaaatcaaggctttgtctgggtctatgatctcacccctgaggcttatgctcctccttcaagctctttcagtatgttggcagagttcagttccttgtggttgtaggactgaggcccctgttaccttgccgctgtcaactggagaccaccctcagcaactagaggctgcgtgcgtcctctgccatgtggtcccctccattttcaagccagtagtggtgcgtcagatccctcttatattttgaatctctgccttccatatgtcttctgctagtcacagatttaaagcctccctgtcttaaagtcatctgtgccatataacaaaacctgtttaccagaatgaaatccatcacattcacaatcctggggattacacagaaggtggagaatcttgggggtcacgttagaattctgcctactacgtgggataatgtcagtgaattgtccagcataaggtctggcatatggtaagaatttgatcatttttagctatcagcagcaacatccctagagaaaaagaggagatttttaaattaaaagcagagtcaatattgataccatcatatgtaccccagtaaacagtcccttaacctcggtaacttggctagagttcccaaagtttaaggccaccccattaatggactgtcatcccctgtggttgtatcttcttggtaccagcacaaccagctgaaccaacctcatctcagctgaactccccacaagagagatgagggagttttccaggcccaggccaacatagctcgggtgatcagagcccccgagaagacaataaagtcagtgctggtgagcgacacaggaattggggactgaggtcaccaaggccttccattccgcacgagcaagctcacccgtccctcctgggccttttccttatggggtttagaagtagagctgtgaagagaaaagcaaatcatataaataacgtggaattattggatccttgaacccttttgaaaagtatcttaaagggatttggtttgtttttccttacagaagagagagcaacagagatggggaggaatccagctctgcctgacatccaggcatcctctccaaattgcataggtcagtgagaacgtgttatttattagaacctgacatctgttgcagtgaaatgataagctccattgaaaagcctggccatcaattactgccaatacagccctcatcccagaggaagccactcaccatcctctcagcctgtgcagaccaggctgcaccaggcacggagtgtttacagcccagctcagtctcctggctcccctgggggaggggcagcaggtaaatcccttctgcaggtcccctcaggccatctctccccaggccctccatctgtattcctttggttccactggaagcttctctgagagcagttttaaagactgcaccccctgtttatcctgctttctcagtggaaaacagttagggcttttgttctggcctcagtcacacaagccagaagaagctgcactgaactcagcttatcaggatagtcacacagaaagagtaactgggctgggcgtggtggctcacacctgtaatcccagcactttgggaggccgaggcaggtggatcacctgaggtcaggaattcaagaccaacctgggaaacatggtgaaaccctgtctctactaaaaatacaaaaattagccaggcatgatggcgggcgtctgtaatcccagctacttaggagactgaggcaggaggatcacttgaaccggggaggcagaggttgcagtgagccaagatcgtgccactgcactcctgccagggtgacagagcaagaccccgtctcaaaaataaaaataaagaaaaaaagagtaactggaaggtcagcacatctttgtcaggaaaattaactcaggtgtgccctttcaagaacaattgagtgggctgggcgcggtggctcacgcctgtaatcccagcactttgggaggccgaggcaggcggatcacaaggtcaggagatcaagaccatcctggctaacatggtgaaaccctgcctctactaaaaatacaaaaaattagccgagtgtggtggtgggcacctgtagtcccaggtacttgggaggctgaggcaggagaatggcgtgaacccgggaggcggagcttgcagtgagccgagatcgcgccactgcactccagcctaggcgacagaatgagaccctgtctcaaaaaaaaaaaaaaaaaaagaacaatcgagtgttcaagcttgggttccaattaccccgccagccactggggaagtgtttgggatcaccaaggagagcaacttccttgcttgtgagttagggtcacgtattctctttcctggaaaaatagacaggtgtcctatagagttagaaaggaaagggtagaggagctggtttgggatttttatgataaaccatagtaggaacatatgctattaatggaatcagagttccttttgaacagctgggggaagaaacgtacagtaagtcaagaaaaagcaaaggatagtggcctgggagtcaagtgacctgggtctcatctagggaccattattaatttccttcgtgatcatggaaaagacacgtcacctttctggacttcagtaccttcctctgaaagtactgggctagtacccacctggtaatcactaagctctaatatatttctggaattttaagtgaaaattgtttaaggtagctgagcatacttttttattcatgttgagaaacttccatctctgttgccggaggtcagacacaaattgaaaacattactaaatggaattaagtacaccgtgtacgtgatgcctttttgtacagctcgtatctgatatttatagaacacttcagttgcagaacgtgcacacatatgccctgaacacacacccaataaaataattctagatgcaatacattttcagatgtcaagttaaaacagcttcttaggaattaggcttgactgttcagatgtgtgtgttagtttatgacaggtgccgccagggctgctcagggctgtcatgagtgatgtggagtccagccaaggcaggagggccaagccgcttgtttctatcacttctcattaaggcatgaattctagaaaaaagggaagcatcaaagaaccatcaggattgtccattgtgtgcatatcataatgacaagcagaggccttgcttctgcagaaacaagattctgtcttgtcttttgtcagatcattcagcacaagggccacctgtgaaaatgaactagattcatgccttattaaagtagaggatttacagaggtgagcaaaaatgggaagcaggtaccatccagctcattatatacagagtatgtacaaagcactggagactaccacacacacgtattttgaagagccccaactcaaagcctactgattgatt

SEQ ID NO: 1880496 - DNA, 4001 bp, Homo sapiens
tttttaactttggttaaaaaaaaaaaacaaccttcttattaaaatcagattctgctgtcattcttttctatttttttttggccaacctggatcactgggtcattgaaaacaactgtcctagatggtcattcatgcacgtagctgactttccatgatttattgttgtaataagacactctcccattgatatagggaaagaggggcatttgttactgcagctttgcctaacctagcctaactaataaagtaagtaagtatggccaggcagggtggctcacgcctgtaatcccagcactttgggaggctgaggtgggtggatcatgaggtaaagagatcaagaccatcctggccaacatggtaaaaccccgtctctactaaaaatacaaaaaaaattagctgggcatgatggcacgtgcctgtggtcctagctactcgggaggctgaggcagaaggatcacttgaacccgagaggtagaggtcacagtgagctgagattgtgccactgcgctccagcctggcgacagagcaagactccgtctcaaaaataaaaataaaataaaaaataatttaagtactattattacccctactttacagatgaagaaagcacagggagattaacttgcccaagttccttacaatgtatgtctgataccagagcccaccatttgagcttcagtgaagctcttcctatgaaattaatatggtcttaagtctaagctcaattaggtcccaaaccttctgtagagtatggagtgaagctaagtaactttgcttgttttaattaaataatcattagcaatctatgatatttatatatatctcacttacagcaataatggatgagtagaaatttatttctcctaaagagcagtagaataatttggctagttctagaggagtaaatggcttttatcaatacttcagcttttaaaatattaaaaattctgttgctggcttgcttttcaaattagtttgttcaaattattccatttgtttaaatttttccgtggaaaaatcaagtaggaattaggaaggctttcgtgtaggactgacgttgaaagaaggataaaatcttcaaggctggaggggtttccaggtaaaggggcctacaatgagcaaatgcatttattttccagtatttgttgagcacccactatataccaatcacttttctgggtgcttggaatatgtatttgaacaatatagacacgaatctatgttttcatggtacctatattctagcaaaggtaggaaaggataggacagttatttgcaaagctgccaagttgccacagaggaaataaagctcaaagataaataggtacccttgggaacctgaatgccagcctgaggaatttgtgtgtaattcagcaagaaatagagagccaggagacttctgcaaaggggtgaggtaccatgatccgagctgtggcctaagactctccattagacaaacagaattcggaatattagagtgatcaggaatggagaattaaatatcgactacaattgtccataccttttctgaggcttagtttttcttccgggttcttgatggtggtgatgatgttactgactgatgaggtggtgagcggaggctgaaaccccaccagtgctccactcacccagctgctcttctggccaagtcttgtgtctttccttcggcacattcctctatccagaggaaggggcatctgtttgtcgcctatcttccaggggtgacatcttttataaattgcacaaagattctttatatgcctgcagcagccttgattaaatggcagcactaggatttgaccccagtcctacctaactacgaacgctgtgtgattttgccagtgtttactactcttacaacattatttgccactactcttacaagtccttgccagtgtttagtaccattacaacaactactccccctactattgctgctgctattatgaaggaggagagggaaagaatagcatctgacattctttgagtgctggctgtgtgccaagcacagtattcagttatttacatgcattatttcatttaatcatcacagtctccctgtgaggtaggtactgttactatgttgccaagtgacagaataggaattgaagccagtcgttcagactccaagtctgaggacttaaccactacactagtatcttccctgaatacttaaggatgaaatatcttagaaaacaaaactgctgctctattagaagtcacataaaactacaaaaattatttaaagcaacaaacttgaggccaggtgcagtggctcacacctgtaatcccagcactttgggaggccaaggtgggagaattgcttgagctcaggagttcaagaccagcctgggcaacatagcaagacctcgtctctagtttaaaaaaaaaaaaaaaatcctaggatgatgcttctgggaaaaacagcagcagcaacaacaacaacaacattagctaggagtgatggcgtgcacctatagtcccagctactcgggaggctgaggtgggaaaatcacctgagcccagggattcttgattgcaccactgcacaccagcctggatgacagcaagaccctgtctcaaaaaataaataaaaataaagcatccaacttgagcaaggaatagcatcaatccagtaccttgtcatagcaggtgctcaaaaaatatttaacttgattttcacagataaacattttgaacattggtacttgaggggaaaaaaaataaggctaaatcagagaatatgattaaaataaatatttttgtgaacattttgatggttatttctggatacctccaaaggattttaagtttgattggatagcctgttaatcagatctaatctcacttctttttttaaaatacaggtatgtctagttcactgttaattactggtgtgcttctctgtaacttaggaccctcaatttttttgttgtttttatttttgtttcattttgtttctgtccttcacaaatagaaaaaagagagagaatacatacatacaaagagagaatacatatttcctaagcatttcatcaaaaattgtgagggaggagggtgttaaaggctgtgtgtgtgtgtgtgtgtgtgtgtgtgtgtgtgtgtacacatgcgcacacacttttgagaatggggttgatcacctgcagcagatttcactgagcagtgttaggaagatactttcaggcaggtcgttagctcctggtactgctttctagggttaatgcaggtgcaggacagcctggctgcagtcagagtgacctggagtgggacagagggatcccagctcaagatgttgtgtctgtatcaggctgtttatatttatgaaatgtttcctaactggatattgctataaaagaaaaaagaaagctagattattgagtttaatttgtaagctctgtaggacagtggttttgagacctttaaattttgtattgttgtttatttgcagaaagattctaaccctagtttgcacaacttagaatcagaacccagcctgatgggactgcctgctgacccagtctttcccacctccagaaggggtgccctgaggcactgcctctaggcaaattcttcctttattgtacctttcctacaatttgtttttttcctttcttccttccctccttttctccttcatttcccctttccctccctccctcccttcctctttctttctttcctttcttttctttcctttctcttgcacatctgcatgagtgctcgcccttttctcatatttttcagataatcatgtaagttcctgaacagttctagcttgctaacagttgtggcctctgagtacatacataggatttcacaaatcttcctaggtgagcaggggctctggagttgccaggtggggagatgaaatggtaacctatgacatgtatctaaatgccccagtccctggtgaacaattgtaggattcacccgtctttcttctttgttccttggtgccctttctccttggaaattggaagcatgggcaagttgttcta

SEQ ID NO: 1880497 - DNA, 4001 bp, Homo sapiens
tttcctccctagccgcccccagctgccctgaaccttcaaagtcacatttcagtcactccccagtctgaccaacaacgctcacaatgagggcgctgccagcacaggcgacggcctgcgctccagtcttacgaggaaccccaaattcaagacccctgtgacccaggcctgtgtgccccgacaggctaaacctccgcccaggggcttcccgatgtcggctgcagcgggtctgggttttcggcctgcagagctcgcgtctgacggctgaggaacaaaacaccctccctctagcggctcaagcgcacacaccctcttgccttccgcagccaccgagcgagtcacgggagacactctggagccattttgcggggctggaattccttcgcccggcggagctcggcgcgcacccgtcagctgtgccgaggaccctgcgcccggggggccccgcggccacgtgacccccatctggctctcggcctggactgagggggctgagctcatcgcgttgctattcgaggggcagagactgcctggccttcctcaaatcctgagctcccggctctcctccctcccccacctacttgacatctcaggctttttgtggaaggggcagggcgattgagaggtcggtgacctttgtcccaatggcgctggctcttttcctttttggctaccctaatggaatgaggatataatcagtcatatcttaacattcattgagccccggctcaggctgggaggcactgcctttctcctagtgaattttaaatcagtatttgtgggatttaagctccagcggataaacctagagccactggccatgaagggtgtggcagtggggtgaaaaacgggactcccgcctccactccctggctttcctcattccagccactatagaggggaaaatacgtagaccacagagcaacggccacaccctctttcctctcctccaaccccagaattccacttcagtctcagagctttcagctaggtggggtttatccccaaacatgccacaacccctctagttatatgggagcggtaactgtgaaccaccatcgctggcttgatcctcccttttccgtggattggtgctcctgagtatgtttaccggtttcagtacataacacagccagatagagggccgcggacttcagcggcgagaagctacaacaaaaatagggtgaacaaaaacgaaggtgcccaggagcctgaattgcatttctttcttacctttggtcatagaaaggagcacttaggtgtttggctggaacgcaaagtgagaccagagcttacattcttagcagcctgggtttgtctcgagaggccatgcttctctcctccctgacattttgctctcagaagcaccagttagcatcagaggaatgttgtttccttctctgaaacagccatcaagtaccagcgatttcttggctccggcaagttaagtgctctgacccctcccttatctaactcaccccgcacaccatccacatggcaggggacgcagccagaaatggagcggactgcatcttttccttgcccactctttttatcaccatgacagagccactggacaccaggaaataaatactgaaccaccacactaaaacgtttactccactttgggcagaaggagcctattttgcatattaagtgcctcctataaagcagtcaagtgagggaaagaggagttctcgctcctccgtgaatgctgcacgggagcctccagtcgggaacagctgaacaggtagctctgaaagaggaccttggtcataaacgcatagataagattatcccgaggttctcgcccacatgcttccttaccacaggtgggagggctgctgttaggctgtcttccttgctgagcattgacaagcaatgaaatagttgaggcgtagcagcaagaaaggaggaagaaaaagggcctggttttttggtctttaagaacagaccactagtggtgtattttgggctggatatttgctgagccgaccgttgacgtgctgagctgacggttgacgtgctgagctgagggttgacgtctctggtcattacacagatttaaataaccagcaaaagtggggtggaaaggtttttccaattgttttcaaggaaatgtattttgaggatatattgaatctgacataactttcaactcactttcaaaccaatctactgagctgaagaaagagatcagaaatgaaatgaaattctgatatacacttaatcgacttaaaaaaaattgacaggaaaaataaaatttcagatgttttttattcaaaggttctcaaaagaaataaaacagaaaagctaacaatctgatcaaatgtacagttcaaaaatgtcttttggcgtttaacaacaagtcctaggaaagaaaactacagagttatcttgaaccggacaaataagttaccactggcaagtctgtggcactagtaaaacaaaaataaaaaattaactctcttgatcatatagatatctctatgaaaatctttttttttcaatctgtacaaaaggtctttcttcataaattaatttttttataatttaatggctgtctactatgtgatgtttaactgatttttttttttttatgtacagaggttatgtttcccaaatcttacccagacgagtatggcacttagttcagacatttctagcagcagatttcccctcccctctaaccgagctatcaaatttctgtcttaactaatgcaaaaatatcaagtagtgagagacccaggtttataactgtactaggtacacagagggtgctgcgttcagtctggactttcacaaagcagtaatattccagggagcatagaaccaataataccacaactttaaaaaaatgaaacaaaaacaaaaacaaaaacacatttctcttatgactatgtaattttcactagaatctacacttctcagagcagcaaggacttttgaaactatgaaatgtcactgacatctatcatcaaatacaagcataaaatttaagaactaaaaaatacttgaaagaaataactgcttagccctagctcctgagctaggaggatttggtctgtggaaacagggagggccagcaacctgtcccagcacaaaagaaaatagactctgaggtagataactgatcatacacagctgaccagacaagtacacagttttggaagacaacttaatttaccattgcttttaaaacatatgcaattgccttaataaaagagctttaataacagtgaattatcttatatgtactaaagtagaaataactgtgtatttatgaatcaggaatttcatagtttcaaaattggttttctttacacttgaacacttgtagtgatgatgtaaagtgtggcactgcttggatccaaatcttccttcatgcttttttgtttgtgtgtgtccatacatcaattaaaattataaaacctaaatgcaaaggtacaaaaaaggcacattctcctaaccgcaaactggtccggcaaaaataaagagcacagaagatgtgatgctgagacaagttggagctactggttactggctcttcggtctttggtgaagttacctttaaaagtgccaagtcatttttatttttcaaatttacctaatagagagagagagagagagctagtagccaatcgttttgcttctattcgttatctcagcttatgtttgaagataaatccttacttttagcttttgccactttgttgcaatagcaacatttttcggtttgccagatttcaggcataattctcattctaaagcactatcattagtataaaggaaggacaaaacattcagtgactcccctcccccacccccatccccaaccccaacactacctacactaaatctagtacatcaagttagctttttttttttcctgaaaaaaggcaaaaaagactttacattgcatcatacagcagatatcctaaatcagtcaaactatcagaggaaactgttggcgtacagccttacaaacaatttaccctaataaa

SEQ ID NO: 1880498 - DNA, 4001 bp, Homo sapiens
ggaattgccacactgtcttccacaatggttgaactagtttacattcccaccaacagtgtaaaagtgttcctgtttctccacagcctctctagcatctgttgtttcttgactttttaataattgccattctgactggcatgagatggtatctcattgtggttttgatttgcatttctctaataaacactagtgttgagctttttttttcatatgtttgtcggacgcataaatgtcttcttttcagaatgtctgttcgtggcctttgcccatgttttgatggggttgttattttcttgtaaatttgtttaagttccttgtagattctggatattagacctttgtcagattggtagattgcaaaaatattctcccattctgtaggttgcttgttcactctgatgatagtttctttccctgtgcagaagtgcttacgtttaattagatcccatttatcaatttttgcttttgttgcaattgctattgatgatttcatcataaaatctttgctcatgcctatgtcctgaatggaacttcctagattttcttctagggttttttacagttcggggtttcacatttaagtttttaatccatcttgagttaatttttgcataagatgtaaggatgaggtccagtttcagttttctgcatatggctagtcagttttcccagcaccatttaaatagggaatcctggccaagtgcagtggctcatgtctataatctcagcactttgggaggctgatgcaggtggatcttgaggtcaagagatcaagaccatcctggccaacatggtgaaaccccgtctcttctaaaaatacaaaaactagctgggcgtggtggctcgaacctgtagtcccagctactcaggaggctgaggcaggagaatcacttgaatccgggaggcagaggttgcagtgagctgagatcatgccgctgcactccagcctggtgacagagtgagactttgtctcaaaataaataaataaataaataaataggtattccttcccccattgcttgtttttgtcaggtttgtcaaagatcagatggttgtagatgtgtggtcttatttctgagatctctattctgctccattggtctgtgtgtctgttttggtaacagtaccatgctgttttgattagtgtggccttgtagtatagtttgaagtcatatagcatgatgcctccagctttgttcttttggcttaggattgtctcgactattcagtctcttttttggttgcatatgaaacttaaagtagtttttttttaattatgtgaagaatgtcaatggtagtttgatgtgaatagcactgaatctataaattaccttgggcagtatggccattttcatgagattgattcttcccacccatgagcatggaatatttttccatttgtttgtgtcctctcttatttccttgagcagtggcttgtagttctccttgaagaggttcttcacatccatcgttagctgtattcctaggtattttattctctttgtaacaattgtgaatgggagttcattcatgatttggctctcttgcctattgttggtgtataggaattgaagaatattgtctattgctggtgtataagaatgcttgtgatttttgcacattgattttgtatcttcagactttgctgaacttgcttatcagcttaaggagtttttgggctgtgacgatgtggttttctagatatagaatcacattttctgcaaacacagacaatttgattttatctcttgctatttgaacatgttttatttctttctttttttttttgaagggtttttcatgtctctgtctccttcagttccactttgatcttagtcatttttttttttctcttctgctaacttttggatttgtttgctcttgcttctctagttcttttagttgtgatgttagggtgtcaatttgagatatgtctagctttatgatgtgggcatttagtgctataaatttacctcttaacactgctttagttgcctcccagagattctggtacattgtctctttgttctcattggtttcaaagagcttcttgatttctgccttaattttattatttacccagaagtcactcaggagcacgttgttcaatatccatgtagttgtgtggttttgagtgagtttcttaatcttgagttctaatttgattgcactgtggtctgagagattgttatgatttcagttattttgcatttgctgaggagtgttttaattctaattttgtgatcaattttagagtgtcatatgccactaagaataatatatagtctgttgtttcgtgttggagagttctgtagatatctatgagattcacttgatccagagctgtgttcaagtcctttcttgtcaattttctgcctagatgatccaatattgacagtggggtgttaatgtctcccactattgttgtgtggtagcctgagtctctttgtaggtctctaagaacttgttttgtgaatctgggttctcctgtattgggtgcatacatatttaggatagttagctcttcttgttgaattgattcctttatcattgtgatgttcttctttgtctttttttatctttgttgattcaaagtctgttttgtcagaaactaagattgcaacccctgcttttttctgctttccatttgcttggtaaattttcctccatcgctttgagcctatgtgtgtctttgcacatgagataggaaccctgaatacagcacacctgaatcttgactctttatatccaatttgctggtctgtgtcttttaattggtacatttagcccattgacacttaaggttaatatggttatgtgtgaatttgatcctgtcaccatgatgcttgctggttattttgctcactagttgatgcagtttcttcatagtgtcattggtctttgtacttcagtacatttttgcagtggctggtaccagtttttcctttccatctttagcacttccttcaggaggtcttgcaaggcaggcctggtggtgataaattccctcagcatttgcttgtctgaaaaggatttctccttcacttatgaaggttagtttggccagatatgaaattctaggttagaaattcttttctctaagaatgttgaccattggacccaactgtctcctggcttgtggggtttctgctgagaggcccactcttagtcagatgggcttcccgttgtaggtgacctgccctttgtctctgtctgcctttaacattttttccttcattttgatcttggagaatctgatgactatgtgtcttgagggttgatcttcttgtggagtatcttactggggttctctggatttcctgaatttgaatgttggcctgtcttgctaggttggggaagttcttctggatgatatcttgaagtgtgttttcccaacgtggctccattctccttgtctctttcaggtagtccaatcagtcataggtttggtcttttacatagttccacagttctttgaggttttgttcattccttttcattcttttttctctaatcttctctgcctgccttattttggcaagacagtcttcaagctctgatattcttttttctgcttgatcaattcagctgttgatacttgtgtttgcatcacaaagttccccttatgtgctttacagctggctctggtcatttatgttcctctctaaactggttattctagttagcatcttctgtaatcttttaacatggttcttagcttctttgctgacagaagtagggttcagaaggtgggtaataacaaatttcacagagctaaatgagcatgttctaacccaatgcattgatttctccacctccctttcagggatgccagtgatttgtagaattggcctctatatataaccccatacttattggaggttttcttccttccgttttattcttttttatttttgtctgtcttattttagagaaccaatctttaagttctgggattcgttccaatatgttgggttagagcgtactcctttagctcagtg

SEQ ID NO: 1880499 - DNA, 4001 bp, Homo sapiens
ccactaaggaaatctgaccctgagcaactgaaagctgcctattctcattaagaagagctacagactgacccttttcaaagactagtaactggacacatttctttcacaaattatcttcttttcccttcttcataccaggaattctcagggattataatcctcatcaatataacaagcctccaaagtcatattttttaactttgtgaaatgccctcccacctaactaccccatttgacacctgcaaccatcctctagagaggcagacaagatcgaccgtctcactttacagaagtgcaaagagtagctggcctaatgccacagccaatgaacagatgaaggaggcctacaaccacctagtcttccctacttctcctcactcctcccctctgacctccttatgtcaccactgaccaatggatcactgtgtggccgttcagcatcttcctatgctgtgtcaggcaagagaaattctggaaagagagcatctcatgtttattaaggagactgggtgtccttgtagaaagtcctgccatgcacaaccccggtcttaactgatgtgtttcaccatactgaaggcaagttgccatctaacatagttgaaggggagccagttgtggtgatctttgttcctgctgaaatatggaaagaaaatgaggaaatgagctcattttcaaagaaaatgaacattctttcacatgaaagaaataggagcaaagtgacaggagagaaacaaagcttagggttggtgtgagatacacagacagggtgttagccccacaaacagtgctgctgggccaagttaactccctgtttttccctatatatgtggtgtggaaaagctatttataaaatgtgtttaaatatttaggaccaaataaatcaacattgttaggaaacattgactctgaccagaactcatttcctcaccctagtccaatgtgaataacaaaatgaagaatatcaggatgattcgagaccaggaatactacagatgtccaacacttccacctggaatccccaaagaggcccgcttttagcctccacactggttggtgacctgacatgagagaaatgacagaaatctcagaagactggcctcatgaataatcttcagtttcaatgtaacaaagcaagccttctagaaattacctgcctctgcagttcactctgctgcttcagatgaaaattttcaggtctgtctgccactgtagtgaagcactgctttgggtagtgtctgtggagaaactttttaaaggacatagttgaaatattgtgctacaaaccaattcttgaacaccactcattttgtcctacctctctgtgaccgtgaaagacggctgtgctcttggcaaaggtcatctctctgtcatgagtctggatctccttttcttctcctgattatctgtcactcagttatccccactctcttccacaactttaacttcagcttctctattctaagagactcttctcgcaggctcaaggctctcctaccctccatcattcctccctctaccccacacagccagcatgtgtccagctagtctatccttcagccaaacttccttagaaagaggccttacctcactgtccctacccatctactctctgactcacttcttaactccatgactgggttctggtttctttcccttgcctgttgtgacttcctatggacacagccaaaaaccatcacatagtcctgttgtatggcatccccaccatcttgaaatgtcctctccctcagttcctatgtgttaccacacacgcctgccttggcttctccctctagttgttccttctctgtcttctgtgggcttcttattgtctgctcactccttcttcagtgtcctctcatgggcttccttcccttctcagctgatgccatcacctggggaatcacagttactcagcagcactggggcctctctatctctatgctggtcatgcctatgtgtgagctgcagacccagtggaatttccatttgtgcatcccatgcccagcccaccctccaccagcctcgaatgcagctgttcagccctaccccagtcctcagaaaagttcctctccctggatcccctttttccttcatgagtgcccggttgcccaagtcaaaaacctgggagtgatataaactccccacacatccagtcagtcactcatcaactctattgattctgtctgctaaatatatctcaattgtattaacttaaacatatgcataatacatcttcttcttcactgcatttttgtgggctgcacttacctttcaggtaacaacaacactggcccctcttgcccttctagtcagaagtgccaaaatgatgagagctagccatgacaaacccacagccaacattacactgaatgtgcaaaactggaagggcatccaaacagaggagggaagagaggaatagacaggaagtcaaactgtctctgtttacagatgacatgtttctatatctagaaagccccatagtcttggccccaaagcttcttctgctgataaactttagcaaagtcttagcatacaaaatcaatgtgcaaaaattactagcagtcctatacatcaagtcaagcagagagtcaaatgaagaacacaatcccattcataattgctacacacagaaaaaataagatacctaggaatacagctaaccagggaggtgaaagatctctaggagatctctagaagaattacaaaacactgctcaaagaaatcagagaagacacaaacaaatggaaaaacatgtcatgctcatggataggaagaattaatgtcattaaaatggctatactgcccaaagtaatttacagatgcaagttatccctattaaattaccaacggcattcctcacagaactagagcaaactatttcaaaattcatatggaaccaaaaaaaagagccctaatagccaagcaatcctcagcaaaaagaacgaagctggaggcatcatgttacccaacttcaaaccatactacagggctacagtaaccaaaacagcatgatactgatacaaaaacagctcatcattttgagctatgtttcttcaatacccagattttttagagtttttaatatggagaggcattgaattttattgaaagccttttctgcttatattgagataaccacatggtttttatctttagttttgtttatgtgatgaatcagattaattgatatgtgtatgttgaggcaaccttgcatcctggggatgaagcatacttgatcatgatggattaactttttgatgtgctgctggatttggtttgccagtattttgttgaggatttttgcattgatgttcatcgagggtattggcctgaagagtgtgtgtgtgtgtgtgtgtgtgtgtgtgtgtgtgtgtgtgtgtgtgtgtgtctgccagattttggtatcaagatgatgttggcctcatagaatgagttggggaggagttcctcctcctcaatattttcaaatagttcctgtaaaaatggtaccagctcttctttgtatttctagtagaatatgactgggaatccatcatgttctgggctttttttggttggtaggttatttattactgattcaatttcggagcttgttattggtctgtttacagcaaatcaatttcttcctggctcagttgtgggagggtgtatttctccatgaatttatccatctctttgaagttttctagtttgtatgcatagaagtgtttgcagtagtttctgatggctgtttctatttctgtggggtcagtggtaacattccctttgtcatttctaattgtgtttctttcaatcatcctctgtattagtctgctagcagactttcttattaatattttcaagaaacctacccggaattcatagatcttttgaatttctttttttcatgtctcggtttctttcagttcagctcagattttcagttatttcttgtcttcctctagctttggggttttgtcttgcttctctagttctttcagttgtgatgttaggttattaat

SEQ ID NO: 1880500 - DNA, 4001 bp, Homo sapiens
cactaaggaaatctgaccctgagcaactgaaagctgcctattctcattaagaagagctacagactgacccttttcaaagactagtaactggacacatttctttcacaaattatcttcttttcccttcttcataccaggaattctcagggattataatcctcatcaatataacaagcctccaaagtcatattttttaactttgtgaaatgccctcccacctaactaccccatttgacacctgcaaccatcctctagagaggcagacaagatcgaccgtctcactttacagaagtgcaaagagtagctggcctaatgccacagccaatgaacagatgaaggaggcctacaaccacctagtcttccctacttctcctcactcctcccctctgacctccttatgtcaccactgaccaatggatcactgtgtggccgttcagcatcttcctatgctgtgtcaggcaagagaaattctggaaagagagcatctcatgtttattaaggagactgggtgtccttgtagaaagtcctgccatgcacaaccccggtcttaactgatgtgtttcaccatactgaaggcaagttgccatctaacatagttgaaggggagccagttgtggtgatctttgttcctgctgaaatatggaaagaaaatgaggaaatgagctcattttcaaagaaaatgaacattctttcacatgaaagaaataggagcaaagtgacaggagagaaacaaagcttagggttggtgtgagatacacagacagggtgttagccccacaaacagtgctgctgggccaagttaactccctgtttttccctatatatgtggtgtggaaaagctatttataaaatgtgtttaaatatttaggaccaaataaatcaacattgttaggaaacattgactctgaccagaactcatttcctcaccctagtccaatgtgaataacaaaatgaagaatatcaggatgattcgagaccaggaatactacagatgtccaacacttccacctggaatccccaaagaggcccgcttttagcctccacactggttggtgacctgacatgagagaaatgacagaaatctcagaagactggcctcatgaataatcttcagtttcaatgtaacaaagcaagccttctagaaattacctgcctctgcagttcactctgctgcttcagatgaaaattttcaggtctgtctgccactgtagtgaagcactgctttgggtagtgtctgtggagaaactttttaaaggacatagttgaaatattgtgctacaaaccaattcttgaacaccactcattttgtcctacctctctgtgaccgtgaaagacggctgtgctcttggcaaaggtcatctctctgtcatgagtctggatctccttttcttctcctgattatctgtcactcagttatccccactctcttccacaactttaacttcagcttctctattctaagagactcttctcgcaggctcaaggctctcctaccctccatcattcctccctctaccccacacagccagcatgtgtccagctagtctatccttcagccaaacttccttagaaagaggccttacctcactgtccctacccatctactctctgactcacttcttaactccatgactgggttctggtttctttcccttgcctgttgtgacttcctatggacacagccaaaaaccatcacatagtcctgttgtatggcatccccaccatcttgaaatgtcctctccctcagttcctatgtgttaccacacacgcctgccttggcttctccctctagttgttccttctctgtcttctgtgggcttcttattgtctgctcactccttcttcagtgtcctctcatgggcttccttcccttctcagctgatgccatcacctggggaatcacagttactcagcagcactggggcctctctatctctatgctggtcatgcctatgtgtgagctgcagacccagtggaatttccatttgtgcatcccatgcccagcccaccctccaccagcctcgaatgcagctgttcagccctaccccagtcctcagaaaagttcctctccctggatcccctttttccttcatgagtgcccggttgcccaagtcaaaaacctgggagtgatataaactccccacacatccagtcagtcactcatcaactctattgattctgtctgctaaatatatctcaattgtattaacttaaacatatgcataatacatcttcttcttcactgcatttttgtgggctgcacttacctttcaggtaacaacaacactggcccctcttgcccttctagtcagaagtgccaaaatgatgagagctagccatgacaaacccacagccaacattacactgaatgtgcaaaactggaagggcatccaaacagaggagggaagagaggaatagacaggaagtcaaactgtctctgtttacagatgacatgtttctatatctagaaagccccatagtcttggccccaaagcttcttctgctgataaactttagcaaagtcttagcatacaaaatcaatgtgcaaaaattactagcagtcctatacatcaagtcaagcagagagtcaaatgaagaacacaatcccattcataattgctacacacagaaaaaataagatacctaggaatacagctaaccagggaggtgaaagatctctaggagatctctagaagaattacaaaacactgctcaaagaaatcagagaagacacaaacaaatggaaaaacatgtcatgctcatggataggaagaattaatgtcattaaaatggctatactgcccaaagtaatttacagatgcaagttatccctattaaattaccaacggcattcctcacagaactagagcaaactatttcaaaattcatatggaaccaaaaaaaagagccctaatagccaagcaatcctcagcaaaaagaacgaagctggaggcatcatgttacccaacttcaaaccatactacagggctacagtaaccaaaacagcatgatactgatacaaaaacagctcatcattttgagctatgtttcttcaatacccagattttttagagtttttaatatggagaggcattgaattttattgaaagccttttctgcttatattgagataaccacatggtttttatctttagttttgtttatgtgatgaatcagattaattgatatgtgtatgttgaggcaaccttgcatcctggggatgaagcatacttgatcatgatggattaactttttgatgtgctgctggatttggtttgccagtattttgttgaggatttttgcattgatgttcatcgagggtattggcctgaagagtgtgtgtgtgtgtgtgtgtgtgtgtgtgtgtgtgtgtgtgtgtgtgtgtgtctgccagattttggtatcaagatgatgttggcctcatagaatgagttggggaggagttcctcctcctcaatattttcaaatagttcctgtaaaaatggtaccagctcttctttgtatttctagtagaatatgactgggaatccatcatgttctgggctttttttggttggtaggttatttattactgattcaatttcggagcttgttattggtctgtttacagcaaatcaatttcttcctggctcagttgtgggagggtgtatttctccatgaatttatccatctctttgaagttttctagtttgtatgcatagaagtgtttgcagtagtttctgatggctgtttctatttctgtggggtcagtggtaacattccctttgtcatttctaattgtgtttctttcaatcatcctctgtattagtctgctagcagactttcttattaatattttcaagaaacctacccggaattcatagatcttttgaatttctttttttcatgtctcggtttctttcagttcagctcagattttcagttatttcttgtcttcctctagctttggggttttgtcttgcttctctagttctttcagttgtgatgttaggttattaatt

SEQ ID NO: 1880501 - DNA, 4001 bp, Homo sapiens
ggaattgccacactgtcttccacaatggttgaactagtttacattcccaccaacagtgtaaaagtgttcctgtttctccacagcctctctagcatctgttgtttcttgactttttaataattgccattctgactggcatgagatggtatctcattgtggttttgatttgcatttctctaataaacactagtgttgagctttttttttcatatgtttgtcggacgcataaatgtcttcttttcagaatgtctgttcgtgacctttgcccatgttttgatggggttgttattttcttgtaaatttgtttaagttccttgtagattctggatattagacctttgtcagattggtagattgcaaaaatattctcccattctgtaggttgcttgttcactctgatgatagtttctttccctgtgcagaagtgcttacgtttaattagatcccatttatcaatttttgcttttgttgcaattgctattgatgatttcatcgtaaaatctttgctcatgcctatgtcctgaatggaacttcctagattttcttctagggttttttacagttcggggtttcacatttaagtttttaatccatcttgagttaatttttgcataagatgtaaggatgaggtccagtttcagttttctgcatatggctagtcagttttcccagcaccatttaaatagggaatcctggccaagtgcagtggctcatgtctataatctcagcactttgggaggctgatgcaggtggatcttgaggtcaagagatcaagaccatcctggccaacatggtgaaaccccgtctcttctaaaaatacaaaaactagctgggcgtggtggctcgaacctgtagtcccagctactcaggaggctgaggcaggagaatcacttgaatccgggaggcagaggttgcagtgagctgagatcatgccgctgcactccagcctggtgacagagtgagactttgtctcaaaataaataaataaataaataaataggtattccttcccccattgcttgtttttgtcaggtttgtcaaagatcagatggttgtagatgtgtggtcttatttctgagatctctattctgctccattggtctgtgtgtctgttttggtaacagtaccatgctgttttgattagtgtggccttgtagtatagtttgaagtcatatagcatgatgcctccagctttgttcttttggcttaggattgtctcgactattcagtctcttttttggttgcatatgaaacttaaagtagttttttttttaattatgtgaagaatgtcaatggtagtttgatgtgaatagcactgaatctataaattaccttgggcagtatggccattttcatgagattgattcttcccacccatgagcatggaatatttttccatttgtttgtgtcctctcttatttccttgagcagtggcttgtagttctccttgaagaggttcttcacacccatcgttagctgtattcctaggtattttattctctttgtaacaattgtgaatgggagttcattcatgatttggctctcttgcctattgttggtgtataggaattgaagaatattgtctattgctggtgtataagaatgcttgtgatttttgcacattgattttgtatcttcagactttgctgaacttgcttatcagcttcaggagtttttgggctgtgacgatgtggttttctagatatagaatcacgttttctgcaaacacagacaatttgattttatctcttgctatttgaacatgttttatttctttctttttttttgaagggtttttcatgtctctgtctccttcagttccactttgatcttagtcatttttttttttctcttctgctaacttttggatttgtttgctcttgcttctctagttcttttagttgtgatgttagggtgtcaatttgagatatgtctagctttatgatgtgggcatttagtgctataaatttacctcttaacactgctttagttgcctcccagagattctggtacattgtctctttgttctcattggtttcaaagagcttcttgatttctgccttaattttattatttacccagaagtcactcaggagcacgttgttcaatatccatgtagttgtgtggttttgagtgagtttcttaatcttgagttctaatttgattgcactgtggtctgagagattgttatgatttcagttattttgcatttgctgaggagtgttttaattctaattttgtgatcaattttagagtgtcatatgccactaagaataatatatagtctgttgtttcgtgttggagagttctgtagatatctatgagattcacttgatccagagctgtgttcaagtcctttctggtcaattttctgcctagatgatccaatattgacaatggggtgttaatgtctcccactattgttgtgtggtagcctgagtctctttgtaggtctctaagaacttgttttgtgaatctgggttctcctgtattgggtgcatacatatttaggatagttagctcttcttgttgaattgattcctttatcattgtgatgttcttctttgtctttttttatctttgttgattcaaagtctgttttgtcagaaactaagattgcaacccctgcttttttctgctttccatttgcttggtaaattttcctccatcgctttgagcctatgtgtgtctttgcacatgagataggaaccctgaatacagcacacctgaatcttgactctttatatccaatttgctggtctgtgtcttttaattggtacatttagcccattgacacttaaggttaatatggttatgtgtgaatttgatcctgtcaccatgatgcttgctggttattttgctcactagttgatgcagtttcttcatagtgtcattggtctttgtacttcagtacatttttgcagtggctggtaccagtttttcctttccatctttagcacttccttcaggaggtcttgcaaggcaggcctggtggtgataaattccctcagcatttgcttgtctgaaaaggatttctccttcacttatgaaggttagtttggccagatatgaaattctaggttagaaattcttttctctaagaatgttgaccattggacccaactgtctcctggcttgtggggtttctgctgagaggcccactcttagtcagatgggcttcccgttgtaggtgacctgccctttgtctctgtctgcctttaacattttttccttcattttgatcttggagaatctgatgactatgtgtcttgagggttgatcttcttgtggagtatcttactggggttctctggatttcctgaatttgaatgttggcctgtcttgctaggttggggaagttcttctggatgatatcttgaagtgtgttttcccaacgtggctccattctccttgtctctttcaggtagtccaatcagtcataggtttggtcttttacatagttccacagttctttgaggttttgttcattccttttcattcttttttctctaatcttctctgcctgccttattttggcaagacagtcttcaagctctgatattcttttttctgcttgatcaattcagctgttgatacttgtgtttgcatcacaaagttccccttatgtgctttacagctggctctggtcatttatgttcctctctaaactggttattctagttagcatcttctgtaatcttttaacatggttcttagcttctttgctgacagaagtagggttcagaaggtgggtaataacaaatttcacagagctaaatgagcatgttctaacccaatgcattgatttctccacctccctttcagggatgccagtgatttgtagaattggcctctatatataaccccatacttattggaggttttcttccttccgttttattcttttttatttttgtctgtcttattttagagaaccaatctttaagttctgggattcgttccaatatgttgggttagagcgtactcctttagctcagtga

SEQ ID NO: 1880502 - DNA, 4001 bp, Homo sapiens
ttcagcttctctattctaagagactcttctcgcaggctcaaggctctcctaccctccatcattcctccctctaccccacacagccagcatgtgtccagctagtctatccttcagccaaacttccttagaaagaggccttacctcactgtccctacccatctactctctgactcacttcttaactccatgactgggttctggtttctttcccttgcctgttgtgacttcctatggacacagccaaaaaccatcacatagtcctgttgtatggcatccccaccatcttgaaatgtcctctccctcagttcctatgtgttaccacacacgcctgccttggcttctccctctagttgttccttctctgtcttctgtgggcttcttattgtctgctcactccttcttcagtgtcctctcatgggcttccttcccttctcagctgatgccatcacctggggaatcacagttactcagcagcactggggcctctctatctctatgctggtcatgcctatgtgtgagctgcagacccagtggaatttccatttgtgcatcccatgcccagcccaccctccaccagcctcgaatgcagctgttcagccctaccccagtcctcagaaaagttcctctccctggatcccctttttccttcatgagtgcccggttgcccaagtcaaaaacctgggagtgatataaactccccacacatccagtcagtcactcatcaactctattgattctgtctgctaaatatatctcaattgtattaacttaaacatatgcataatacatcttcttcttcactgcatttttgtgggctgcacttacctttcaggtaacaacaacactggcccctcttgcccttctagtcagaagtgccaaaatgatgagagctagccatgacaaacccacagccaacattacactgaatgtgcaaaactggaagggcatccaaacagaggagggaagagaggaatagacaggaagtcaaactgtctctgtttacagatgacatgtttctatatctagaaagccccatagtcttggccccaaagcttcttctgctgataaactttagcaaagtcttagcatacaaaatcaatgtgcaaaaattactagcagtcctatacatcaagtcaagcagagagtcaaatgaagaacacaatcccattcataattgctacacacagaaaaaataagatacctaggaatacagctaaccagggaggtgaaagatctctaggagatctctagaagaattacaaaacactgctcaaagaaatcagagaagacacaaacaaatggaaaaacatgtcatgctcatggataggaagaattaatgtcattaaaatggctatactgcccaaagtaatttacagatgcaagttatccctattaaattaccaacggcattcctcacagaactagagcaaactatttcaaaattcatatggaaccaaaaaaaagagccctaatagccaagcaatcctcagcaaaaagaacgaagctggaggcatcatgttacccaacttcaaaccatactacagggctacagtaaccaaaacagcatgatactgatacaaaaacagctcatcattttgagctatgtttcttcaatacccagattttttagagtttttaatatggagaggcattgaattttattgaaagccttttctgcttatattgagataaccacatggtttttatctttagttttgtttatgtgatgaatcagattaattgatatgtgtatgttgaggcaaccttgcatcctggggatgaagcatacttgatcatgatggattaactttttgatgtgctgctggatttggtttgccagtattttgttgaggatttttgcattgatgttcatcgagggtattggcctgaagagtgtgtgtgtgtgtgtgtgtgtgtgtgtgtgtgtgtgtgtgtgtgtgtgtgtctgccagattttggtatcaagatgatgttggcctcatagaatgagttggggaggagttcctcctcctcaatattttcaaatagttcctgtaaaaatggtaccagctcttctttgtatttctagtagaatatgactgggaatccatcatgttctgggctttttttggttggtaggttatttattactgattcaatttcggagcttgttattggtctgtttacagcaaatcaatttcttcctggctcagttgtgggagggtgtatttctccatgaatttatccatctctttgaagttttctagtttgtatgcatagaagtgtttgcagtagtttctgatggctgtttctatttctgtggggtcagtggtaacattccctttgtcatttctaattgtgtttctttcaatcatcctctgtattagtctgctagcagactttcttattaatattttcaagaaacctacccggaattcatagatcttttgaatttctttttttcatgtctcggtttctttcagttcagctcagattttcagttatttcttgtcttcctctagctttggggttttgtcttgcttctctagttctttcagttgtgatgttaggttattaatttgagttcttcctaactttttgatgtgggatttagtgctataaatttccctcctaacattgtcttagctgtgtccagaggctctagtatgttgtaactttgttctcattattttcaaagagcttcttgatttctgccttaatttcattatttattaaaaagtcattcaggagcatgttgattgatttccatgtaattgcatgattttcagcaattttcttagtcttctatttttactgcactgtgatctcagtatgtatttggtatgatttcagttgttttgcatttgctgaggattgctttatgtccaattatgtggttgattttagagtatgtggcatatgatgatgtgaggaatgcatattctgttgtttttgagtgcagagttctgtaaaggtctatcagatccatttgatccaatgttgagttcaggtcctgaatatctttgttcatttttttgcctcaatcatctgtctaatactgtcattggagtgtggaaatctcccactattactgtgaaacatactttgtaggtctctaagaactttacttatgaatctgggtgctcctgcattggatgaatatatatttaggatagttaggtcttctcgttgaattgaagcctttgccattatgtaatatccttctttgtcttttctattttattttaagttccaggatacatgtacaggatgtgcaggtttgttacatagttaaacatgtgccatggtggtttgctgcacctatcaacctatcacctaggtattaagccccacgtgcattagctatttatcgtgatgctctccttccccctaccttcccaacaggctccggtgtgtgttctgcccctccctgtgtccatgtgttctcattgttcggttcccacttatgagaacatgtggtgtttggtttcctgttcctgtgttaattagctgaagtttatggcttccagcttcatccatgtccctgcaaaagacatgatctcattcctttttatggctgcatagtattccatggtgtatatgtatcacattttctttatccagtctatcattgatggacatttgggctgattccatgtctttgctattgtgaatagtgctgcaataaacataagtgtgcatgtatctttaaaacagaatgatttatatttctttggatataaacctagtaatgggattgctgggtcaaatggtatttctgcttctagatcctccaggaattgccacactgtcttccacaatggttgaactagtttacattcccaccaacagtgtaaaagtgttcctgtttctccacagcctctctagcatctgttgtttcttgactttttaataattgccattctgactggcatgagatggtatctcattgtggttttgatttgcatttctctaataaacactagtgttgagctttttttttcatatgtttgtcggacgca

SEQ ID NO: 1880503 - DNA, 4001 bp, Homo sapiens
tcagcttctctattctaagagactcttctcgcaggctcaaggctctcctaccctccatcattcctccctctaccccacacagccagcatgtgtccagctagtctatccttcagccaaacttccttagaaagaggccttacctcactgtccctacccatctactctctgactcacttcttaactccatgactgggttctggtttctttcccttgcctgttgtgacttcctatggacacagccaaaaaccatcacatagtcctgttgtatggcatccccaccatcttgaaatgtcctctccctcagttcctatgtgttaccacacacgcctgccttggcttctccctctagttgttccttctctgtcttctgtgggcttcttattgtctgctcactccttcttcagtgtcctctcatgggcttccttcccttctcagctgatgccatcacctggggaatcacagttactcagcagcactggggcctctctatctctatgctggtcatgcctatgtgtgagctgcagacccagtggaatttccatttgtgcatcccatgcccagcccaccctccaccagcctcgaatgcagctgttcagccctaccccagtcctcagaaaagttcctctccctggatcccctttttccttcatgagtgcccggttgcccaagtcaaaaacctgggagtgatataaactccccacacatccagtcagtcactcatcaactctattgattctgtctgctaaatatatctcaattgtattaacttaaacatatgcataatacatcttcttcttcactgcatttttgtgggctgcacttacctttcaggtaacaacaacactggcccctcttgcccttctagtcagaagtgccaaaatgatgagagctagccatgacaaacccacagccaacattacactgaatgtgcaaaactggaagggcatccaaacagaggagggaagagaggaatagacaggaagtcaaactgtctctgtttacagatgacatgtttctatatctagaaagccccatagtcttggccccaaagcttcttctgctgataaactttagcaaagtcttagcatacaaaatcaatgtgcaaaaattactagcagtcctatacatcaagtcaagcagagagtcaaatgaagaacacaatcccattcataattgctacacacagaaaaaataagatacctaggaatacagctaaccagggaggtgaaagatctctaggagatctctagaagaattacaaaacactgctcaaagaaatcagagaagacacaaacaaatggaaaaacatgtcatgctcatggataggaagaattaatgtcattaaaatggctatactgcccaaagtaatttacagatgcaagttatccctattaaattaccaacggcattcctcacagaactagagcaaactatttcaaaattcatatggaaccaaaaaaaagagccctaatagccaagcaatcctcagcaaaaagaacgaagctggaggcatcatgttacccaacttcaaaccatactacagggctacagtaaccaaaacagcatgatactgatacaaaaacagctcatcattttgagctatgtttcttcaatacccagattttttagagtttttaatatggagaggcattgaattttattgaaagccttttctgcttatattgagataaccacatggtttttatctttagttttgtttatgtgatgaatcagattaattgatatgtgtatgttgaggcaaccttgcatcctggggatgaagcatacttgatcatgatggattaactttttgatgtgctgctggatttggtttgccagtattttgttgaggatttttgcattgatgttcatcgagggtattggcctgaagagtgtgtgtgtgtgtgtgtgtgtgtgtgtgtgtgtgtgtgtgtgtgtgtgtgtctgccagattttggtatcaagatgatgttggcctcatagaatgagttggggaggagttcctcctcctcaatattttcaaatagttcctgtaaaaatggtaccagctcttctttgtatttctagtagaatatgactgggaatccatcatgttctgggctttttttggttggtaggttatttattactgattcaatttcggagcttgttattggtctgtttacagcaaatcaatttcttcctggctcagttgtgggagggtgtatttctccatgaatttatccatctctttgaagttttctagtttgtatgcatagaagtgtttgcagtagtttctgatggctgtttctatttctgtggggtcagtggtaacattccctttgtcatttctaattgtgtttctttcaatcatcctctgtattagtctgctagcagactttcttattaatattttcaagaaacctacccggaattcatagatcttttgaatttctttttttcatgtctcggtttctttcagttcagctcagattttcagttatttcttgtcttcctctagctttggggttttgtcttgcttctctagttctttcagttgtgatgttaggttattaatttgagttcttcctaactttttgatgtgggatttagtgctataaatttccctcctaacattgtcttagctgtgtccagaggctctagtatgttgtaactttgttctcattattttcaaagagcttcttgatttctgccttaatttcattatttattaaaaagtcattcaggagcatgttgattgatttccatgtaattgcatgattttcagcaattttcttagtcttctatttttactgcactgtgatctcagtatgtatttggtatgatttcagttgttttgcatttgctgaggattgctttatgtccaattatgtggttgattttagagtatgtggcatatgatgatgtgaggaatgcatattctgttgtttttgagtgcagagttctgtaaaggtctatcagatccatttgatccaatgttgagttcaggtcctgaatatctttgttcatttttttgcctcaatcatctgtctaatactgtcattggagtgtggaaatctcccactattactgtgaaacatactttgtaggtctctaagaactttacttatgaatctgggtgctcctgcattggatgaatatatatttaggatagttaggtcttctcgttgaattgaagcctttgccattatgtaatatccttctttgtcttttctattttattttaagttccaggatacatgtacaggatgtgcaggtttgttacatagttaaacatgtgccatggtggtttgctgcacctatcaacctatcacctaggtattaagccccacgtgcattagctatttatcgtgatgctctccttccccctaccttcccaacaggctccggtgtgtgttctgcccctccctgtgtccatgtgttctcattgttcggttcccacttatgagaacatgtggtgtttggtttcctgttcctgtgttaattagctgaagtttatggcttccagcttcatccatgtccctgcaaaagacatgatctcattcctttttatggctgcatagtattccatggtgtatatgtatcacattttctttatccagtctatcattgatggacatttgggctgattccatgtctttgctattgtgaatagtgctgcaataaacataagtgtgcatgtatctttaaaacagaatgatttatatttctttggatataaacctagtaatgggattgctgggtcaaatggtatttctgcttctagatcctccaggaattgccacactgtcttccacaatggttgaactagtttacattcccaccaacagtgtaaaagtgttcctgtttctccacagcctctctagcatctgttgtttcttgactttttaataattgccattctgactggcatgagatggtatctcattgtggttttgatttgcatttctctaataaacactagtgttgagctttttttttcatatgtttgtcggacgcat

SEQ ID NO: 1880504 - DNA, 4001 bp, Homo sapiens
cccgagtagctggcactacaggtgcacaccaccatgtccagctaattttttgtattttagtagagacgaggatccccgtgttgcccaggctggttgcgaactcctgagctcaggcaatctgcctgcctcggcctcccaaagtgttgggattataggcatgagccaaaaaaattaaatacataaataaatccttgaaatagttttcaattactacctactactatattattggtcaaatcttacatatgtgacaacctcatgttggatgttttgataaccaaaagcagcaaaaaattcagttacaatttttaaaattggaaacctttgagaaatttcggaatatttcctgtgataaatttctctacgtgggatcacttggttaaacgagagactcttattttgtgctgtttttagagaacagccttctcgaacttgctttttgctgtttataagttattcccttcaggaaggctgtgctacacttcgatgagcagcggtctgaatgcggtggtttccttgcacctttgccaaccttgcttctaaaaaaatctgtcagcatgaacgctgttgtatgatcctattttaaagctattcacttgtcatctccagtcgcaaactaggatagctcctgtcagattcttaattggtcttttggtttccatagtgattccattatctacttctactctagtgcaaagttcaacttgcttcctcagctgtccatgcataaaagccttccagatttgctctaggttcttgacttctggggaagaaagatatttcctcttggacccagttcaccatactagctgaattaaggtcaaaagtacattaaacttacaactgtgtccttaccatgacggggggcaggtgtccagatcccagatctacagaaaattctttcatttctgttgtgtccccctgcttccatcctgagtgtacgtccccaaactttcatttaacatgtcatgttcattagttccttcaaatactagttcagagcagtctggaatcaagactgcctagtttgagctccaactgtcacagatcttgggcttgtcacataaggcaatcaaatccttaaagaagaaaaaacatcagaggtagtaaatgctgcatagagtttaaaaaggataatatgatacagaatcacaggatggctacttgagattgtgggcctggacatgaacacggcctctttgaggaggtggtgataaagtgatacctgatggaaaggagcaaacctggagaaggaagctcagagacaggaagcgggggtgaagggagggacaggaggaagagaattctccactgaggagagtagggcaaaagcaagctccaggtggataaaatgagatgctgcatgtggagtctagcataatggttggtgggtagagagagaggaaaagagggaagtagttgaacaaaaattagaagggaaggaaggagggaaggtgtgaatgaatgagaatctcaaatcctgtagggctgagctctctaggggactttactcatccttttaatcttgctttgaactgcattttctcttctcagttgcaattactactttgccctgttctgcttataagaggagctactattaagagcctagtgagtcagattcattataggttttatataagttccctttaatccttacaacctgaggcaggttattatccttatatgcttgtttatgggtgagaaaactgaggctgagagtgtgtaacttggagaaagatgaaacatctaggtaatggtagagccaaaacttaaatccaggctggtctgatttcagatccatgctcttgactgctacactatagtgctcctcaattagactgctctttaatagtttctacatttgtaacagctgttcattccactcagtccatcttgttcttcattatttagctatctctgtgatacaccagtttcttctgctagccagatgtagaaaagatcacttcttcttacagaaacattatctcttagttatagaaggcatcttaatataataaataaggcagaggctttgaagttgactgggccagtatggaattcaggttctgacacttttctctgtgaccctgggcaaatcatttagtccaggtctcacctttcttatctgaaaagtgggaatattatttctcttaatagctgactgaaaattaaaagacataaagtaaggaaagtccctaaaatagcatctaacaaatggcaggtgcaaaataaatggctgcttaagaaacaaaaacaaaaccttcctctcctcttacagataggaaaactgatttggaaatgtcttgctgagagaacagatgctctatttctctatccaatttccatgattccagcatcccatgacacaagttcactggaactactaaaggcattctgttaatgtgatttctgcctgagtcagctccggctgcaataataaaatatcataaactggtgggcttatcaacaaaagaaatctgtttctcacagttctggaggctggaagtctgagatcacggttccagcaccaccaggttctggtgaggaccctcttttgggttgcaaatagttgacttcttattttgtcctcacatggtagaaagatagctagagaactctctgggatcctctttttaagggcactaatcgcactcgcaagggcttcagccttatgacctaattatttcctaaagcttcacttcccaatactatcacattaaagactaggatgtcaacatacgaagtttggggtacacaaacattcagtccatagcattgtccttaaaaatgtccactcaggctgaaagatatttctccacctgaattaaagaaaaagaggtaatgtttcacgattccagatttgtaaaacagggataataatgccggcattttaggtttgtgaagatcaaatgtaaggaatatgaaagtattttaacatatatgaagtgacttataaattctattattaaacattctatgaaatgccataaataaaagctaggtgacaaggcggccagattacttgaggccagaagttcgagaccagcctagccaacatggcgaaaccccatctctactgcagatacaaaaattagccaggcgtggtggcgtgtgcctttagtcccagctactcaagaagctgacgcaggagaattgcttgaacccaggaggtagaggttgcagtgggccaagatcgcaccactgcactccagcctgggctacagagtaagactctgtctcaaagaacaacaacaacaaaaaaccccacaaaaaactgttttgctaagtgaaaagaagaataattggaattttataacgtaattgaaattaaagggattttgaaaaatgggagaaatgatcagaaacaagagaatggagttcaaaacaaacacaggacatttaataaaaagcagcaaatgacttataaatactgtttattgtaaatgcaaataaaattgaggactgtgtttactacaattttaaggaaaattgaaaaagatgtagatgagaaattaaaaataatgctaaggattaagtttagattaggttaaatttagtgtaagagagtgaaagcttctatgccagggtgctgttaaacagagctgggtaaaccgttgccttcacatggtgtgctttgtgactccctgctgaccaaaagtatttggtcaccctttaccatcaaatgttacagtgtctgaaattatacctgcagaccaagtcttctaggctaaggttaaatatccctaataagggacctatttaaattgaggtttcaggacctgattatttcttaagaccacaatggccttgaaagcaggaagaatgagctcaagaaaggaaagggaaacacacactctacccttttctaaaaaagatttttcaatgaaagttacattttctgtactataccaccacccattaacattacagaatgcagggggagcttaccctgatttgcaaaacttaccacatcttttgagttccaagaggaatataaa

SEQ ID NO: 1880505 - DNA, 4001 bp, Homo sapiens
cactctgttgtactattggtcattgaatcaaagcagtcttgacagtatgcaaaatccttaaaatcatggacacttttgatcaagcaattccatatgtaagagtttatcctaagcaaatcattaggatgttggtcaaagtgtacagtgttaggaggaatacattttttgagataacactgcacaacatggtaactacagttaataatggtggtgctgggcacggtggctcacacctgtaatccccgcaccttggaaggctgaggtgggtggatcgtttgagcccaggaattcgagaccagcctgggcaacatggtgaaaccccatctctaccaaaaaaaaaaaaaaaaaaaaaaaaaaaaaaaaaaaaattagctgagcatgatggtgcatacctgtagtcccagctacttggggggctgaggaaggaggatcacttgagcccaggaggtggaggttgcagtgagccgagatagtgccattgcactccagcctggatgacagagtgagaccctgtctcaaaataaatgaataaataaataatggtggactgcgtatttccaaattgctaaaagagtaaattttaaatgttctcaccacacaaaatgataagtatttaaggtgatagatgttaattatgttgatttaatcatttcactcgtgtgtgtgtgtgtatatgtatatatagagagaaaatattgctttgtaccttatataaaattataatttgtccatttataatatttaataataaaagtaaattattagggacgtacttagagctacaaagatgctgaattgtttataatggcaaaaattccctgcatctattaaaacttcatactatctgttaagatttcatatttattatgtagctaaagggaaaaaagtagttgcaaaacagtatgatctcatttctagactcatcagcatttggcacagttgcgtccttcctgaaactttcttcagttggactctcttggtttttctcccctctcattggactctgctccatctctttacctccttggtccctggttggagggccccagtgatgagcactcagctttgtggatgtcttcttctatagctacactccctaggcctaaatgagcttctgtcagtcttgtagcttgcacagtctacaaccaaagattcctggatttccatctccagcctggacctctttcctaaattctcaatttggttatccagctgtttactcaacaagtccatctacatggctgagtatctcaaaattaacatgtctaagatatgattcttcttttaccctccaagcctgtcctcccagttactcaggtcagaagccctcagctgggtgcagtggctcacacctgtaatcccagcactttgggagcccgaggcgggcagaattacctgaggttgggagttggagaccaccctgaccaacatggagaaaccccatctctactaatacaaaattagctgggtgtggtggcacatgcctgtaatcccagctagtcaggaatctgaggcagaaccgcttgaacccagaaggcagaggttgtgatgagccaagatcgaaccatagtactccagcctgggcaacaagagtgaaactgtctcaaaaaaaaaaaaaagccctgaagtcgtacttgaccttgctctttctcccataccacacatctagccttcggcacaacataccttcagaacatatccagaatccagacacttttttctaactcttccctctatcacctggttcagacctcctccatctctggcctgctttactggaatagcttccaactcacctttctgcttctgtctatgccccatggtcatctgttctcaacacagcagccagagtaagtcttaaaaatgtaagcgcaatcatgtcactgctctgctcagaatcctccagtgggtccccagctcagactaaacgccaaagtccgcacagtggcctacaagcctctgttccctctctgccttactcattgttccccaggcctcctggtctcctttgttgttccctcaaagttctacctgagaacctttgtacttttgttgttccctctgcctggaatgttcttccctatggacatgattcattctttcactcttttcaggtctctgctcaaataccacatcctcagtgtgatcttgttccttgactgctccaggcatgctcctgcatcaggatctatctgcctggagctcttcccctaggtatccctcactgctcaaacttccccattgagaagcctccccggacccccactaccattgtcctcagcactccccgcctccctcactctgctttttccccacagcatttgcaaccatctgctctgtattccctcccctgtgcctcttacccagcagatgtcagcacatgtggacgccacacagcagggactctgctctttcgttcagttcactgacatatccccaggacctaaacagtgcttgacatatagtagatacccagtaaatatgtggtgagtgaaataatttttcatagaaagtctggaaggacatatactagtattttaaaatcccctctggggttatgaacatggatgatgaatgtattctttttgcatagctgtattttataattttctttataatgatgtgtttatgtcatgccaattgtataaacatgatcttatatatttgtgattttttttctccctcccagataggagcatgctgctatgtggaatgttcagctttaacccagaagggattgaagactgtttttgatgaggctatcatagccattttaactccaaagaaacacactgtaaaaaaaagaataggatcaagatgtataaactgttgtttaattacgtgagaaacatcttcagtggccaaggaaactgtccatttctctcagaaagcaaatgaaatgctacagctatacccagaccttttataggtaatgaagcagttcaaaacttgaaagaaaacaaaacctgtcctcagaattctataaagtgtattaagaatgttccttaaaggtttaagaagcagtaagcagcatctgaagccacaatctattataaatactttatttcaactagaaggtacaatctctcaggggtttcatagtttaaaaagctacaatcacatcatgttgtaactacgtaaaaaacagagctgtaaatggaactgcttggctttgaccatacacatttctgcccagcccttacagaatctgcacaaagaaatatctccctttgctccagttaattgttcttgtatgtaagttgctttctattccagtatatccagagtggtgaaataacaaggccagccacgtagccaaaggtcgctccaagcgtacaggagatgggccatacctgaggagagaatgtatgagatcaaaaaagaacaaatgttttattattacttgagcacaagtgtaacctaaatatttctatattaaagcttaatgtgctttcttaaagaatgccaaaagtgtaataaggtcataactgcatttatcatgaacactaaaaatgtacacattttagttaatgtgcattaaactgtaacaaggcttctggcaattgtagatttagtttgacgctccccaaagtgcatgagacacatgctaaaattacaaattaaaattttgggtcagactttgccataatgatagactcaatttagctctctgaactagttggtaattttttttttttaattcccactttggctgtgtacatcaaatgaaatgagaagtgtgtatgctgaccaaaccacaagaaactttctttaagttgtgttaaagaggaaagacctagaatccaagcgtgttacatgaaaattgtaacagagcagctgcttccacctttcagatatagatgttggaaccacagcagaagttatagagcgacaacttatatacacacctagaatgtaagttaaacaaaataccggcttccagagaccccttttctccagccatattacatcaggctagaagtaattaatgttgatttatt

SEQ ID NO: 1880506 - DNA, 4001 bp, Homo sapiens
ttctgatccctaaccttagaaagaagtgccaaggagctaaaaaataaaaataaaaataaaatcaacaactcacctccaagacaaaagggattactatgcacaggtcctatgtctaaatgaggttgctgaggtgttgaccatatgaaaggaagtttccaactccacccctacaccatgcccgctcttgcccatcatttcttctgtccaataaacccttaattcataccaaatcatgaatgtcattcttctcattgctttactctccaaatcagttgatcaccaaaccccatcaactgttctcccttcagctctgctgtaacatgcccttcatgtgctctatcttcaaactcaatgcctatttaaagctgttgacagcacgccacagaaggttcccgtccttgtcctcagacgtaatgcatggttccaccaatgctatggaacgtagacatttttgatacagtctattatagtcttcttctataagaaaagtgtagttatttcataacagagctcccttgccttcaagtctccctcatccaaactcagtagtgtagcaagcagaataatgtttctaaaatgcaaaccctatcttgcaaatcccgtgtttaaaaagccttcaaggtgacatatttcttcagcagtagctttcaaactgtgctctacaaagttgcggcagtttcctgaaacatctgaagaagagagaaggcactgggttgaattctaagaccctgccataatcagtcaggtagctctgctggtatccgttttatacatttggattctggctcagattttattttgaaagggatcaacttctatttttaaacctggtctgcagaaaaaaggcaaatttccttagtttggctcacaaaattctacatgggttcctatctaattgtttactctctgccgtttactacttttgctaccatttctatgtcccttaaaatgtagtcactcttgaattttgtctgtgattttgatctgaaacaatctatcacctctctgcttttatgcacctaatgttaggtatttttctttactcttcaagacacattttaatcactgcctttatgaagccttcctgccctcccaccctgctccctcacactctccattggctcactcagcccctttcctgtgcttctttttatgtgtttgtcacactgtccttggttttgtggaggccagttcaccatcctaacttataaattctcaagagcaaggaccagggcttgttgtgtgttgcattttggattaccccaagaagcagactgtgggatgacatttaggtacaggccatttaacaaaggagctcctttgaggaacacacttgtgaaagtggaggtgggagaagaagcataattagaaagaagaagaagtcagatgtgatggagacccagggacagcttccatacctgaggaattctggagctagctagtggtcgctggcagttgtcccaaattgaaaagagatggccaggcattgataaacctgatatttagggacagatagtggctctgggcagaaagatcatctgatggtgttctcagcaccggggacaaacatttcttcactgaaaggggatgagggtgacatatcagtgtgtaccacactctgcctactgcctatcaattcttaggtttaagtaaatgactgacataaacattaatggagagaaggcagggtatggggggatacacacgctgcatgccaatagaaattttgtaaacatggctcgtgattaaatagaaacacattaaaatattaaaaacatgataataagagacatttcagtgaaaggcagcaacaaggtggctagatgacatacgggagacatcaggaatggttgaaagcacatgctcctcctcacctctttctggttctctggtgcagtgactctttgtccctgtgagctgaaacacgccctttgcagaagtcatatgaaagggaggtgttctccaaggttcaggctgtggataggtgccagaattttacctcgtctctattcatccagaggttctaagttctgcccataatgatctcatctctcctttccttcaggagcccacaggcactggtggaaagacatagggaaagacatgacattagaataggacaagaggggtgcgggggcagtgacatcagttcctccaagactatcagaggagagtcacacactccgttctcccagaagaagattctctgtggtgtatttggatatcttttaaaaccctgctacaaagtcaaacctccttagcaagacagctttagtcttttgaatattattggtccatgggaaatggccctatttgtgaacatctgattgcttagaggggttctcatttacagaccactaacaagatgaaagtgctaattttaaaagtacttagcctagatatttaagcagcagcagccctgtaagtttgtaactgctgtttctgtattggttgttataccggagccatttcattctcttgcattgaaatggatcagataaatcacattagctgggtttacagaagcaagcaatgacaggttcctcagaactgaaagctaaatagccgactggggtctgactttccttcatcatgtgctctatcttcaaactcaatgcctatttaaagctgctgatagcacgccacggaaggttcccgtccttgtcctcagacataatgcatggttccaccaatgctatggaacgtagacatttttgatacaatctattaaaaagagggattgtagctaattcaaatgcagtaacttctaataaaaaagtaaaaagtacatgaaatcacatgccgcatttgcaaaggcaactgggtagaattcacacaaagaagctctctgttctgtcactaaattatctgtactgggcaggcagaattgataagagaactcattttatgcacacctcaggaatagaacaagagtatatctcatgatctcccagaatagcagggaagttcaaattactaaggggaataaagctcctgtatgcttttagatgtggccattttgaattccccctttatgttgttgcaaaagcctctcctgcagcccctggggtgcaggttacctgtttatatatagcctcactctcttgtcaaggtgaaccctcacacctcactgagcactatcatctcatgagacaaatacactgaaattgtgcaagaaaccaaaatgagcctaagatgactttatgtagcatagtattttgcaacatggtatttcaggacagtttatctatgttacgtgattaaatggtttaagtgtgtcacttatttactttcctacattgaggtcaaattcaataatgagtaaatggaaaagcagctactttttataatgactttacataattcattttttaatcagacacaagaataggaaagtagagggaaaagaagacaaaaatgctagagaaaattatcagaagattttgataaataagaaaacaaaactaaaaatgactaaaggtaacagattgaagagggaaaatatcactgtgtgcagattatagaaagttggaaatacaaatatagagatctaaatctaaatctgtttattgaaaacaagaaagttgaataaaggcaaaagagggccatccagaaagttcccataaaacataaagcagcaagtctgttgctcaggaggactgaaaaataataaatcccagtcttgaatttgccactcactaactctgtgacctgcacaaatcttttcaatcttttgatcttaatcttccttattcataaaattgtaattataatagtatcttcctcatgggcttttataagagatatggatagtatattgtttaatgtctcaaatatcatgattaaaaactgcagctagcaaaaccagaagtggaagtaatgtggtaagttaagcaatggtgatagaggtcgtaacttttaagtaacatttaattatttttaaatgagttgaccagtgtcttaattacaagtgcaattatgcaatatcatgattataaaat

SEQ ID NO: 1880507 - DNA, 4001 bp, Homo sapiens
tggaacacagcagatattcaaatgttttaagtatagtgtttattatccagatagaggagtatattcgttttctagtgttgccacaagcaccatagactggttggattaaaccaaaagaaaatgtattttcttacaattctggaggctacaagtccaccatcaaagtgtcagcacggccggtttcttctgaggcctttctgtggcttgcagatggtaaatataccacaaattttctctgaatgagtcaacatgaatgaggaagcagaaagtgatatctttcttttatgaaatgaattatgtccccaaaattcatatgtcaaagccttaacccccaatgtgactgtgtttggagacagggccttcacagagttaatgaaggttattagtgtggggtcctagtctgctaggactgatgtccttataagaagagatttgggtacagacatgcatgcccacaaagacaagaccatgggaagacacagcaataagatggctgtctacaaaccaagcaggaaccagccctgccagaaattggaaagatgcaatcctcgatcttggatttttagccaaaaataaatttctgttgttgaatccaccccgtctatagtattttgttatggccaccctaacaaacgaatatacttcctttctaaggaaatgggtcaaaaacaaaatttaaaaaaaaaaaaggaaatctagatttttcacctatttggtgactttaggttgtgttctctaccatatgtcaagaagttaagaaggaaaaagtaaaagtagttaaatgtgcagcctgggcaacatggcaagaccctatctctacaaaaaattaaaaaactagccaggtgtggtggcatgcacctgtcatcacagctactcaggagactgaagtgggagaatcaggagcccgggaggtcatggctgcagcgagccatgtttgtgccattgcattccagcctcagcaacagagcaagaccctgtctcaaaaaaaaaaaaaaaaaaggagtccaatgtgtagccaatacgtttgtatgtggctgtgtgtagagatgtgtgcttaaagctaaaggagttactaagatatccgatattcatcctttttatattttctaaaaaatattcattgagaagactagccatgtgctagccaccatgcttataatgtattgtttactttaatcttgtccttttccttataatcctaccagtgttaggaattcatagccccatttccactctagaaaaaaataaaagactcacactttatgtgacttacccaaggtcagggaactggcatgggacagagcacagtttccaacacaggcctctccagcttcaaagactgcatacacatccagcacatgtccttgcctctgtaatataagaagaattgcaaatgtttcacaccacagtatacccagatctgttcaaaacacatgttaactcatctacggctctgtgcctagccctttaaggtaggtactattattttttataatccccattttacagatgaaaaaatgtgttgaggaactcagcctgggtcccacacttcatcttattaaattaacaaacagcatgtggcagagctgatctctgcacccagctcaaggacagtgtgatcatcacctgcatgtgtttggcttccaaatgagggaaatgaacccaatggccctttgcaccctttccacccctgggattttattgctctgacttcaactgatcaacaaaacagacaagactaaatgttaacatgtttttaaacacatagagactcttctcttagaggggagggaaattaaccctcctttaacacaaaatttgacctcaattaaccaaaaatttttgttctgtgtttttacggagaccattgtcatagctgagaaacccaccaatagctaagcatatttagccacagaaactcctacagtaactatggctcttgtgagccaggcctcatcatggctgtgtcaatttccctctgcactgagtgaggggtcccggaacacaaaggcagaggccgcctggttccaaccttcgattacgtcatcctgatggaatgtggacaccattgtgaggactttctgcttaagccttgttttatttaagtttctaacattcttggagacttaaatctcatctacagttgcttggaatccaggcttcagttggattattgaagggatgcagtaaacttatcctcctaaaagctgaactcagcaaatggttaagccaaagctatcctgccccaaggctcaaagcaaatctttcagctcattacatttaaaagattgctagcagtcagcagcctttagatttatgtaacactaagttatacacagtaaaagcatgtgctagttacataacaatgttcacatgaatggttaaaatgggacaggtaaatcagatgcagaaaaccaggacaaaaaggctcccagcagctttaaaatatattgtttaaattcatagcaaggagataatttttttccttttctctccaacaatgacagacatttaccgagtgctcacaaaaggccaggcatttctgcaacacgggtcagtagaaggagcaaagcctttggagtgaggttcaagtgtaattggtatgtgacacttggcaagtttctccagcctcagtttacccatccacaaaatggagctagccatgcctaccttatagaatcaatgtgagaattaaatgaatcatgttgccaagtgtctgacataaaatatatgctcaataaagaccagtttcttagtctgctgctcttagctgatttggtctaataccctgcaagcctgggaatgtggtattattataatccccgtttaccaggtaaggaaactggaggtctctgccagggtgacgttgctgtcatggggcagaggggctttaatacataactcattagaggcatatctcaattttgcaactcacaaacctgcagtttgtgcaggtctttcagcttctctgcttttcctctggctgcctgccatttggcactttccctgctaattagcacctcgaccacagtacagcaggggaaatccaaaagggtgagcttcggttagtagctgaatcatgtggtttaagagctctaggggagagacttttctttttttaagtttggtaaagaaagagatggcatctaagcagtgacacgaatatttttaattatatttggaattcagttctctattatcgtggcctcccactaataggtaattgagaatggatcattatatttaagaagctgtctgatcttcaaggtgattaaactttatttatatgctgagactttaagtgagaatgtgtctcaaaatcatatcagaattcctattcatcttagctattaccaccaaattgcacttctctgtatttatgatatgaaattcacatgtcaaagttctagcccctaatgtgactgtatttgaagacagagcctttacaggcttagttaaggttataagtgtggggtcctagtccaatagggctggtgtccttacaagaagaggacatttggctggagacatgcatgcctctgagacaagaccatgtgaagacacagcaataagatggccatctacaaaccaaggaagtaggtctcaggaaaaaccagccctgctggcaccttgatcttggactgtcagccgcctttctgcaagaaaataaatttctgttgttgcagccgcccagtcagtggtattttgttatggcagccctagcaaagtaatatacttcctttctaaggaaattagtcaaaaaaaaaggaaacctctctgtcccttcattttctaacctgtaaaatcaggaaaatattagttcctcattcacaagggcattgtgaggacaaaatacattatcatttagtattcagaatagtaccagaaatattcataagcactttaaaagtgttttattattgtcaatatcgttaccactaatagcactaccatcacgtctaccaccaccgagaaacctagattgtaacatacaaaagaca

SEQ ID NO: 1880508 - DNA, 4001 bp, Homo sapiens
aaaagaaatcatgaatttcaaagtcatttcaccagtttttaaatagagaatgtccatttcaccagtttttaagtagagaatgacgttcattttcctagaactcaacattttctttagttgcatatttgttgcatataattatattaaaaactgaagggaaaaacacacacattgcctgcatagtcacgtggtgggttctgagaggaaccagcaggaaaatgaaattatgactctaatagaagaactgaaagatggatgacctgatatattcaggggttatctctagcaaagatgggaatctcatttgggtagtaattaattataggtgcctcaacattttcatttgttatgattaacttagtttaggtgatcaatcttgcttgtcagctccaatagataggtagaatttccagtctgagatggaaattattttgatattaatcaatctttacttgttctgagatgacagttttcccctgttaccaagtcctgaagctcaattagcagcctggacattttatgtattttctacattggcaaaaggaaaaccatgtattatttcataagagttgaacctgttgcagagactaaagtcagtgtctctcttctttggctatgcaaaaccaaaccaaaccaaacaaacaataacaacaaccacacacacacacacacaaaacaaacaagaaaaaacccaacaacacaaaaaccaaaccaaaacaaaaaactgctaacatagtctcgggccttctctttactgctggcattttctttcttgctcacgcccttccagaaacactggcttccctgcccttctccaatacatcaggcatattcctgtctccagttctttgcactggccttttcttcctgcacatatcctttatggccgtgcagccttttcccttaagtgcttcctgtcctccttcctgcctctgttcctcctccacagccccgatcactttcccgcatactgtggtattttattttatttatttatttttttggtttattgtaggtctgctgctatcagcatataagtttgtgaattctggggcctctatcttttctgttctctgctgaacttccagagctggaacagtgcctgccatgtaaaaggcacttcctacgtagcttgtgaaaacatgagtgagtcttcacagtaactatgctttagcatgtcattaaaaacaatttcagtgttgtaagaattaaacctcctacgaacatttctgatatgccgcatacccatgacttgctaaagacacaaatgagcacttaaatatgacttccaagagattgttattcaattcttggaagtttcattttcttaaattttatcgaaaatactgggttgaattaaaaattcataatattcctaaagaaaagaaaatctttgcatttctgagtcaaatacttacccttttaaatcagaatttaaaaaataaagtcagtttactcatcaatcaattgcacatctcttagagaatctaaaaaggcattttgctatgtcaagacttgaagaatgggaccacatctgtgtgctcgagatgcttatagtccagctgccttggagcaccactgagcgtgaaggaggtggtttgtagctgggaagtctggtcttaaatacggttgctgctacaaactcggtgaatagtattagccaggtaacctttcctctctaagcctcagtatctctccctattaaatagaactggagataatgatagatagaagaactctaagttcccttacagcagcaaaatgctagattttaaatcaagagataataaaacaaaacacatagctggctttcaataaatacttcttggcttgaaaaaaacgaaattattatctcactgtagtgggaacaggctcctgcagctggtgaaagacaatcctccttctagctgctgaagttgagcaggtctgctgtaacgaggaacagatagcatcaagatcatttccaggactatcctggatggaagatctagggagggagcaaacccacctagtgctagaggacaaacacaccccgttcttgggaggagacctcagaggcgctttgtaatgtggctctggcgccacctggtgattattcctagaatttttcctgtaactccaaggctaccagcgacagacaaaacaccctgcaaaggatttatcaatgcattaaagctgtatgtagttcagggaatgggagcagaataaagagactattctgtcataagaaccaggacagaatgaagctccagaatcccgtatatttacatttaaaaataatcattcacacagcagctgagactaattctggccaatgtaaaaccaaatggacccagctgttctctgactagttgaacaagctcaatcatttcaatatcatttttattggtgattttagttcacaccaaaaaaagttgtacaactcttcagggttgaagcagtgttaggcgctggccgtggagacagggagtcacacagtcgcaaggagcttgtatgcagacgggctttacacccagtaagttgaacacaaaccggaggacagcatttctcatgtgggaagtacagcgggaatgttacagaaacgtgcctgtgaaagttaactaactgtggaccaagcagcattgggcatagtcgaaaaatcagaaatggcttggcagtgactttttgcaagtcttcacattttgatgatcgaaagtgaagaagctcatttacggtggagggaattggcataaaagagcatggaggtcagttagctcagggtgtcccccacacatctggctgggtgtgcaggatacaagaggcagggctagaaagttcaggagggctcagggcaaccttaaccctgaatgaaaaggttggactttactgcctgctgggatgggggatgaagtattggaaattcatgaggcaaaaaccatgtgaatttattggaaggaaaagctaagatttttacaaaaaaaatctgtgatctttagatttgactctagttaaactctgggaatctctagttgggaagaatattgatcacactcacactaatactttaacgttatttatttatttatttattttggtgggcaaatatgcttcaaatgtcatcagtcctccttgggagatatttggacatcaaaagaattatatatatatatgcttagttaggagtaagtcaaattaaagtgtaacatttttcatatttgtgattttaaaaaataactcatgtgagtttagttttagaagaatcaaagaaattacttaggtaaataaaaatgcagtgcttgtactgagtaggattgtatgaagtctgttcatcatcttaaaaacaggcaaggaagattttcagcagaatgagatttgctcggatattagaatggacacatgagaattaagaacaatggttccattcacagattttaaaaagccttcacggatgactggatcaaaaaatctttgtcattttagattttgttaatctttgaacgttaataatttttaaatgttctgtgaaaaaggatacacattttaaaaatgtatttaatgtttcatattaacaagttatctatgtttcccaaacttgctttcaaaaaataaaattttctggggaacattctagatctcttgaatgaggacagactttgcaggtgaattttatgatctagcaatttgggaaagcacactggaattgccttcttaaaatcctcatcaaacagctgacagtcatccccacagatgagtaaatgatggttcagagaggctgagtggcctgaggtccctgaacaaggtactaaccattgggattctagtgtctgtctatctgggtgattccaaagcccaaactctgcccaatatacgtgactgccctgcaaataaagatgatctgacaattgggcatctgtaaacatctctctatacacagttcgttccttccacagttcaaaagtcagcatctatattggaccagcgggaggtagggaagttcaagaggtgggccactggctgtcctc

SEQ ID NO: 1880509 - DNA, 4001 bp, Homo sapiens
cctgaaccagaatgccatatccctccactcacttttttgttgtcaaaaatttggtcagtgtcccaacctagctgcaaaaagaaactgggagatgtcttctcatctgcctaggaaggtgaaatgaggtagtgaacatgtagcattttccctactatgacatgtttaggaaaccgtaagaagactggcatacctggaaaccaatgggaattatgggttggattgggggtgtaatatgtgttgtggagagagggtaggtagacagtgctaggagacacaagaacgtaggtaccatggccaatataactagaaggactgggtggagtcaagagcctgagtgccatgctaagaatagcatgccagttcaatgggagtttaaagatgggaagtgagcaaagacagggagaggtggtcagtggagaatcctagagctcaaacttctcaacctgagagccccaagtaaaggaccagctcttgctccaggaccagcctgaggttccaattgctttaagaatccatcgagtgcagaccaggatatgagactctgacctaaaaacaaactaaaaagttctgtgttcattacctctggacattgtgtgatccttcctctaatggcttggctcccaaaacctccccactggcgctcccctctcagctgcatcccaattccctccgctgcaccccaattccctccgctgcaccccaattccctccgctgcaccccaattccctccgctgcatcccatctccctccgcaggctcacctcccttttctctccgggttcagcctttcttcttgattttgatgggtgcgggttcttggccccttctcatggggctctgcctccagtagtacgtgctccagctgacttgcattctgttttacgctcagccatcttcaaccaggcctatccaatcaaaataataacattaataactagtatgtactaaatggttactatatgccaagcgctattcaaacatgttttataaggtcatgtgctgtataacaatatttcagtcaatatactattgtggtcccataagagtataatactgtatttttactgtgtactttttctatgtttagatgtgtttagatacataaatacttaccagtgtgctacaattgcctgcagtattcagtaccataacatgctgcacgagtttgtagcctagcaggaataggctataccatatatccaaggtgtgtagaaggctacaccatctgagtctgtgtaagtacacactatgatgttcacacaaactcatgatcgcccagtgacacatttctctgatcttaagcaatgcatgactgtatataattatttattctcaggaaaaaaaccatgaggtaggtggtattgttattgctttatgcagataaagaaacagatgcaaaaaaggctaacttgccacattcatggcgcttataagtggtcaagctagaatctgaatccaggatgtctggcttttaactagacgtaagttaaaagtgctatcggtactactaagtaaaggatgaaggagaggaaagatagagacaacatgccttcatgatcttgaaagtaaaaaaagaatgcaagtagcagttgtaatcactaagaagggagaagaaacagtctccattgtagataattgcaaagaaggaggcgccaccagaggataaaaagcctccaatcattcacacaagggacatttgtttcttaaaagggagacaaactcctggaagagaatagatacgcctgattttttctcagtggaatttcacttgccctggcaggtgggtggcagggagatctgaggcccctcgaattacagctcctgggccctgcctcagaaaagtccattcgtctcggtagaacccctcccacagactcacaatgtggccgtctcgagctggcccgaggctggacgtgcagtcagccgagcacacaaaatgagaactgtttccctgcgtgcagctggcgcgcgctttccgctagtcgcagctgcttggagccctgcgcgctggcggggccacgcccccgatgaatattcatgcccagcttgggctcgggagcccaggatttcaaagcccctgaagggatttgaggggcgaaggagcttcctgatagggagttagaaggaaggaaggagccgggctttgtacgggcttgcttttgaagactacaaagaggaagggtcacatggaaagtcaaatcccgggttgctaatctaggctaggtcaagtttgcaatgagagctagctccctccctccttgtaatttatcgagtctttcaatgtcctttcacacagacaacgtgcaattactggtgtttcgcagacaggctctctttctagcactggggagcatgaaaacaaccgagagtaggcttttagctggattttaagtgcttacttcataactcttacccagttaaacgtctgcgatgacaacgctccttcttctcacataggtttctgtgcatggattttaatttgcacacattctttacctaatctatgatttttagatacgtcagtctgtcatgggctagaaacttaaaaaaaaaaaaacaaaacttttaaaatggatatactcttaggtctagttgagacactaagtattaaccctatttattagcactcaagtttggctattatttttattaatggagagatttcccagcacagatcatctgaaagagtagatagttcccaaatgcatttcactgacttatatataatactaggtgggcttttgagtaagtggattcactgtcttttgttgttgttggggccataaaagtgtttactttagaatccacttaacagaaattactggagctttattgagtgcctctattccattaatccctccattaagagagaggcttaatgctttttacctacaaattggaaatggaagaaataacattgggaggaaaccaaagaataaacaggaatatattgtgaaagcatttagcttaccttaaatgaaggcaaacccctcccccaccccacttccataatggagaactgaacaaacatgcagatatgagggtagaaccactgcgagcagcccacgggatcttatgggaaataggacgaggatcagacaaaggacataaacaaatatccccataaacttggattctagcaattatagacagacacatttgccatcaatccccagcaaagttctagattgaatagttaagcaagcagctagtgagcactttagaaaggtgactcctaagaaccagtaagagttcaccagaactagtcaagccaaactgtatttcctttttatttatttttaaaaaacaaaatgcttgacttcatcacaatcccaaaaacaacgaacatattgacaaaaggatgacctatgtcccccaaccttttcttttttttctataatggactcagtattcagaattgctaaattgagtatctggttgctatattagtccattcttgcattgctgtaaagaaatacctgagactgggtaatttataagaaaggaggtttaattggctcatggttccgcaagctgtccatagtggcatctgctcctgaggaggccttggaaagtttacaatcctagtggaaggcaaagggggagcaacatcttacataaccagagcaagaggaaggcgagagggaggtgctacacacttttaaacacccagacctcatgagaactctatcaggagaatagcacgaaggagatggtgctaaaccattcatgagaaatccacctccatgatccaaccacctcccacgaggctccacgtccaacattagggattacaattcaacatgagatctgggtggagacacagatcctacaccatatcagtagccaaaagagaatagactttagagccagaaggaactgggtttgattccaggctctgcaacttactatttatgtgagtagattggacatctctgaatctcagttgtcacaactgcaaaatgagaatagaatatttacttcatagatattaaagaaaa

SEQ ID NO: 1880510 - DNA, 4001 bp, Homo sapiens
gggcttgcgtttttccttttcagaatccttcgacttcactacgaagtttgctggtaggcgcctctgctccggggtcggagcctcccaccaaggctccttcccctccccttctccccgcccccgcgagccgaagcagccgcagcctccaccaggacccggccgcccgctcgatccccctgacccggaccctgcgcccaggttgcagcgccgccctcccggccttgcccccgggctcggctgggggctcttttccccggggcgaaactcgcccgcctggctcacttcaaggagacacccgctgcctcccgaggaactcctaataccatccatacagctttaatgcgtttataattcgataagtgatttcaatttgaaattgttagtaactaattttatgggtaatttttccacatcaaatatttaagcatcagattaagggagccagttccgacactggataataagggggtttcccccactcccgcgcctccgcctccctccgtttcctaccgagtcgtttttcgaaatccccaaaagatggcagtcgaagccgactttcctcttttcctgtggctctgcgaagggagggggagagaggaggatgggggagtgcgagagtggggggcggagagagagagagagacagagagagagaaggaggaggaggagaaggagaagaaaaaaaggggggagagaaaagctagacggtgcatggacttttcagacgaattctttcacacgtttctaatacaagcgaaaagcagtggtgaatttcctggaaaagtcctggcagaaatgaaagccaaaaaacgtgccttgtggcctcagggtacgggatgtgagaaactcagcacattcaagctaaatcttcattttagaacaggagagggagagggagacccagagaggaaccgactcgactgactttagggtctttctttgtattttaacattgtatataaatactacacaactaggcaacgtgtttcctcgaggactggactctgcgaattacataatgaggggaaagaggtaggggtggggaaggggaaggggtgggggcagactgcagcgggcggaggggagactggggcgagcagcggatgaattgcagaccagttgccaaaactttttttttttccctgctgctgctgctgcggctgcctttgctgctgcctttgctttgaatgtgggtaactaggaaacagcaagccgtctgagaagacggaatttccaacgtgtaaaatgttcttaacggaaccattgagcgagtgcaataaggcgtgagggggaactaatcttcccatttaaatgtttgtggcaattttatctaaatgaattttaatgctaaacgagggtaattccccatttgtagcgcgtttacttctctttcctgtgcttctaaagcagtcgaacatcatgcaatgaacaataacaataaaaatactgtcaaggcatattattcattttgaatgtgttataattacagctgattaaatatgatagggtaaaatatttttaattttttgaaaaaaaaatttaaatcatattaaaaagtagtctcattcagccagagccagccccctttccaccccccccccacccccccacccccccaccaccaaataaaaataaaaaccaggtacaattttgtgcccttgtttagaggagggcgttttgtttttgccttttaggaaacatcaaaaacactctcagcacctctattatttgcctctttcggataagtgtcctcaataaccttcgagctggctctgaaatttacaagaggaaaagctaaaatagcattaagaggggagggcatcgaggcaggggaagaaaggaactgcgaagagcgaggctctcacctaaatggctcacagagggggaactcacggaaatagcagtttattttttctaattcctggacactgctgatctcgattcttcagagtcaccatattccctaactactcttcacttgtaaacctccctcccctagcgcctctctctttctctctgtctctccctctcgcctctctccctctccccaccacacctcctcccctttctttccctcccccacccatcctgagcctcctcaggaataaaggctgaaaataaccaactcacccgggcatgtactggagaggaggagcaaatagacagtttataaagtttattattaattgttaaagtaaataaatggttgttaactgctagcaaccacctatcaaaagagaatgatttcactcacatcgactatttaggtagaggaagaattgccactaggtcaacaagggagatttaaacaatcccatctatgggctggggaggggtagaagcgctgccagagatggctgcagtaggctgagccttgctctctgcgcatccacgtgtttagaaacaaggccccatcagcaaaaggtgagaatgcattgctactccagcaggtgagtcagtcaatcacacatcacctagtaaagccaacccacagctggtttctcttttcgaatagaaaatagaattgctaagggccggtttatagggtgacttgggcctgaatgtcagacttgagtttaaggctctctctcctccgacccatcctttgtttacaaagcaatcactactgaaaggcttattttttaaaacgaatttgccttaattaaaatatttgtatattttccttagctttgggaagcactttttatagcagcaattttatttaaataaaattataagctattccagcttaaacatattattttctaccatttagccggctgccatgcagaaatcttgtacagctgttctggaaaattggttaataaccagttttatccaatgagaacatagagcatatttataaaaattagattttgaagtctggtctcttcaattcatgtagttaatttcctaataaacatatactgctcatcctaggtaacatcctttagtaaaagacttaactttgtacttaggtttgcctttatgtgcaagaataatttcactgatattagatgagtaattctgttggatgtaattctgagtctagagttagtttagtgcctttaggcctcaaatttgctgatattaggagttcattaagtcagcttaaagaaatcagtggttattattaaacaacttactttgcggttaaaattgtcaaatacatatatggcttagggagccaaaattaatttttatatttactgtattaatctttaaaaatctggggggcagtaaacaaatttttcaagcagtggagtcagcatgacaaaaataatcttgtttttattttagattcagatttcattactgcactcaaacgactacaactgggcttggcgttattatacaatccaaactgtttccatcagaaacgctaagactcagtgtgcaatgattgttattaataattagctccttggtttcttgatagaaaaaggctatcaacaagcatttgtttatccacaacaaaaagtataattagcttatcccacttagtaaatcttgtatgcatgccaactcataccaaactgctacttttacaaaaaaaaattgcaataatacagttcatttttccagtcctttttgcacaaaatttatttacaatgtctacataaatgctccaaggtgggactatgaaaaaatacacacatgaccgatgctttgctcagaaataaagtcaacatattaaaaataaatcttcagtctatgttttagagctgcttaaaacaggaagtgatgtataaggtggtggttgttgcatggggacaatgatgcttgatgtgacaattaggcttctaaacacacggccttttggtttccatgcctcctcctaccagtctccttaagacactgcctgcaacagctgattaatcattgttgatgactgcagtttttcccatccttcccgatttacatctgttcaggccaattcaaatatggtgagtaaatgaattagacatgcaaattcaagccccaggctagaaagagggaga

SEQ ID NO: 1880511 - DNA, 4001 bp, Homo sapiens
catatgtgggcacatcgcctaggcttattgggagggcggtctagtatcctgatggcatctataaatacaaagctcacatctgaaggtaggttggatcttcttgaatggggaggccatgcctagtttcagtaacccagaggaaggacgtgaatttaggaaactagaactgagggagctcagattctgttggtctcacaggtcaaccatggaagtcacaggcacccctggccagtgggtataaataatagtaaccatcatgagaaggtagaccaggaaccaggaagaacccatttattggttcaacaattgaagagaagtaagctgagttgtaaagatcaatgaaattgtctctttttcttgtccttttgtttcctcctgtcatttatccaattcttatatgaacattcttactctgatcagtcggtctacagagaatcaacccaagagtcctccgtccagtataagaaaaagagagggaaacagtgccccgttagaccaatgtgtcaatggtaggatcagacatagatcccaaaggaagtgagtcttgggtgaaagccaaggccgtatggaccacccagtgccaactctgaggttctgaactttatttttactaagaaaagggcaatttcctcacagcactaggcaaaaatggaaagctatcctggcacacaagtatagaatgccaccagagacaagcagctggaagaaaaagccaggccaccagcaacagagacaaagaactgtgagcttgagaggctatggcagatggtgagggaaggacagtgagggagaaagagactcagatgcagcagaggctcagtggctagacttaggacccagccagggcttattgcaaaataagcacttggtaactttttatatctttgccttggcaaccaggaaactcaaagttaaattttatgcttcatttagttttggcttttgttgttgttgttgttgttcttgttgtttgcagagacagagtctagctctgtcgcccaggctggagtgcagtggtgcgatcttggctcactgcaacctctggctcccaggttcaaacaattctcctgcctcagcctcccgagtagctgggactacaggcgcctgccgccacccccatttaatttattttgtattttagtagaggcggggtttcaccgtgttgcccaggctggtctcgaacttctgagctcaggcaatccacccacctcggcctcccaaaatgttaggattacaggcatgagccaccgcacctggccagtttttatcatatataaattcctactctcttattattcatttcatctcatttcttgactctcatcttttacacttattttaatgatttgactattgtatttgtatttaatatgaatgctttctataaatagactcatgtaaggcttgtttaggaaataagtgaaattgaattaaatacgtatgtctaacatgaatctattaagtttctcagcagatgaaaaagaccttccttataacaacacttgtcatacctgaagaacattatttagccagttcttaatcttctctttaccagaattgatcacaaaaattttaactcatttttagcttttgaaacaatgacaagtttacagaaaatttgcatgtacagtacaaagaattttttttaccctgaatcatttgagagtaaattgctgacctaatgccccaaacccctgaacacttaagagtttagtcctacacactatacaatatacccatcagaatccagaaattaacagcagttcacaactactatctaattatcagactccattcaagattcgccagttgtcccaatcaagtattttatagcaaaaatattcaatacagaatctcacttttcatttagttgtcctgtctctgaggtgtcctggagcaggaatcaggtctcccctctctctttgacatcatgactttgacacttcggaagagtttggccagttatcttgtccaatgtctcccattttgagtttgtctattgttttgtcgtggttagatcgatgttatgagtctttgtcagaatattacaaaagtgactctgtgttcccctcatggcatcctgccaggtgacacatgacttcaacatgtcccacttggttaagatggtgtctaccaggactctccacagtgaggtggtttttctccttctgtagttaataaatattctgtggggagatactttgaaactatgtaaatatattgttcctcattaaactttctgtttattttttattattattattattttttgagacagactctcgctctgtcgccaggctggagtgcagtggtgcaatctcagctcactgcaacctccacctcccagattcaagcaattctcctgcgtcagcctcccgagtagctgggactacaggtgtgcgccaccacgcccagctaatttttgtatttttagtagagacagggtttcaccatgttggccaggatggtctcgatctcttgacctcgtgatccacccgcctcagcctcccaaagtgctgggattacaggcgtgagccactgcgcctggccaacactctttttgttactgccattctacccctcaggtccaccccacagcctgtccaattagctatgtgagttaactgctcagtttggtctctgcaaagcagagctaaaacaaacaatgcgccttcctttagggctcttaaaattaaagcatgagtaccctctagtggcttgcaggaaagtttccacgattctcgaacttttcctaagtcccagatgagtgaaggacactggcaggggtgggatgtactggagccagatgtgttccccaccagcacacccaggaaatacatttttgcacagctgtaattttgacttaaacatttgtttaaggtttgcatgctcaatcatatgacctacatgtttggctcagtatacatttgttttctcaaaatctttagtatagtgagtgctccagaaagtcattgcatgtttacctcatagacccatgaactctgaaaagcatagagttccactgaaatgccctttctgagaatcaaagttgaagttcttttcacttgcattggaagaaacctagattttgtgaccagagatggaataaaatatgaatagaaccacattaagtagaatgttctcagtatagcctggcagaaggtgtgtcgtgcctagcatgaggtgacatggtgatgtgtgcaatggaaatggagttatttggcttcaaactgtgtttgaactcttatgaggattcaggcaatagagcagacagggatacttcaatccccactggggttgaactgcccttttccctctgtgtcaaataagaggtggtgatgctggtctatgtgatgcttctgaccttaataataattatgtttttttgtttctggtttctcctccactaataaggctctgggtcttctccttagggagaaggaattgtatgactgaaaaaaaaaaaaaaaaaaaaaaaagcttgattttcctagtactcctgcaacgataaggcaggccaggaccttccagaagttaaaaaacaggctccactgaaacctgtgataaggaagcaacagaccatcactgatgggtctgggatgaaattagatcccctgttacagagtacattttaggagacgctaaaacagaaacagggtgagaactccaggctgagacattccagcggggagggatagtttagatttgtttagcataaggataacaaggagcagctcatggttcccttatcaactaaattagctgagattactgaggcagcggggtgttgcatgagtatgctggcaaggtgggggaggtgtcatgccaagtacattcttaatattgataaaatacagctatgtaggagggtgaaatattctcaaagattagtcaacaagagataaatcaaagcccaacctgataaaaacagactaactgcaattagaaccagcccagctagtaatgtcaagtcactctacgttagtgtttcattctgcaaa

SEQ ID NO: 1880512 - DNA, 4001 bp, Homo sapiens
ccttctctttcccacctggttgctgaaatctgtaggcattcttcattgaaattttgtttatgctcagtgattgacaacgtcatctccaaattccttttcatcctctctattttagccacacaatcccaaggttacaccatagattttgttaacaaacactgcagattgccaacatcataaattcaaactggctacagttttctagattttcagctcatctaatttatgacattgaaagcaatctttgtggcagagaaagtatttgccaaattccccaaatgaaatgagcttctgtttactttcaaaactcccttggagcacactgaattcatgtggctaattctagttaaagtataccaaatgaaaagtggttgtacaacctctatcccatgctgcctctgcttaaacgactttgggagtcatgcattaaaataatagcatgacaacacggatgaaggctaaatcaactcctagctagatgaaataaggagtcctcactaacacatttcaagatggtcttgcctaagaaattaccttttgttatactagccaatgaaaatttgaggatttgtttcttgtgcgacgagtgttaattatcccaaagaaaagttggctgtcacaatccattgaattcctttccttttatgtagtgacactccctttctgcctctactttccttttcatctagcttgtattttatggtccatacttatattcagcattttgttaattaagtctatcactctttatactttctcctgtcaaaacctcacccttggatcaataaatcatctgcattctctagtctcacaccaagcacccaaatgttttcttatctacaatgtcatgattacctctttaaaagagtactctacatgggaagatgtttgattattattttttagtatgtttactccacaaaatgcttattacatacttttaacttaatattaaaaaagtctctttctgcttttattttcagttaatatgtttcacaccttattgagaaaatagaaaccatttaaaaataaatctcttcttctaccctcaaaactattttaaaactatcatcctcttcattagtcattgtcttcttttttccactcacttctccattccttcattctaatgaagtatttctatttgtatgaaggacttattcattcccatatgttcagtttccattacctctcatcttctcaaagaacctagtattctcctccacatgtctaataataattctatctggaaaagtcacaaatttatttcctgtctccttctacctactgccctaattcctgttccacttcacactcaaacttgtgaaataaatgttttaacatttactgtgtctacctcctcacctaaccattctctccagtccctgactcccctgcactatttggcaaagactgttctatgtatatacatatatatttacaaaatgtattattttactacctctaattttaacatatatcaggcacttcagaacatctagaaagactagaccttacaaaaactttagcattgtcaactatatatacagtagtgagaataaaatgcacacaaaacaatggatagagtatgaaaagtcttctaaatatgactagtctagcacagaaccttcttttccttctcaggtcttctgctccatgtcctctagcccattgaacaaacgtggacgtgttgcttccagaagtggtctaataactccatttcaaaaagtcaactccagaagacattttctatgacttctttttaaactaatgagaatttgcaaggtgtgtgattttctaactctacttcatacgttggcaacctctttactctagaagggctggatgtggcaaatgttttcttttaaaaggttttgggggagaagttgagagcagctttttcatattatataggcaggcattctataaacagccagtaaatcttcccaaaagatggtgggcatttccagcgggccaaatgggggatgtcattctgccatttctctcttccgacagcaaggtcgatagaacatagagcaagtgccgctaaccgttccactcgttgtagggactctgctcaccttccaggcccgttaaggccgttgtcccttgtcgtcaggactaggtacgtctcttgctcattcgggacagagtggtcacccaggacctggatctgcacggctctgtgacctgagaaggcagctagctgaggcagcgtctgtgaccgccttcctggaccctccacaccctagcggctctgtcacgtgacactcaagtggccgccattattatggcccgacacacctgccgccacccaaagtcgctgagtcctcgcggctcggcaggggctttgtctaggcccgacaggattggaccgagagacccggcggccagcgggttcagggctgggaaaggccgccgctgccatcaggtctccaggcggaatagggaagagaggttcgccgctgcttcaaagcctggctgcccggccttggctgccacagctaggtctcggggcgtctgcagggcagagggcgcgcccgctgcgtccccagctcgctgcaggcccaggcagcgtccaaagcgcccccggggcgagggcagctggccgtgcttggcttgctctctgccagaacggaactcaagaccgttaagacatatacctgaccactgtcttcctgcatagaagagaacatttttttctccttatctttttagaactcataacaacagagttaagcacttttcctctttcgaaacacattggtatgtttcaaatggccactccctctttattcgccaaatctcattgtacacaaatgtttgtttcttctgtttccatccttttactttctattttctgttactaattcatttcattcagtttttacgtctgtgaatatcctctctaatgccttaactaccaaaattttctctctcttttttgtttttagagaaagggtctcactatgttgcccaggctggagtgcagtgttgtgatctcagctcactgcaacctctgcctcctgggctcaagtgatcctcccacctcagtctcctgagcagctgtgactgcatgtgcaccaccaggcccttttttttttttttttaatagagacaatctattttgcccaggctggttttgaactcctgacctcaagccatcctcttgccttagcctccaaaagtgctgggattacaggtatgagccatcacatccggccaaaaattttctttcttattttgactcctaagcatattcaattagtgcttgatatcttcactaacaccgttcaaagtttcccaaacttaacatgtccaaaatgaaattctaaatattttcttccaagatttctcctgcatttttatatatttctgtaaatgtgctgctgctaaaatgctggaaatctgtcattattaacaattcactctagctcaacacaatgttctataaccaagcctgtttattttacattaaatatgtacttataattcatgctttttcattcaaatctttgcagctactgttgactcaatcttgttgtattaaagttgtttctttagtgttgcccctgtttgaattttcttacctttatcccacccatcctcaatttacaatccattctactacacaactgatagactgtttaaaaaatcatgagtgagatcaaatttcacacaaggtttaaattaccaattgtgaaaaattggcattttgaattgtgaaaaaaatttcaaacacctttgcatgtattacaaagccctggtgagctgatccctacctagcttttcagctgtgtcaagcatcacctttctcctgtgcttaatatgttcaagacatttctttcagtttttcaaattaacttttagaagttttacatatacaaaaaaacggaggaagagtataaaatttcccacacactttatagtcagtttcctctattattaacatcttacattaatctggtctatttgttacaattaatgaattaatatttaca

SEQ ID NO: 1880513 - DNA, 4001 bp, Homo sapiens
cctggtggcacttttgaatcactcagtagcctgaaacttactactgcccaggacgcatccatatcaattacatcagaatctcaggggtagaggctgaactggatacagtcctaaaagctccttagctaatgctaaccaatggcaaaattgagaatcactagcattgggttctttctatttcaaagttcaaagtgttggtaaattcccccaaagaagtagattgccatcttagtagccaaaaaaaaagaaactccaatcacaaaagagtcttaaaaataagtatttgaaaggagagggggttaatgcatttcaggtgactaggcaggttctagttacatgaatccaaactaattcttaaataaggttaacccagttatattggccattgagtgcccgaggtcagaacctggggagggaagaagatctagatgccttctctgatttaatgactcaatcaatgatgttatctcagatggcagaagcaaggccaaagctggggacaaaggaacttccccctcctttcctttacctgctctctcgagggataggacatatggtagaatgcatctgttggatgtggtcaagcccctttggtgtggaggtttttccatcaaaacctctctgacctgcaggccagagagggagacgtatgcaccagagctttttttttttttttttttttttagatggggtcttgctcttttgcccaggctggagtgcagtggcacagtgatagctcactgcaacctcaacctcctggcctcaagcaatcttcccatctcagtctgtggagcagctaggattacagccttgagccacctcaccctgactggcagagcttttcaactccacacacaagcctgccctgtggaccctctccagcaggcttcaagagcccagtgggaagcggcaggggtgataatgcagcagcccagagctgaagggggccagttcaagactaagagggagactgaacaaaaacgctctccacctcccacacacttgcacaacgcaaaggagatgcagcatggaccctgaggggtctaaagattggctgtcatgactgtgccaggcactgtgccaggcactgtgccagggcctgaccgacgttgtcacccatggtcttcatgacttctgacggcccatcatattgtaattcaggcctcagatttcctgaatcagagcaggggctcctgccattgaagtcctgcctccctctccactgtcttacttcttgtccagtgcaagaaaatagatcaagaagggtcgcttggaagctcaaactctttcgaagaagctcaggctatcgcagcgaaacagaccctgagcggctgcgcagcccttctgctgtgtcccgcaggcatcggaagacccggggctgcatcagcactcccggggcccacatcctgcagccttctttccgggcgttttcctgctgccttggagttctgtggggacgcgcattggtcaccaaacaagggtgcgcgcctcactgagtgagaatggcccctaatctggagccccagcaccgatccctgctcagccccggagagtgggaggcttgtcgggtcgcttgactacaacgtgcgggctgcgctctagctggcggtgcgcctcccagctgagcagcccaatgagcagggaaccgagaaagaccgaaagcagaggggttcctagtcccgctgacccccaagggccctcattctctgcagccggccgtggcttccagcgggttcgctttctccctgggagtcccggaggcgcccggcaccaggagggcaacgaaggggcaggaggcgctgccgtccgggcgccctccgagcacagccaggaagtcctccttacctcatgggtctgcggctcctcgccgggctgcgggcgcaggcagctcaccaccgcggctaggccggccccggacatcgcggcggcgggcgcggcgagcggggatgcgcgggcgtcggggcggcagccgcaacggactctgccctcctcgtgcaggccggaggccccgcctgggcgcgcggcgctcggtccttcacgtgaccgctgcgggtgggcctgcgggcggaggacgggcgacggcggggcgggctcccaggctccggccccttccctggcggcgcgctgggcccagcgcagggaagcggatccggcagggacggggagtgggacgcgcgaggggcagcaggggtaagagctcgggcgggtggccgcgtgggttaaaggtcaaaggtcacctccgcaaatggcaccaactgtgtagcctggcagtgggactttgtccagctttctgatcagtagaatagaaggatgccttcctccaagacctgtttggagaattaaaccagctaatgtaggagccacggctgccgctggggagggcccagtaattattagttccctccccgtcctaggggaccccccaggagagcgtagtgtgggctcctagtggggcctctcgaggcaaatacctcccgagagggggcgcgcgccctcccctcttcccatggggcgcccccagttccagcctgacctggaactcagggttgccagagctgctgaattttcaagagaaagcggaaatctgagttttaatgagaccgctcctgattttttaaaacgttgatcatgaagttaaaacaataataatggtaagtacttgccggccaactgtcaggtaagccctggcgggcaaagcaggtggtcctgggctcctgtaccaaccaacttcactgactcctcccagaggagggagaagcctggcgggactgtgacaatccctgtcacctggcatgaggtgtgatgtccctctgggtggttcatcaagacttggtgctaggccaagccagtggctcatgcctgtaatcccagcattctgggaggccaaggcgggagtgacaagtgaagccagctggacttcctgagtgcagtggggacttggggaacttttcttacaagaggattgtaaaatgcaccaatcaggaacttttctgtcttacaagaaaattgtaaaacgcaccaatcagtgctctgtaaaatgcaccaatcagcggtattctaaaagtagccaattgcggggaggattgaaaaaagggcactctgataggacagaaacggaacatgggaggggccaataagggaataaaagctggccaccaccgcagccggcagcgacaactgcttgggtcccggtcagctttgcggaagctttattctttctgttttcacaataaaccttgctactgcagggtccctgccatctttaagagctgtaacactcaccagcaaggtccatggcttcattcttgaagaccaggaacccaccggaaggaaccaactccagacacaagaggattgtccaagcccaagagtttgatacctgcgtaggcaacatatccagaccagatctctttaaaaaaaaaaagagctgggcatggtggcaaacctatagttggctagtctaggcagagatgaaggatggcttgagcttaggaggttgaggctgcagtgagtggtgattgcaccactgtaatccagcctgggcaacagcaatactgctctctaaacataaaaaattaaataaagacttagtgctaggtgctgatttctggcaagttccaggtgggagactggcaggcagcattatagtcctctaagagaattcaaaccctaatttctgggactatgaatctgttactttacaaggcaaaagagccttgtggacaggtttctaatcagttgactttaaaatagggaggttatcctggatttatctgggttggcctggtggaatcacccttaaaccctaaagagcaagacaggggagaggagacatttgaagcttatgaaagactcagtgtgcctggatgggacgctgttgcctcgaggatgaagggaactgcaaggaactaaagttctgctgacaatttgaatgagctcgaaagtgaattcttccccagggccttgcagaaaggaacacaatttgctgacacctttattcc

SEQ ID NO: 1880514 - DNA, 4001 bp, Homo sapiens
ggagggagaagagatggttctggaaaaacttgtgcctttctaatgaaagagagcagatgaccctgatgccaaagttccctcttatttcttacactcaagaaatgacagctgtgagagaaaggccaggagaatttcagaaatgttggcctagatgtggctgagcccctggaccatgctaacaaccttttaccttcagacttcttgtaatggcagtcaaataaaccacattttgtttaagcccctatagctgggtattctgttatctgcagttcaacacacatttctagctgatgtagagtatatgtgaattttccttaggtaactgtatagaattttatttagagacattcttaattttaaaattaaaaaaaaaaacaaagaaaaaagacgggagaacacacacgtggacacaaagaagggaacaacagacactggacctgttggagggtggagggtgggaggagggagagaatcagaagaaataactattggatactaggcctagtagctgggtgatgaaataacctgtacaacaaacccccgtgacacaagtttacctacatagcaaacatgcacatgtaccccgagcctaaaataaaagttgaaaaaaaaaaaaggggaggagagaaaaagaaagaaagggaaggagggggagagagaggcacagagaggggccattacagaacattgtagttataagataagatggttaatatattttaaatccgtagatcatctaacctagataactcattttatgtacagtaaactgaggtctaattccaaggtcacaccaataacagaggtggaatcagaagccagaatcacagctcagaaactgctggttttctattatgaaatcaggaagattttggccaggtgtggtggctcacacctgtaatcccagcactttgggaggccgaggtgggcggatcaccttagatcaggagtttgagaccagcctgggcaacatggtaaaaccccgtctctactaaaaatacaaaaattagctgggcgtggtggcaggtgcctgtaatcccagctacttaggaggctgaggcaggagaactgcttgagctcaggaggtggaggttgcagtgagctgagatcacaccactgcactccagtctgggcgacagagcgagaccccgtctcaaaaaaaaaaaaaaaatcaggaagattttataaaatctattgtgaaattttgtgaaagtaatgacaacactaaatcatagattcttaccatgaggtcgttgcaaacaaccaaccaggaattgaattaaaaatattgaataatccaaagctgcattctctgaatacacatgggcacacacatacagttatatatatttatataacctcatccaatgtacgtttgtgtgtgtcaatatactatgtataaggctgtcctacaatatattcacttacattggttcttttcctacctcttattctgtcttatttgtactctcattgctagaattttagaaaggaggagtcactatgtaagtgcttagaggctaatctgatcatgtcgtttctctgattaaaaacctttgatgttccttcacttcccataggaaaacattcaaattcctgggatcctgacccccagcctatctacctcatctcctatttcctgacctcagctgtccttccttcccatctcacctgagtcctccaagcacaccaaacactttcacatctctttgcccttacttatatcttttcctcaccaggatttctcttatgcaccttctccctggtgagttactcagcctttaaccagatcaaaattcatcctaatcccacagccagaaatggatctgacttaatgctttagactgaaagtagcagcaacttcatattaaatagataagcaagatggaaatctactagctcacatgacaagaagtcttgggagcatagggtttagggatggttgattcagcagctcaacaacatcatcaggaccccaggttttctctgactcccgcggcatttagcatctgcgtcatcctaaagctggtatccctggtaaccatagaatctattagctgcaactggggcaatagacaagaaagggtgaatgaagaaacacaatagcagtcttagcctataacacaattgtgtccagagcacaaattcccaggattgaagagaaccttaaaatattatcccattcttgagtgtgacctttggtgttatagggaaatcagaacgaactgaataaagggagaaagaaggatgaagtccaaggaggaaagggtacaaatagagaaaaaaattgtttaagatgtcaattatattcaataatcttttatttctctttataaagtaagagaactgtaaggtttgtttttgtttttgtttttgtttttgagacggagtcttgctctgccgcccaagctggagtgcagtggcgcaatctctgctcactgcaagctccgcctcctgggttcacgccattctcctgcctcagcctcccgagtagctgggactacaggcaccgaccaccacgcccggctaattttattttgtatttttagtagagacagggtttcactgtgttagccaggtttgtcttgatctcttgacctcgtgatccgctcacctcggccccccaaagtgctgggattacaagcgtgagccaccacgcctggccagaattttttttttttttttttttttttgagatagagaggacaacaggtagggagtgcagtggtgcaatctcagctcaccgcaacctccgtctcctgggttcaagattctcctgcctcagcctccccagtagctggaataacaggcatatgctgccacgcccagctaatttttgtatttttagttagagatgaggtttcaccatgttgaccaggctggtctcgaactcctgacctcaagtgacccacctgcctcggcctcccaaagtgctgggattacagatgtgagccactgtgcccggctgactataagaaatttaaagtaaactttgttttagacactctttaactcgtttataatccatggaattcatcctgtcttgggaggcaattcagatggtaccaaatattggcaaacatttacacttcttcagtcctttgtgataatgaggagttgaatgtcacaagaatagcagagggagaaatatgaactaacttttgagcatacttctaggaatctatctaagaaacaaatcctaaacatgaaaaaaagtgttatgcacaaactactcactcaatatttattataataaaactgtagcaggactagccacagacaaaacccctcagacaccaagttaaagaaggaaaggctttattcagccaggagcttcagcaagactcacgtctccaaaaaccgagctccccgagtgagcaactcctgtcccatttaagggcttaaaactctaagggggtctgcttgagagggtcgtgatggattgagcaagcaggcagtacatgactgggggctgcatgcactggtaatcagaatggaacagaacaggacagggattttcacaatgtttttccatacaatgtctggaatctatagataacagaaccggttaggtcaggggtcgatctttaaccaggcccagggcgtggcgccgggctgtctgcctgtggatttcatttctgccttttagtttttacttattctttctttgggggcagaaattgggcataggacaatatgaggggtggtctcgtcccttatttccccgctttgagaacctcactcattagtggcagtgtcacttttattttcattacctgtgtcttcttgcaagacagatcgatagtgattcatatagtacacttgtgctgaagcattttggtgaactaaggtagtgatgaagctttttatcatttgaagaagtacaggtaacaaacaagggagcagtaagcacgttcctattactatcacaactcctattataagagtttcaaattctcctagtgccgagaaccatttttcaaacatggccccaggatcaa

SEQ ID NO: 1880515 - DNA, 4001 bp, Homo sapiens
gtgtgtcgtatgagcgaggaaaactgttgatttcagacttgcatgttcttagttggcatttacatagagttaattcaatttcttctcttacagccataaataaagaccaagtgctcaccattgggtttgatattaatgagtttctgagttgttcatcaagttccaagaaaaggtaatgtcaggttgcctattgaactatcaataactgatatttgtagaatactctgtttcttttacatgtataatcttataggactgttgtcatcaactcttgggccaccaagttgtttattgccattcaattgatgagaaacaaagactcagaaagaaagtagggagtctcttactgagtgggactcacgaggttctgctttctcatctgtcagttcgcccaactgtgcgcaactagcatgatggctcacacctgtaatcccagcactctggtaggcaaaggtgggaagattgcttgagtccaggagttcaagactgggctgggcaacatggtgaaactctgtctctacaaaaaattacaaaaatacaaaaattagccaggcatagtggtgcatgcctatggtcccagctacttgggagactgaggtcagaggatcgcttgagcccaggaggcagaaggtgctgtgagccgagattgtgccactgcaccagctaggatttgaactcctgccttctagtttaagatcttgctggagacagtgtgagcttgtggaagagtggccaggttaaagatagatctgaccatcccactgaagttacatgatgagtaagagaaatgggttctctgtgcccatttcctcaatatgaagggtgaaacatcctccctggaaggagacagcatagacaggaaagccagctgttgctgcaagccagatgcctaacttgacaacattctagggacagaggtttgaatctatggtggggttgtaaataatatcttactgagtgactcaagtgccaaagtttgcaaatgatatgctttaaaaaattagagcagattgccgggcacggtggctcacgcctgtaatcccagaactttgggaggctgaggcgggtggatcacgaggtcaggagatcgagaccatcctggctaacacagtgaaaccccgtctctactaaaaatacaaaaaaattagccgggcatggtggcgggcgcctgtattcccagctactcgggaggctgaggcaggagaatggtgtgaaccctggaggcagagcttgcagtgagctgagatcgcgccattgcactccagcctgggtgatggagcgagactccatctccaaaaaaaaaaaaaattagagcaggttttgaggttgtgcccataattacattgctttcatgcacgcatatcccaatacgctcttgagtgaatgagaaaagaatggcatggtagccagcactgggaattgcccagaacctcagcgctcctggagggatgttacatgcatgaagttcatgcaccatcccttagggtgggacaaaagctggagacaataattgacttccagaccttcaactagagttctctttgtcactcacctctgatatttccagtgcagccctgttcagggtcattcagtgccaacacctctttgtacctttcctcttccagtacttgactgtcctgagccatatcctccttctattgttccatcctctcaatccacttcaaatcagcagttcagatcaacagacccgcagcagcagctgtacctcaggctttgtgtggcagtgtagacttgcaatagacagacatgggttaccactgcttcctgaccacacttggagtcagccaagaaggactggctgtggcttcacaaaagaaaactcaagaagccgtaataaaatgggttccctgaaaagccagtgattacaagtgacaccagctcggagattctctcagcgcttggtggtgctttgcctgaaggggagggccaacacaggcttacattaaacggacagccaggggcccctactcaggaggatgtggttggagaacccgctgaatgcaggggcggtgggtggggagtgattcagaaatgactaacgtagttttctccttcagaattctagaccttataggggagacagagcggcccctgaacaactctcacatgagaatgtggcaggagacacacagcactgcaccctaaaaaagggagaacttaggagccctgggtgtggagcctgaggtgccgtcatgtgctaaatccctctccatggccggcaaacccagggttcccagctccaagcctgtacagcaagttctgtttcatcccagggcagtttatttgtttccttaaaactcttcatgcaatccaggaggacagtcagggccaggagggctgggtaagagcgaggttcggagcagcggacgctgtgtttatgggcaccgtggatacgcagaggctgagcaccgaggggacgcgacacatccccagctgcgatccacagtcgcatatgttttgggatcatctacgaaggaaaggatcatttccctttccccctaatctagcaaatgtcagggagttgatgctgagtgaaacagaaggctcttaggttcggaagacgcctcctgctgggtgacccggccccaggcttcgctttttgagaggaagatccctgtgcagtgttcctgtcacttctcccagttctgcgctgtgggccagcctggtataggtgccatcggctctccacacgatggctgtgtgacagggagatgctcttgtactccacgtccttttccccaggcatgtgccacactcctcaaggccgacctctgctggctgtaatttgcagcatgcatgctttcctgcctgcatgacatgactcaatttagaagttggcaatcacaattgaaaaaaaagaaagaaaaaagaggaaaggagagtgggagggaggaaaatggactagaataaaatagaaaaatcagaccacattttgtataaatgcagcatgcacttttatgtgatgttttatttcatatgcatatacatatgtacatgcatatacatgcacataaacatgtatgtgtatgaggttaaaagcacagaatctgctccaccacctgcaagctgtgtgcaaggagaagttactcataatcaccaggaatccaggctcctttgttgttgctttgtcacctttaacaaggtttctacctcatggttcaggatggatgcttgagctcctgccattatgtcagaaatccaagcagcatgaagaaaggaagcagtagccaggactgatattcaactggtccacatcagtgtacttctgtaccagctgataaatagctgctggctccctgaaatcaggaagttttccatttctttttctttttttagacggagtttcactcttgttgcccaggctggagtgcaatggcgtgatctcagctcaccacaacctctgcctcccgggttcaagtgattctcctgcttcagcctcctgagtagctgggattacaggcccccaccaccacgcctggctaattttgtatttttagtagagacggggtttccccatgttggtcagtctggtctcgaacttctgacctcgtgatccacctgcctcggcctcccaaagtgctgggattacaggcatgagccaccacacccagcccccgtttcttttagtctcagtttcctcctgtgtaggatgaggataaatcattgtagtacccatctcataaatttgttgggaaaattaaatgagataatacacatccattcttattacagtggccagcgcagaatcaaggctcaataaattggagtcattgttattattagctatgttttacaaataatgaattataagaagaataaagtatggtactaacactgaagacaatattcaagggcaatctaatacagagaacagtagcattgttcctgttttaaccatgaaagagcaagaatcactcacctcagaaggggtaataataataattttcccatctgccagttacttcctgcccatggctttg

SEQ ID NO: 1880516 - DNA, 4001 bp, Homo sapiens
gtagaacacagaaaggagagtgtggcacaaggtaaggttgcagaagtagcagccaaatcacactggggccttgagtatgtagagattttagtccgtatcccgacagcaattgaaagccactgaaaagtaattcacagcaaatatagttaatttttttacagcttacattaaaacaaattatgtactagatactgtgctaaagactctacttgcactatttgaatccttgaaacaatcctatgatgtactattaatattccaattttacagaacgaggatactgatgcatagagaggtcgtgactccaaacccctactcttactgtattacacctacacactattcacaagtgagagaagtaggtaagcaactatgtacagctaaatctcatctccttggcaggcctagccccactgtggagttggtagcacaggggtatcaggatttaatgagccaatcattgactttacgctccttgttctgactccctaataaaataaccttctagttatattctggcttcccatatagatttttctgctgggagataatgcactgaccagcctacacacgcattttgttccagttgacaattttattacacattgtaagttaataaattggcattctcctttaaaaaataacaaaaaaatttaatagtcttatacagttactttcccatgaagggttagcttgaaaagtaaaaagcaacgaataaaaatatcatcacctattgtctcttttgtggtcgaaccttttcttgctgcctgctttgagcgaccgtggatgtggtcactgagtctggggaggagccctttatcttctttgtggatgcccccagcacagcccaagtgcttcctttgtttcccactgagcctttagcaaatcccacctttcctcctgcaccgacggagaggattgttcttgggaatgcaccttgttctactgccgccagcagtaggcagctggagactgttactaggggtctccttcacctccccagcgtaaagtacatcccatgctaggagcaggccgttccctgagaacctcattaaacccggcgttcttgtcacgcgctccgctcagggccaccaggccaccagcccgaccagacctgcaccgaggcccagccccagaacaggctgcagagacccccgcccccaaggcgggctccctccaaacgggactccatactccttgctggctcaagttttgtttcgctctttttccctgtaattcctttattgggcaaaactgggacaaacgcaggtggacattttaaagtgaaagcttcatgaaacagcccattccacgccgtcaagagatctgcttaagcacattcaagggaacgaatagcccccacccaccaaaaaagaaatgttcgttccatattctcctgaacagaggattgaaacatcgattcccccccccttcaaaggaacaggaaggccacggggcaaggacggacttgggagcggcctcctttctctctggagggaaaggctggagcgctgcctccacttttaagtccacgaaccacgaagggtgaggatccctcagaaactttagcgcaggggagcgggcaggagggcgattgtttaaatcgatggcagcaccttcattaatctgctttccggccatcttcagcagagccattcaccaggaaacgactagaaggtgggcctgcgcccctcagatatcccggggccggcaacgagccgggcagggacgccgaaggaaggccgtgaggagccctcgctggccggccaagatggccaccttcacatggccgaccgccaccggctccctgccacccggcatctagaggcgggacggccagaaagaccccagccgcagcacaaaacctccgcgattcccgccgcctccgctgggggacgcgacctccgggaaagctatcccggccaacggtcggaagggaggtgccatgtcaccgcacaggggagcgggtccagcaagccccagtcgctttttctcccacatcaaacaaggaagagcaatcccccacgtctcctcgcgtctgcatttttctcctagctctagcggctcaagatagctgaacggtctctggagggccggattgccacggcacctcccgcggccgcgcagtgtggttcagcccggactccgcggggcgagctgcccttcctcccccgacccccgcgcaagtggtgcattggcgcgcggcgccgaggggcggggcccgagccgggcgcgcgcgggcgctgctctataaataccgggccgcaccgcccgctgcttcgttcgctccgcgccgcccgcctgctacgagtagaacgctgtccgcagcttgcgcatttcgcagccgctgccgcctcgccgctgctccttcgtaaggccacttccgcacaccgacaccaacatgaacggacagctcaacggcttccacgaggcgttcatcgaggagggcacattccttttcacctcagagtcggtcggggaaggccacccaggtgaggggacggcctgaagcgaagcgtggggcggggcagaaggcagcgccaaggtccggctggctgcggccggccggtggtggggcccgcgcgggtcgtcctcgtccgccgggtgatggaagagcggcgaccgcgcgctttcctcgtggcgccgccagggcctggcgcgtggccgccgctcctcttccccctcccctctccacccttcccttcccccctcccttttcattcggtcgcgcgcctaggcatgcggaaggttccagaaaacgtgaagggcgggggctgtggtcgctagtgagttctggccgggaagggagggcactgttaacccctcccggccctgccgtctgacaaacctggagtgggcgacccgccccgcgtgctcgcgtccggccctcgggagcgcgcgccccgcattgcagcggcgaccacgtgtttgccgcatgtggtatctgggcgagggggagccgtgagcctccccggctgtcctggccctcagtttgaggggtggggggcctatgccttgggacgtcgtctggctccactgcctcagtggttaggtcttgactacacactggagaatacgcacatgcccttcggcggatatggccttgcctccaaggtgacggcctctgactaaatatagctcatgtccaagaaggcagtccttatttggaccccttgtgaaaaggatgggaagcatgaattaggagctgccattgctttgggttcgcatttaaagtcttcggtgcagggttttacttgaggctttgtccgctcaaccgccattatggggatcaattggcacgtgaaggaggagtaaagctatatttccaggaactgaaaatctcagcctgagcatatcggctagtaaagatgattatttggctcttttggctgtttctgcccttaggatgaccgcagtagttatctatctggtggctttagggtctggtcagtttactgtgcccatgatgaaatcccacaagtaacttagtggtatgagaggacaaacccaggatcttgatgagtgctgaaggttagctgttacaccagttagtagtagaccgaagttcagagcctgcagtctggcttccacattatgtttggattctgttttaggcggttatagaaaattcagaaaaacgaacttgaattagggagatatttgttctccctcctaacaatagatgacaaagcagggagacatggattcggaatacgtttgagcatcttctacactgttgagcttttgtttcctgcgcaactcctaacagcaaaatcagataattgccattttagtcagaaaatgcttttcatttaattgtttaatcgaattatcttgttgctcattataattggtgttccttaagattagggaaactggcctacctgtggcctcagttctaccagactcccaggtgcagaggggtttggtacagttgtggaagtgaatatgatatagggcaaattctgttctttaaaggatataggactaacagttcacct

SEQ ID NO: 1880517 - DNA, 4001 bp, Homo sapiens
ctccagagggtaattaatccttagtcattcatcttagaagtcccagttacagttaaggttaatgttcaggtagcttctttctactttctttaaaaatttttttaaacatttttttttttttacagaatgttatactattaattgccaatttgcatatgtgtgcagctgctgttttggctctgaactcaatccgataagcttgctggaggtatcgcagagcacttggcagctttcctatttgaaaagaaagcctctcccctctacagaacagctgatcgtctatcagcgatagaccctgatggcgtgaattacaattacactacttttcacactaaatctgggtgatagctacttggaaagaagtttcatcattttttaccacaaactggaaaaagaattacatggtcatgctgtgcttttaaaggcagtttggttcacttttgtctatttaacacctaattccaagaagtccataggcatctagagatctgaatggcgcgtaatgaattcactgtttagattgaagattttaaaaatctacctcaaattacatttattaacagggcgaccaggaagtgttaaagttgttagacacttcatttattaaataatttgtgggtattttcagttgtcatatctagagtcatggggtttgcttattttttttaattagcaatccaaaacaatgctactgcaatttaacaattcatcacataatcttgggctcttcagttcaactgctaatgttagataattcagattgttatttttgtctgtttataaatgattttggttgcattgtgctgtgaggagaactgcagcagcccaggcagatgatctttctcttatttcctgcattgctcaggatggttgaggggccttccaaaaaatgcatttgaggagttaagtttagcatctagcaaaagcaaacaagtgatggggcagggggcactaataataacttgatttattatcatcacttatttacgtcattatcaatttacatttcctgtctgttcggaaaactgaggaagggcctctttgccaaactacattttgttagaatcctccatttctctgattttctgggacgttagaaagtattgtctttcctcttcttgaaagaatcggccaaccatcagaaaatttaagaagctcctaaacatcccttttcttttctctttctttcctcagccctcttcccctcccatcttgacatttaaatcaatttgttggggtgggtgggggggaaagaacaagagttaaacccacctcaggcagcagaagtggaacacattaatcctgacgtagttaacctaagagaaaaatagattttgttttccttttttagtcgctagctttattagatttctcactctcacagattatccgaagactacccattgattgatcgcccgtagagctgcatttggtgtaatgaaaaaactcacagctttattggctctcaggagacaaaacaaacagaacaagatattcatattaatgcaaacaatgcaacaaatgaggggaagaatcgcccggctgaagcgaggcccggcgcggccgcggccggggggctgagaagggcctgggtgcctgtcgcccgggagccgaggtttcccggcctcccccgaccccgggcgccaagagcagtcggtccccccggcctcccgccggcaaaggggccctggggcccaggcgcgcggcccctgcgtggcggcaggcggcccaggccagcgccggcggctagagaaggcctccagtccaggcctcatggaagggcctgcctcgagcggcccctcaacgccccgcagtgtggcactggaagggacctaaaaacccacctggctttctcctttccccttccccacgcttcccagggcccaatgcccgcatctcagtttcgctttccggcagggtcaggggtgagagggaggaattctcaggtgtcacctcctcacccgcctggaggcggaggctagaaagacgccggggcactctggaggggaggaagaggtgtgcctagaattctctctcttaaacgctcgcgttatcacggaggagactttataaacactttaaacacaacaccaaccattttatcagcaaaagcgaggggaggggggcgtacagtaaatgctgagagatgttcgagaagccccaagacgttccttgcggaaggagaacggaagaaagaaaattacgggcggaaaaagagtaaatattagctccacacctaaccacttccccagccccaaactaggagagaatctgctaagattcagcttcatatttatatagtctatgtgatgttaaaaatagggttgccaaatattgcatggggcattcttagagtaaaaaattgttatctacctgaaattcaaaaaatttaactgggcatcctgtatttttattggctaaatctggcaattctaactaaaaaacattctgctgaagaaatcatataagaaggaaggctcattgtctgatgtaatcaggttattggggacatgtttaatggaaccttgcctggaaaaagaaattgagtttctcctacagcatacttttgtaagcacatggtagggtggaggaggaagaaatgactgaagcgacttggaaatgtccttacattatatttgaggaggaaatgacagtcattgttgccacttcactaggaaatggagccgggttcctttcctaaggttggctgactgggtctggcccacagaaaccctccctccctagccggtagagcgtaccctagcatgtctgcaagtggaatgtcagttacagtggttcccatgtcggcattagtgcatatattttttctaaaccttgactatagagccacgttacccattggtatttagtatattttgaaaaaaaaaaaagagttgagttgagaactttaaaggcaaagtctgctttgaaatgtatcaaaggctttaacctagaaatagatctcatccaatagggtcttgcagatgctgaaagaaaaggcttttgcagtgccaaaggtaaaacctcaggaaaaacgcaacaaaacagtgggtctttgtatattgaagtgtgtgtgagagggtgaggagttagaaagctgctttctggagaaagcctgctgcttgcattgcttccccagccccagttagagagagctttttcaagcaagctttatcacccttactgatactttggatccccagtgagctagccttccttttaagccagttgcttgaagaggtctgagtacacccacacaggatgcccctttatcactggcgggtagagctatttaacagctgcaaatggagaaactatttgtctaatgagtgctgttttcagagttgattcaccaatactctcaggggaagataatataaggccgagacttccttctgagctgcacagccatctccagacagtgaaggccaggtctggaaccaaatgaagtatttggttggtttagataatgttttagttccagatcaatagttttagaaaatacataagctcacttccagttcgtgctggttagctattttgtttcccccagacaaactctaacctagaattcagactgttaaaaaacttagcactgtggtttggcagttatggtatggtttaactccatactctagaggtacaaatcattttttatcttctctcatgttagtttgtgtctacaaaaatatgttccatgacttgctcttccctcattggagcaggccagagagatgctcaacacccagtgggttaaggtgcctcttttccaagcagaaatggactggggcccttgttagagtggtgataaactgacaacattgattgattgatagattgattgattaagatggagtctggctctgtcccctaggctggagtgcagtggtgcgatctcggctcactgcaacctctgcctcccaggttcaagcgattctcctgcctcggcctccagagtagttgagactacaagcatgcaccaccacgcccagctaattttt

SEQ ID NO: 1880518 - DNA, 4001 bp, Homo sapiens
cagaggccaaaaccaaggaaaggaaacaaaatgacccatgtgaaataattttgtttttctaataaaaagacaagaattggtggttgattaggttttggaagcaagggagtggcaagtgtccacgataaatagaagaatgatagcttcatcactagtcgctgttttagtaatagggagggaagatcaagagctgtaggatgacgactagtatagtataaactagcattacaaccatgtggataggtcctgacagtggtttttgatgcaggcccgaggtcgagtcttttatatatcattaagaattgaaatcccattttgggaagctgagacgggtgaatcacttgtggtcaggagtttgagaccagcttggacaacatggcgaaaccccatccctactaaaaatacaaaaattagccaggcgtggtggcgtgtgtctgtatcccggttactcaggaggtggagacaggagaatcacttgaacctgggaggcagaggttgcagtgagccgagattgtgccactgcactccatcctgggctacagagtgaggctccatccccaccccccaaaaacaaacaaaccaacaaaaaaaagaattgaaagcccaacagtagatcagtcaagactcagtcaggaaaccaccagccactctgtatatttcacacttaagggcacagaatttgttatgacaatatcaaaagggctagaagagcaacagatggggttgccaatagccagaggatgcatgcattgaatgtgcctgagctggagccttcagcttcactggcttctgtgctattggaaaagctatcaaaatttagttccagactcaccattgacaagggctggagcttctgggaagacacgcccctgcctaggcttctggagactagaatcccctacattctgttgtgccatggcaactacctgtccctgtgagtgactgccaacactgctggagtcaggagaaggaggtttctagtttctcctgccttctgaccttccccaggtgcctctactgacagagccaaatggcaaaccagctggcgagtgaacccaaggaagtaagaatttgctaactcccagtcttggcagcataaagcagagcataaaattcaggactgaggggcaataggcagattaccagcagcgtctataggaataactgcagagaaagaacaggcatgcccgccggtggaaattcaagcaatggagaaagagacatggttagaaagaagagtaagaaaatttcacagctctagaaatcaaatgaagagagttcaaaaaagagatgtattcagctgtgttcaatgctagagagagggcaagttctaagagaaggtcactggatttgacaattagcaatcctgtccaccttgaaaatccagggttaatttctctgtgtttgtaggagcagacaccagatttcagaaaaagtcaaatgacagaaaatgaggggtgagtatcaacttattgttgccatttggcaagacgtgagaaatcaactgacatgtcacgcctataatcccagcactttgggaagccaaggcgggcagatcacttgaggtcagaattttgagaccagcctggccaacatggtgaaaccctgtctccaataaaaatacaaaaattagccagccgtggtccagctactcaggaggctgaggcaggagaatagcttgaacctgggaggtggaggttgcagtgaaccaagatcatgcctctgcactccagcctggatgacagaatgagactgcttaaaataacaacttggacctagcaggaggaccaacacatcctagtttttgcaggactttgacaattttactctgaaagcctctctggtcccagaatctctcagtccccaacaagctgagacagtttatcactgtaaccctgtgtgtcttagagaatgttcacaaattagctacattcagatttcaacaaaggatgcagaagatttgttacctgaacgtactgatgtacttccagaataaccattgttctgctccccggttcactaatagtgcggtcatttcacgtaactttaaatgcgattcttcttcatccgggtctcaccctctttagtccgtctgctggccgcagagatatcccaagagtagcattctcctacttggctttttcagctcaaccttctcacaacaccccagttaattaatacctgccctgggtcagcctggaggaaaacgtgttgagcttggagatttccattgtaatgttgaactccagaaaggagcaaagcaaatttataccagtgggtctaattgctagaaaggtaattctgcaaagatggaaatcagctgaaagattaacactgctataccaccttgagtgccctggctaacagagagaaaataatgtttcaattaaatgaaaggatactgaattaggtagattactcaggagactggtaatggaatacagagcctttcacctccaggtcaccattactaatctggtccagggcagttctagaccatagttttgaggggctgatggctcaccccagcccttgctgtctgcagcacttgatgaagtggtctcccaaagcacctgcatcagcctctaaggtcactgtggtgcattgaagatgtaaaaggaagtgaagccaccttttctcagaggaggggctgggcatgaggatagccaagggctgaaagcagacaacagaacccgctgcagggaaattaggatggggaaaatgattcaaaatggtgagccacgcgagagaaggaaaatcacatgtcaatttatagcagctggcgttcattgtttcacctgaatttagagttgggatgggagagaaagtggtgattaggggtttgttctttgtgtgtgttctgagggggtggtatgggaggaaggagatttgcattagaagtcaaatagtccatgttgagcaaaactgacttataaaatcacttatcactcacatctgaatatattccagggcttatcttattccacaaaatattaccacaaacagataaagtctgatacaaagagattagcttaattcccaatgctgctgtaacaaaagtctacccccataatggaacccatatgtcagctggggtctccctgccctttacaatggagataagatagtcacacgcttcacattccatgctttatgggagcctgaaagagtccctgagattcttgcaaattctcagaagtggtgttctcatagttacctctggattgaacttcttccttttcctagatcagttcagggtttgggtgatcttgccattctgtgcctgctgtgcccaaagagcacctaaatggaaaactcagctgcttcctccagctctacaatcattgtattaacacaatacacttgtgtgcacagagacttcattccagctgaggtgtggcatgcagagagcagcagggtgtttatgtcacagcaacacagaccaccaatgggggcagtccctgttcctagaagtctccacaacggcacaacactagccccttcaccctagcctgttattatccaattgcttctctttcttctctcatttctctttttctgttgactcacaagattgctccagaaactccatattcttcttaatttccttgtattctccccttccaaatatctctgaggccccctcattgagtctctcatcaaagcaaaaatcctgaggtcaagaaccaaccctctgatggaggcgatttgggttttaagatacaattttttctctccccactacagtaatatactaaagaactatttcaatagcccaggaaaaggaacttcctatttgagttcatgtcttaggatataaaacagaaacatgggcatgttttagtgttcaaatacaaattttcaggttgagtttccccaaacagaagacttaactagaattctggcaatttgatgaagaagtacaccatagaatattgaccaagcaggagtgggctgtggccatgtgaaaagaaacaaacagtcccacagcaattctaaat

SEQ ID NO: 1880519 - DNA, 4001 bp, Homo sapiens
ccagcaatctgttttaacaaacctttcaggtaattctgatacacactaaagtttgaaaggtttctttaaggctttccagttttcttttcttttttggagggatgggggggggtctccccatgttgcccaggctggtctcgaactcctagcctcaagctatcctatcctcccacctcggccttccaaagcattgaaattacaggcatgacccactgcggctcgcctccgtttctaacttaaaaaaattttctttggaggggagccttaatcctttctattatcctgctagtagaatcttactactcctgagggtaatctttgtcataatccaaaagccttgaataaaggcctatttgtatagttatgcagaatatattcctgggaggtttgccttcctaggagcacaggtcggccctgggaggtgggggttggggggcagggctgcattctaaagtcctgtaacaacgcacaagtacaactgaatagaactcggaacaaaggcatcagggccacggtgcaagtctttgttcatccgttccccgactgctcaccctgtctgataccgctcttttccacccagaaaagcagccactcaagttttaagaatggatgtatgccgcggacgttttcgattaggccgttttctctcaggcactggaggatattcgtggctgcaggaggcgcttccaccctttcctcaacctagcaaagaagtaactgaaactaacccaagggttacaaccgaaaagccccttccagcttcagaagcagaactggaagctcggatagacttctccgcctctacactcctggaaaacccgcagtggatttcaccaacttcaggatcggagcccaggcaggcgaacgtaccttattgcgcatgctcgctagcccctcccgctcggagcggaagggggagcgctgggggcctgggcctggcctggccggggcgtcggcaccggcggccatcttggcttcccggggaaaggcggcgtgaggggaagaagttgtagggtgggggcaggagtgaggaggagggaagagagagggggaggaggccgcggcggggcagggcggggactgcctgcctgcctgggttgcggaagtgatagccgccgaccgagcctgctgctttcttgctactgcttcggcttcccggctaccccccggacggtgaaggcggcccagctgtggatggtcagatagcccttgtctcccgccgccaatctctggcccctagcagcacggagcagacggcggcagcagcagcagcaggcgaggaggaagatggcgggacggctgccggcctgtgtggtggactgtggcacggggtaagggggcttacgggcgggggtggggaaactgaggcggaggaaggaagatggcgggggagggaggaggccgggaaatgaatggtgcggcgaggtgccgccgccggctgtcagtcctagacccgccggccagcgaggggtggggcccgcagccagggcctcgcgggtcccctcgtttctccctcctgggactggggcgggggcgcgggcccgagattcaacccccaaccctcccagcggctttctccgcgcgacccctcccggcccttcccccactacggtgggcagcgccgcccaaagggcgctggggacggtcgtcttgggggtggtccccgggcccgacccatccggctttcctttccctccgcgcccgtttttgccagtcggtttggggacccaggggccgagctcggggactggcctggcaggggagctagaaaagagaagcgctcctggtaggtttgacaagatcgctgtgacaacattctgcccagggtgtgggtggggaaagggaagaatcggactctgaaaatgggaacctacagtggggctttcatttgaccacccaccttctcctttcgactcctggtcatttccatctccctctgcgttttaaccggtgaaccaagtcacattttaattcgagggagaaagatgtcatgtgttacttctgtagcctcaaaaaagtcccccagtgagcaagcgcgctgcaacttccttagttttgtcaaagccgcttcctgctttcagtcttttatacccttataaggtagtttttagtttccaacctgagcacatcttactagaacttttaagcaggttttaaagagactgaattaccggtgcttggtgtccatttatatgacttaaaaaaatgtacttatgtttcatggagtgggggaaaggaagcaccctggaaaataaactaatttaagttgtattcgttcattctgtgatggtatcttgaaggaagcaggaaggtatagaggtatataggagggtgtttaagttgcaaatagttactcgtagatatgtagggtagtttgcgaaaatgtagagtggctttaaagtgtggtcgttcattttgtattaatagacgttttagagagttgtaccacactcataactgcatagagaatagactacccttatttttatgtagaatcactgcttcaggatgacatataggaaagtggtttttttttctgtgctgatgacatctctccaattcccagaacactcccagttttttttttttgagggggaagtcagtaagaggtggactgtcaggcttttttttttattattaattataattattgatttcattattgttacttaaaagattgtgtgtccttcactctttatgtgaaatttctttaatcttcattctcataactagctagtgtggcagtttctaaaatcccagttaggtagagagaaaccaccaacttcttaatattctcctaggaaaacactagccttggaacttctatgtatttttttgatgaacactttatttaaaagtttttccttaattcagtctcatttctctgaaccaataattttttttatttctcccttcttagtctaattggtgagtatttttatgtctaggttcagttttaaaattagatttggcctgagtcagtaggataggacttttcaaatgtgttttgttaaagtgacgaatattgctacataattaatgctttagaaattactgcgttttcaaaaaaatagtgtaaataattgtggccctgagaaataatatggtaacatctcaagtagtatgttacttttctaatctccattttcccccttttgaaatagtttcgaattagtatacaagatgtttcattgagataaactgtccttaagtgacctcctttcctaaagggcaaccttgaatttaaaacatgctgaatgaccagtaggatcgggaagaggggttcaatttaacctaggctatttctgttttaaaattacgattatcacaatagtgtatttttaagttattacattggtttctccaataaggagaggttattaactgcacattgatgatttgaatggaactgattaggagtccccttgccacctcactctcttttaccatttgtcacaatctgaaattccccctttagagtttcagttattttggttctcaaaagcctttttggtcttacaagtttccagtggtgcctcctgggaagttacaccttcagctttatttgcacatggaggataagtccttgaggttgaggaccctgagataaacatctctaagtatggccttaacagggagcttttacatttcaaaattctgtggtccccgaatgcaaattgtgcacctgtaatttgtctaattttttttatgctttagagaatgcattcagctctgaggtctctaaattacaattactcacttagtttaagtaaaaagttataacctgaatcaggttgctcatttcattcattatataaattaggggaaaggtggctgaaaaaaagtggccatctgtaaaacttgatcgtcttagataggaaagctgttaagagttaggaaacttgaaacttaagcccaaaacttttagggatcgtccagcaaaactcaacatatgaatcacctagattcaggtcataaaagagaatacttattttgaaaag

SEQ ID NO: 1880520 - DNA, 4001 bp, Homo sapiens
ctcgctgctgtcctgggggaaagtggtgtgtcatctggtttctgctcctctttggtcttgcagaaccccacattttcctctcttgcttctctttatttcttcactcctctgcttcctaagggtccttcttccttctgatttacccttttcttcagaggcaaagcagctctgggcatgccacgtgggtcctggagatgcatgtctcccttccctggagctgccagcccctgggaggcttctctgcagttttaccaccacaaagtgggttttgcttaacggcagctcctgctccttttctccatgtccctcctgtccatgtgcctggactttcctcagtgtccaccactgtgttacctttgggatcaaaggtagtcgatctgctgttgtatgttgattatttcacctgcaggtgattgaaacacaccacctctctctcccaggcttgccaagggaagagttctacgtaaagttgttcttcatgctcatctgcatagttatcttggagatgtttgaaaagatttagattcaggtggctgccaatatcttcaggcaacccaaagtcaaattaacgtttttattttatgtaaatcaatgattagaaaattgattttacatattttacataattatcaccatgggactcattattttgttgccactcgtcaacctgttaattctgcatttatagtgatttgtaatagtttttctaattaaggcaaactaaacgaaatcagttaataacgaagtagattttatccctcatgtacgctaatatagactaacatgaaatcccataatttatcttatctcaaagcacatttttataccaggcagctgatttggtttctgccctcagtctattctctctcacacagactccccttttctttttctctgtttctgtttttcctgtccttcgcaccctcagcagggagctcaacttcctggcactattctcacacacatgtcaggtgtaaacatctttatgggggaaacaggctctggctgtctcacaaagctttagttgtcatgcacatgtaacactttcattcacttcttaaaggtgatttacatgagcctcgcacagctgagacgtatttcgctgcttactaaaccttgaatgatggtgcgtcattctcattaaaacaaggaagcacaggaaggtggaagtataaatttttgtgagtgtttctggcccactatgaaagtgcgacagcgggcatggctgtctaggcctccctggcagcactggtgtgggggctcccaggaaggagtagaggagggttaggaaaaggatgggagggccacgggcctggcagctgagcagcacctgggccctcacagctcagattgcagagcaaagagggagccacgtgtggagggtggggaacatggagcgagaaggggagggaagcacaaaagggagcacaagaggagagaatggaggggagcatgggagggagcatagaagggggcatagaggaaacacaaagggagcactggggagagcatgagaggaacaggggaagcacaggcgaggtagcacaggggggagcactaagagagcacaccgcggagctgcctccacccaggcctggcatgagcagggttgaccccagagcccagacccttcccccaggagcacagggaacaggcagtgttcccccacagtgggggcgggaaggagagtccaagggccaaggaagggctgatggtccatttcctgtggaattgcgccaacctgatggcatccataaggcacacttaccatgcttgggttctgtggtcaagtccagaagaggcacgtcctgctcagggccccatcggctaccctccgtccccagtacctggaactatgtatggcaccagccctggggcaggcacgggccttggcttctgagctccagggatgccccagaccccctcccttagcttctgcttcttggcctcacatccaactgctgcaacggcacctctgcacctgctggtgggggtgacgcctgtcccttctgcacctgccagccagggattatgacctgtcctttctgtacctgccagacaaggattatgacctgtcccttctgcacctgctggctggggattatgacctgtcccttctgtacctgccaggtcgggggtgatgcctatcctttctgcacctgctggctgggattatgacctgtcccttctgcacctgccggctgggggttacgacctgtctcttctgcatgtgctggccagaggtgatgtctgtccagtccacatatgccggcatgggggctgactggtctgtctctctacatctgtgggctgtggtgactggtctgtctcatctatcatctacacccaccagctgggtataatgccacagactctgcctgctcctgcgctggcacatgctgtagctcctggggagtaacctgaggagttacctggggtgtgtctggcgcaggtgacctctgcatgtcactggcattgcagcagaagccggcagaggacccaggccagcagagctccttccctcttagctgttggccaggaaccccctctcaggagctgagggcacctctggatggagggcaagacaaaaacatgttctaatcagagaaaatggttggtggagtgctctaagtgcaggatgggtggatctgagagctgggggtcctttgcttctcccgccctcacggcagggctggtgcagaggggatcggcccagaggtctgaggggctctaagagcaggagataagaattgcaggaaggttcccgggagcagattttaactaaacagtattagttaagctgcatttccataactaatcaattttaattaacagagcccatgtatctggagttaattttgctatgttcttaataggaataggagaatctttcctataacagccatatagaaaatgtatttcttcagccatattctttctaactagtgtggacctgcttaagaatgcactgtcctgtatcttatctcaaacaggaatttatctagtctatattcgagattatcatgaaatcatattagtactttatgagctaaagcattttgaatcacgttccaaatattatgtatactccataatttcctgtatagatcattaaattcccatatatcccaatttaagtaaaaatacatttttaattacctgagcttcataaccccaactttaccatttaattaaagcacagacttatcaaagtctccaaagcatgggtgggtcaagtttaatactcatctggcccactttcaatgcccactaggtccttctggaaatgaacttctgaataagaaaggattattaattagtaattagtataattaattattaattatctacattaattagaatgaatgcacatagcgcatattattaaagtaagtcacaggaaatggtgaaatcctttctaaatcactgattcaaacaatagtcaaaagagctgactacctcataagacagaaaatgtcatagtcctgctccaacgttaatctgtccacttcaaatatgtcaattctatttacggcaatttgcctacattgaaattcattgatgtatgatagtgctaagctggccctgttttaagatacagttatgtgatcagaaattcagaaataaataaatcatgtaaattttactattttattttactattatgagactatacaaactttgcaaatgtttatagtggagtcactttattgatttgcattagaaaactatatagcaagtagatacattgccttgcaaggcaacaaattccctcaaagggggttaaaattatagtagagcagtgttctctttactcttttataaggaagattcaaatgccacatagtccctcaatgagatcacctcagaagtctcctgctgctctagagcctatgattgattcttcttggtcaaaaataaacaggtgccaatccttgccaactgccactgtctaattaagagatccattttctctttgttggataaatgtagagtcctca

SEQ ID NO: 1880521 - DNA, 4001 bp, Homo sapiens
gctaatgtgtgcattacaggaaactgaaaaccactagaagcaaagaacaaagccatccacaatcacaagcaatttagtttcacatgtccttctaagtcctgtttgtgtagatacaacatccaacttgatggacttgagatcatatgttatgtatcatgccttttcacacatcatgaatatttaccaattcaaaatcttaaagctatgtgagtattctgatactcagcaacacattacagcaacttcatctgttagaaaaaatgtaatcctccctttcttaggacaaaaatttcatagaagacccaaatgacaacatgcctctacataaaagcattagcagagttctgattaaaatactgcgttttcttaatgctcaatttaaaatgaaacataaagcagcagaatacactatgtataatgtttctaagataatttctcatatctataccattaaaatattagcaagaaggtatgtttccttcaaattacttactgtattcctatagtacagccaaaagagttgcacatatatcaatgactagtatcaaaatgtaaacatagacacatttgcatacatctctccctttatacttcattctgcccttctgctgccaacctaatgaacaagtcctgacatacactgctcagacgtggcttaacaattccatgttcaagatgcatcttttctatcagttataacaaaaaatattaataaattgcctaattcactagctctactttttatcatacattgtcactccaggactttcataaagctcagatgttgcaaaataataaaacttgtccacaacaaacacaggcactttactgaaaatgctcatatagagctatgggtatgagtttaaaccatcttctagatatggagatactagcaaagagccctttccttcatccttcctcttctccctctcccaccatcccaacgactaaggatactactgtgtttagctccaaggggtggattaccaaactcaatcccagaagacaggacttcctataaacaaacaaaaggacatttatgaagggattgttttacgttagtcaactctatgtacagtggtgagcattaataaaatgtacacaaaacaaaggttagattagaacatgaaaatctcttcagatatgaccagactggcctagaacttccttctcaggttttctatgtcctttaactcactgaacaaacgtggaagcttcgcttccagaggtggtctaaccacttcaaagtcacctccagaagacatttattttttataattttttttttgagacggattcttgctctgtcacccaggctggagtgcaatggtgcaatctccgctcacttgcaccctctacctctgtctcctgggttcaagcgattctcctgcctcagcctcccgagtaggtgggattacagatgcccgctaccactcccggctaatttttgtatttttagtagagacggggtttcaccacgttggtcaggctggtttcgatctgacctcgtgatccgcccgcctcgccctcccaaagtgctgggattacaggcatgagccaccgcgcccggcctatgatttctttttaaacaaatgagaatttacaagatgtgtgattttctaactctgtcatacgtcggcaacctcttctcatctagaaagcctagatgtggaaaatgttttcttttaaaaggttggagggaagttgagagcaactttttcatgttatatacacacaggttttctataaacggccagtaaaccttcccaaagggtggtgggcatgtccagcgggccaactgtggcctgtcatcctaccatttctcttgcgacatagaggtctggtagaactaacaccaacccgcgatggccactgatccttctgctcaccctcctccaggactttgctcaccttctgtgccgttaaggcctttgttggttgtcctcaggactcagtaggtctccttcaactgtgactgagcagtctctgcaggcctaggctttacgttgctctgtggcctaaagaggcctccgtagacccgccctgccacaccctaggggcctccctgccgccgccatgcttccggccggccacggcagctgccactcaaaggctctgcatccgggtggcttggcaggggtgtcctctggagatccagcggtcggcggggtcggctgggagaggctgccgccaccatcaggtcaccgaggtgggttgaggaatatggtcgatgctccttcaaggcctgggtgtggccggtgggagccatagcaagggctctgggatatctgcagggcggaggccccagtctgtcctggggctcccccaactcacccgttggcccagggtttggagggccccaggggagctagccgcggagctcagagtctcaccgtgatctctgtcggaactctggaaggcttttaagaaataccgatatctggacttcctacagactaattaaaccaggcatgttggtttgtccagactttgttagctctttgagccattttagcatccaggggttcttgagggtatgtgccaagactggtattaaaatccttactttgtcaggctgagtggatttctgttgtaggtctatgaaaaaccaggaaataaacccatgcattcattaatgtacacattcattcgttcctttgtataggaaattctcatttatgttcttgagtaagattggtctgtaattttacttccttaaaatatactagtcaggttttgatatcaagataataccagtcttataaaatcagttttgaagcttgccgtctcttttggttttatggaaagtttatgtaagactgacaaaataccttaattaaacctaagtttatggaagactgacaaaatatcttcatgaaatcttgggtaaagtttacttataagcatctgggccaagaatttctttgtgggaaggtttatatattaaattttttaaaattataatactgtttagatttgctatttcttttggcagttttggtgaattttatttttcaagaaatttgtctatttcatccaaattttaaaatttatttgttttaagttattcggaatatctcttatgagatataattatgacatatcatgagatatcaatgtctgttgggtctatagtgatgcccctgtttttattcataatatggatatttgagctttcttttttatttgaacactctcatcaagatttatcaattttattagtctttttaaacaactgtcttttgactgtatttatcttctctagtataaaggcttgccctaaaatatgtggagtctagggcaagagtattgatggagtacatatatatcatactatatataaaaaaatatatattcagccaggtgcggtggcttatgcctgtaatcccagcactttgggaggccgaggcgggtggatcacgaggtcaggagatcgagaccatcctggctaacacggtgaaaccctgtctctactaaaaataccaaaaaaaaaaaaaattagctgggtgtggtggtgggcgcctgtagtcccagctactggggaggctgaggcaggagaatggcattaacccgggaggtggagcttgcagtgagctgagatggtgccactgcactccagcctgggtgacagagcaagacttgtctcaaaaaatatatatataaataaatatatatataaaaatatatatttatattatatatattatatatttatatataatacatatatttatattatatataatataaatatattatatataatatatgtatttatattatatttatataatataaatatatataatatattatatatattatatattatatatattatatataatatatatttatattatatttatataatatatattatatattatataaattatatattaaatatataaatatatttaaagccataaattaagaaactgttgactttatcctaccatgacaaagctatataactacaaaattgaaagatatttaaa

SEQ ID NO: 1880522 - DNA, 4001 bp, Homo sapiens
cacttggcacttgaagaccttgaggcccaaggtggaagccagatcactctaaccactcctcgatgtggagaacatacttttattctccaaggtcatgaatctttttttttttttaatacagggtctcactttgtcgcccaggctagaatgcagtggcacaatcaaggctcactacagcttcgacccccccttaccccaccgcacccgtgccactatgcccagttaattttttatatttttttgtggagacagcgtttcgccatgttgcccaagctggtctgaaacacctgagctcaagcgatccgcacacctcggcctcccaaagtgctgggattgccaggtgcggtggctcacgcctgtaatcccagcactttgggagtccgaggcgggcggatcacgaggtcaggagatcgaaaccatcctggctaacacggtgaaacctcgtctctactaaaaatacaaaaaaattagccaggcatggtggcgggcgcctgtagttccagctactcgggaggctgaggcaggacaatggcgtgaacccgggaggcggaacttgcagtgagccgtgatcgcgccactgcactccagcctgggggacagagggagactccgtctcaaaaaaaaaagtgctgggattacaagtgtgagccaccgtgcccagcccattaatccatttttgctcccttcaggagcagtaagtaaactaaacactgcatcctacaaatgaacttgagcttttctgtcagggggaagaataggtagagaaagaaagtttaatcaaatttgaggttttcttacacttccttgtagtggatcaatgggaataaccagtcagccattatccattcatcagtactaagcaaattcaacaaaactaatgttttcaaatgtgttgatcaagacatacccttggccttgtttaaatgaaaagtcctcaatcaaacaagacattttctatgtaagggtgttcctgtaatagaggaggcagtggcctgctatgtccttatcaaactagggatgtatttgtcaatgactccattgagttcttttcaaaaacttccattctggcatttttcctttgcctcctacctatcatcaagggctcacaggagatttaaagaatgaatgtgaacagatgactaagagaattaaaaaatggccacgtctctgtattctcttggttccggaaatggtccagctggttctatttttattataataataataaaatttgttatttattaagcatcttccacatgtcagagctttatacatttttatgtcattttagcttcacaaccatctaccaaggtacatatcctcagcgggtagcaactccagagattaaatagggagtacacctgatattatgtgtctaccatgtgaaagtcgaatccagatttgagtccaacaaacacgcgtccttcaaaacacgttgcctagcaacaaattgattctagttacttccggcatcccaagtggagaaaaataaccaattccttcctagaagccaagcttgagggacctttagaattctgtaacagaaaagctccccaccccctactgtgacccaagcagttacttaaacactaatacctcccattggccggcgtggcagagcagcagctctggcgctagagggaacctgggctgctctagctgggggagagccgggtctctggttctaatcacttgaatctgacttctgggaaaactggcgtccagggactccccccggagacccataatcttcttggggcgacctcaggttgggggactaagtcctgcaggggacacttgttcatccactaccagggacacccatctctcccaactcaagacttctttttactccccaagtttaaaactctgaggccaccccgcccccttccctctccctcgcttagaatcaggtatggacaccgacattccaaccttctttccttcttcggcgctcctgaaggtaaccggtgcgcgtgcgcacgtcaatccgagggtgtgtgcgcccagtttccggcgccgcgggacacccacaaccgcggggctgtccctcagctcggccgcccgccccgccccgcccccccggacccgcctcccagccccgccccgggccctcctcgccgcgcccgctccgtcccgcgccctccaccgccctacggcctgggcccgcctccaccctgcctctccgtggttccccgggctgcccctgcccccgcccccgcccccgccacctcccccgccgtcgcccaattcccccagcccccaccctcggctgctgcccgagcttcctccacgcgccgtgcagtctccacggcgacgctgcgttcccgactcggagcccccagctccgcgcgagcagctagccgggctggctctcggtgtgtgcccttcggatggtctgctgaagagggccgccagctggtaagacactccgaggcaacgaccggtctccctctccctagcccggtgtgcagtctgacccagcccccacagcagaccacccccagaccgggcgcccgagtctgcggaccgctctaccgcacctggttctggctctgggccccgggccccgtggctgccaggggccgccgggaagggaggatgcgcgccactggggtgcgcctggcttgcggcaccctcctcccgcagtggtcggaagaggtgaggaagcgccgttcgtgtctacacgggtgtggagataactgggcgattctgacaggcttgtctacactaccattctttgaccggccggtgcacacgcaccaactccttccccgcaaataacgaagatggcccagcccatcccagggcttcccgacccccttccctcagtccttgcccttgcccggaattcttttacttatttttggaaaattagttaagacatcactactagctagatataacttgctagccatacaaatttcgatggaatttggacaaatcatttatattcccgggccttattctcatcttatgagatgatgaaattgacttgaaacttccaaaatgttgatattgttcttttgactactcaaactactctacactgagcccctgtggcatttaaagtaacacatggtataatgatcaatttattgtttggcataggtgtcttggctgaatcttatttttaccctaggagaacccctggaagtcgctttttaaaaatctgaaaaggacaccggaaatgtcttttaatatgtttcatttttctaaaaaccaaatacaatgatccccaaatccaacttattttttaatttttattttgttttttgtgaattgaaatagttttggtttttgtaatctctggagaacaataataacaataacatttctctttacgtgttaagagttttccagagctgaaattccagcatctctaggtatttcattgcacccactccagaattccagagctttctacctacgctcaccggttgagccacatcctcagtgttttctcccttctttgccccatccagtttcggcgtttagaactggcttcatttgtgacagttcaccttcaggactggcctccctgagctgtaaatattaacaatagtataggaggaggagttatagtaactgcagttctggcaggagatgagtgctactattattatttattggtagctaattattttaacctttgcaatttaactctataaggtaggtggtgtttttatccacactttacagttgaggaactgaatcacagagaggttaaggaatttgctcaaggtcacacagtttactgggatttaaacatagacaacctgactccagagtctggaatcctagcactatattacactgtaaaggaaatatataaaatttatatttagtcagtttaaaaaatgaatgtaagtgatggatgatccttgacaccatttgtatacacatttgaagctatgccatgaaatattgttcctgcatcatgtaatgtttcccccaccaagctccctgaggatagaggatagtgcttaatcagctctgtc

SEQ ID NO: 1880523 - DNA, 4001 bp, Homo sapiens
gtattttggaggacagaagggtcatccccaaaattcaggccagctggctgtccctgtcttctgcaaagcacagagagaggtcatatggggacatggcttccctaggatccacctttatatgacttggtggccttcagtgaagctaaatatcacagctgccagacactttccaatggcatgacgttgcgttattgtctaatcctcccaataagccacagagaaggtacgacgattcctcagaggccagtcctttcatcaaggtggcccagctagcagggagcagcgctggtgtccgactcacgcacttcaggcaaccctaacacccttgctttcaccaagtcaaccgtgggcttctcctcctctcaatcaaagacctggaagagctcacatgggaacacacctgtatgtaaaccgactgagaatcctggagatcgcttgcctagggcactctcctgggcttgaataaatgactttcctaagaaatgccatcagttcaatgtgcccacctctgcaaggtggcagaggggagcgagccctcagcatcaccagcagggcctgggtgccaatgaagagcagtcctttcgggcctggggagtgccctaaatgggaatgccagtttgccgcaattgttttcatcatcatcatctgcgcctctcaaactccacccaccctcgcattacccaactctggaaggcctgcttgcccacactgttgccagacccctggcctggcagttctacgtgacttggagcttcctttggaataccacaagtatttaccccttagccttgtaccaagggataaaaactggtaagggcatagctttccaacatttgtcccactttctgtcccaacatggcctgtggacactgctcaggctgggctccatctaggagctcttttccctcattctctcacgtcacaaaattcactgagcttcccccatgcacactaagcatgaagatgtgagtcacaagtggttcctacctccaaggaggccagcacttatcctgcacaggcactgggctgtgaagacaatctagtgaatgaaaccaactgtctagtcggccgccctcccaagcctgcggcccttccaagcctgcggctctcccaagcctgctgcctctctagcacaaagccagatacgccccagagtgatgggagaaggaagccagagccagggcaggctggggcaatctaggaaactgaggctgagggaggtttcacgacctgcccaaggtcactctaaatggcacactcagagcgaggaccaccaggaagatgacaagggggacggggagagacccccagcaatggctgctgtctcaattactacttcttggggagtcatcagcaggacccctggaatgccacccacactggaaggcatctagtgtcataagattgagagtcccacattccaaactccagcctgaagctgctgctcaacacagagatgggatccagattataaacagtaccatgcgtagacccaggcaaccaggccctgccctccctggagatctggaggtcccgccgggtctccctgcagcagcgctcctccctacagagagcagaacctgctgggccaaggaaatgtgccaccccgagcctatgtccctccccagtccctggatcgtgctccataaacccaggacccaggaatgccctgccgcccaaatacctcagagcttgcttccagggtctatgctcctaatggctgattgggtcacggggtactcactcctaggtccaaggcgtggcaaagagatgactgtttgggggtcagaacggacggagcttggactagcaagccggaatgttccatgaggtcccctcctggtgggagataaagccaaggttgtggaagaaaggaggcaggctgcaggccaggtgccttcctttctactctcacctcgcgttcctcaaacgcgaggtgggggacgaggaagtgcagagccctcccaaaccaccctcctgttctagcacgctcccctcactgcgcaggcgcagagctgctgccgccttccgtacagcccgcgatccctaagccaaccaggagccaggctgctgcctctctccgctctttggttgctatagaagccattttagaaaaccttttctgccaacagcccttgtcagagcctggctcggagcacctggcccttcagccctgggcagcacacattcctcagatggggccagcggaggaggggaccatgggagaggctgaggaagcacaggctggtcactcttttttttttttttttttttttttgagacggagtctcgctctgtcgcccagactggagttgcagcagcgcgatctcagctcactgcaacctctgcctcctgggttcaggcgattcttctgtgtccgcctcccgcgtaactgggattacaggcgccaaccgcaacgcccggttaatttttgtatttttagtagagacggggtttcaccatgttggccaagctggtctcgaagtcctgacctcaggtgatccgcctgcctcggcctcccaaagtgctgggattacaggcatgagtcacctctgcgccagcccaggctggtcactcttgcaaccttgtcaaccttgcaagaaccagacttgtccccagtctccccctatttgtcccttcatccctcctgaagagatcctgtcttctaaaccctgccccgctcccgtacctgctgcttgctctggcctctggccgggcgtttgtcatgggctccgtggcttcactctccacaggtgtctgtggtttcacgtggcggggtgggaagataaaggaaactggtatttccctatcaggcctcaaggtgaagtgccttcaagtgcttggttttctcctgctagaatgggccatctcttagtaacgctcccgcatgttcttgtggcaacagagcctccacctcttctctccatgttgccggtgactccctgctgccaccagagctgtatggggaccaaggtcccagggcaggcagggcacatgccacacaggaggaggaagtgggagaacacacatcccacacaggggctcagccgactccgtgcatgaggagtcctggacgggagcatcccccgtcctaaagaagaaagtgcatatttggccccaaaggaaccagcaattcaagaaaggattggccttgagagacgagcggaaggctaggaaatgtgagcgtgcctgcctctgccctcctccaccgaggctgggagggagacttcagagcataggaagcagaaagtgtttgaggaatgcctgcccccgagtgaggagccccaccctgggctggctccctgacttcctcaaatggtctcactgctctgagccccggtttgcccatctccagaatggcgatggcacctaccacctggtattgctgagagggtaagggagcaaggctggccccgaggaggttctctgccagcctctgtgccctgccctttgtaagctccgtacttctagggggtctgcaattgtggactgcgagaatcagaggagcaagtgacacagtgacacagagctgtaatctggtgagtttgctctctctgttctattagaaggtgtgctctgagagggcagaaagctggcagggcttgttcccactgtgtctgatgctgagaagaggacctggggctgggttacagcagataagtctctgcggaaggaacagatgtcatctcaacacctggcacaggaatgcaagctctggcttatcaaggcttctcaggtccccaaaagcaaagttcctcgttatgaggggtgtatttttttccaaagaccaaaaatagttcaacatagccatttctgaatacagaattgctcaaagtacagaacaacaaatgagacacaaagaataaagagacaaaagagacaaagccaaatgatactgggctccctgggtaccggtttctggtgctctgtgctggcaccccaagagtgcatcccagcacgaggacagacaccctcgtgcatttgcagccaggagctccatt

SEQ ID NO: 1880524 - DNA, 4001 bp, Homo sapiens
ttacattcttttttacatactatgtctctgaaatccagcctatattttatattttacatttacagtacatgtctttttttcctttttttcttggagacagagtcttgcactgttgcctagactggagtgcagtggtgcgatctcagctcactgcaacctctgcctcctgggttcaagcaattctcccatctcagccacccacgctcagctaatttttgtatttttagtagagacagggttttgccatgttggccaggctggtctcaaactcctggccttaagtgatccgcccaccttggcctggcctagctgtcactgactttgtaaggagtttctgcaaatgcttcttcagacttttcccacgttttttaaaacccctatttatattactacttaatggcaatttcttccacggtcacagagaacacaaagacctttgatttgctctttccaccacagaatatcactctaggaaagcattccatcataatgtatataaggtgcctaaactgtgctataatcttaagcattacagggactcagaatgaggtcgttaaagcagtgttttccaaagcgtgttccgctgacctaatcccatactcagcgtatgcaacttgatattttaatttgtaccctagtgatctagtcttatgccttctgggtacatattgcatcatatctttaaacacatccagcttctagaatggtgctgtacacgcaggaggtcgttgagcttcaccttcctgctaatgacaaaatcagcaattgcctttaaccacaggaacttcagcccgttggtcactagggggagacacacacgtggtgggcctctccaggctcctcaaatcccgccagagtcgccactgtgtagtctgcccagagaaaccacacccagtcttaggaagaggaaactgactgccatccatttcacgctactgtggccggcgagctcagagtggaatcatttgcaaggcagctcctccaagaataaccaagccgagatctagctgatcaacgattgaatttagagtaaaacttgacagaataaaactcccttcggtttgtccgtactacctgggtttgcagaaatgcttttccttagcatttaattttgggacctgtaaatataactgctttttagatgcattccataatcctcaattaacttactgcagtaaaaagataattaggttaatataaactgctccaaggggtttctgatcagactgaattttatttcatttgaaataaggtcgttgtttaatcttgcaagttaaataatcttgattttacgctgaataggggcctgagatagatgaaagaaaatttccttttcatacatgtgagaaataaactgtttcttacactcatattcacaagtgtgaccgttagtccaagttgaggcaattaacatatttaggaagaaaaaaacttcctcacagaaggattggcattggcccttctgaacagtattgcaaagtctgaaggaaaaaccctattgacaccactttctagccaaatgctataggacgatatcaatacttactgtactgagtgggcatttatttagttatttcacagtgaagatatcttttctggaaaattcctcataagaaaactgaaattcaagctcctgctcgttcttcagccaccgctactcgttcctgctttttgtgcccataggttcttctgcccaaaacaaaagctgttaaatcaccgcggcggcgctgacgtcagggagcagggccgcgaggccccaccaggtcgccaatgaagcctcccctcggctctgccgggggctttgcggggcgcatagaggctcccaggcggatagaggctcccaggcggaggagtccgggaacccctaaagaccctttaggaagcaaggtccggaaaaccaagcacgagcaagaggccccgggcggctgtatccctgcccggcgaattcagagggagcgggcgccgcggccacccaagagcaacgaagacggcggcgcggaggagaggatggggaggggtgtgggccgcccagaggcgcggaagctgggagcaccgcgcggcttaggaactaaaataaatgcttgtctgaatctgccccgggtgggggatgaaggaacaagggcttgggaggagaccgatacattttagaaattgccggtgggggagccaggggcggtggctcacgcctgtaatcccagcactttgggaggcgtaaggcgggctgatcacctgaggtcggtagttcgagagagaccatcctgaccaatatggagaaagaaaccccatctccactaaaaatacaaaattagccgggtgtggtggtgcatgcctgtaatcccagctactagggaggctgagacaggagaatcgcttgaacccgggaggcggaggttgtagtgagccaagatcatgtcactggatgttatttgttaattttttgatgtacactgcaagatcacacaagaaatgaagctattaagcccaggtattgggccttttataggggtgttttttcatggtgaatgggtaaatatgtctctactttgtgtgcttattaaacaaccctgactatgtggtcttgaaaggagagatcctgccttagtttcgcctctcattagccttatgtgagagctttttttcagagacaggcaaccaggaatatttattccagaagcagtcattgcagtggagaatttggggtttgaatcatagaagacagaactagataaaatcctagatgttacctccaatcccttcatttaaaaatttgaggtcacccaggccaggtgcagtgtctcacgcctgtaatctcagcactttgggaagcagaggcaggtggatcacctgaggttaggagttcgagaccagcctggccaacatgatgaaaccccgtctctaataaaaatacaaaaactagctgggtgtgatggtgcacacatgtaatcccagctactagggaggctgaggcaggagaattgcttgaacccgggaggcggggattgcagtgagcccagatggcgccactgcactccagcctgggcgacagcgcgagactctgtctcaaaaaaaaaaaaacaacaacaaaattgaggttacccaaattaagagaattggtagttaagacagaccaagattaataacttttagacatttgtagaccctagttattgggggtgctagactcttaacacttttccaagaaaaggggtaaatcttgtgtttcttaattcggaaggaaaaaaaaaatctaccacttgcaatttggcatgggccagaggcaatattatcagttatatgcctctacggtgtgatattgagtgatatacatggagagaatatgggctacattttatggtttactgttttggggaaatgaggcctttgacatgcagggtaattattgctggggactctgctcaataggaggccatcacctgggccccatgccaaagggaaagcttgtaaattccacttccctggaaggctgataacgtgtaataatcatgacatggattacttggtcctgttgggtcccagcttgtgagattctttctgatcaaagttaccatcatgggcaaactgtggttaaataggctttaatctctgtgttcataaagttctattatcctggtccaagagattggcagtctataacttccttttttttttttttaacacaaacatgaaattaacactttttgctctaaactaattaaagattcacgggaagttgcaaaggtagtatggagatgtccctgtacctttcaccaagtccttcagtggttacatcttacataaatatagtgcaatatcaaaacaaggaaattaacaatggtacaacatggatatagatgtcatttttttatttaaaaattttacttgtggtaaagtacacataacataaaatttaccatcctaggctgggcatggtggctcatgcctgtaatcccagcaatttaggaggccaaggtgggggcagatcatgaggtcaggagttcgag

SEQ ID NO: 1880525 - DNA, 4001 bp, Homo sapiens
ccaacctcaggtgatcaacctgcctcagcctcccacagtactgggattacagaaatgagccattgcacctggcccagtgtctacttttctttatcaggctaaacagctcaggacacagatagaatttggacttaggtccgtgtgaatccaaagggccatgctcaactgagcagccggcactgcctcgctgaacagccaggattctgggagtgctactttgtacaacattttatgaaatgtttctggcctccttctagaccagagcagaaaggggtggttaggatgttctaaataccaaccccctctactccatccccaggttcatgacaactttttaagctgagcatactgcaatcacttaattcttctagacctaagataagccagtagccacgtccactctgagcctgtgagcaggcaggatcaagtctaagagcatctcttctttggaatcttaaggcctaggatcccagcagttttggggtctaaagacttttcaggctcccgaaactccctctatttttaataattttaaatgtttccccaatacttagctaagcaaagaaggaaaaagtgtacttttattacacagtcagttctggataattctaggggaaattcttccattttagaaatctctgctttcttcttttctcccagattcttctcattaattccctcagtaaatatttgtctgtggcagggtgcagtgctcgtgcctgtaatcccagcacttttggaggctgaggtggacgaatcacctgaggtcaggagtttgaaaccagcctggccatcatggtgaaacctcgtctctactaacagcacaaaaattagctgggcatggtggtgcgtgcctgtaatcccagctacttgggaggctgaggcaggagaattgcttgaaccaggaggcggaggttgcagtgagccaagatcacgccactgcatgccagcctgggtgacagagcaagactctgtctcgggaaaaaaaaaaaaaaaaaactatatatacatacatacatatatatatatatatatataaaatgtacatatatatttatctggcacctactagatgccccaggtaccatggtaggcacaggtgtacagtgatgaagagcattttcctataaaatattacccaggctgactccaagttttaatacctcaggtaggaaaaggaggagagtgttagtaaaatgtttgccgttgaatttcaccagcgtaaaaacaacattctgggaaataattatctgcacttcagttctttggggtggtaccggagggaatctttacaaaggtggtattaatggagaagaggaagggaaggatccttagtgatgggttgtttttccaagcacctcgatctagtggatttcctttttttttttttgagatggagtttcgtttttgtcgcccaggctggagtgcaatggcgcgatctcggcccactgcaacctccgcctcccaggttcaggcgattctccagcctcagcctccggagtagctgggattacaggcactcaccaccacgcccagctaatttttgtatttttagtagagacggggttttgccatgttggccaggctggtctcaaactgatccgcccacattggcctcccaaagtgctgggattataggtatgagccaccacgcccagccagtatttcctataaataaatgctcctataaataaatagtacaaatacctttccaaatctgagaactactagtgagcatcagttttagagataaatagaacaaagctccttttctgcagtaagaatatattagcttaatgttgctttttaaaaaagtttccactgaccttaaaaacactgaaatccaagaaattggattctggaatctgagggcgagggaatcccagggttgtggacacgcggtcacatcaacaacaaaaacaaaaaggaaatgaaaaaaaaaaagggacagcagcctgaaatactaagaatccaggtccctgcaggaagcccaggggactgccaggaacacagccccatcccggccacgtgatcattctctagccttcccctggggcctggagacaaaggagaggggaggagacttggggacaaagagcaagagctgtagagtctagccctggggtgaggatgccacggctacccggctgtgagtttctgcctttgttttttgatctttcccaaaggaagttaaacattaatccgagctgtaaaaggactaagtaagcaaaggtgcctgtgagaacctctaaggcacctggtcatccagtctgcccgccacactgagagcaaagcgtaaaggggaaaggctttcacaaccagctcgagcccccagcccctcctttcggggttcttccctgcctttcagagtctcccctcccacttctcctttggatctctgggcgaacctctttcctttctgcctccatcttagcatttatgccttaagttgctgtccctatgctgaaataaattcattacagaaaagtatgctccctgataaatgggtatcaggtaacgaccaatggtgagaagggagatagtttttgttctttgatgttgtttaaaaaaattgcaaatgtcatgacaacgaggccagtcaagaagacaaggtgaaagccggacagagattcaggtccttgcatggctgtggaatccatttcctctgggtacagtgaaactgcttcccctagcttccatttatgatgatttccattatttggaacgtttgttactctttctctctctttctgtcacacacatgggtacagtgagagctagatgcagtttagaaaccaaatctctgttgaacagactgttaatttaaatttttgaaaacaaggaaaaaggaataaaaattctagttctgtagttcagtgttgagtttattttccttgtcttgttattaggagttttgcctttgtctcctacctgcttctgttcctctctgatttctcttgtggctgatggagaggaattttggtattgcatgttcttctgagactcctggcgatgctttcccaattatagagcgaaaatactcattatgaggccagttttaaaaatggccagctaggcagatataaggtttttcatggttgtttaattaatctgtaattagctctgagggcaccacttttctttaattttgtttttgtttgtttctttgtttgtttttgtaatggagatacttacctacaataggctgaacacagtgagtcacacctgtaatcctatcactttgggaggccaggctggagaatagtttgaagccaggaatttgggtccagcctgggaaacatagtgaaacccaagtctcaaataaaaataaaaataataatttacatataataaaacgcacagctcttagaggtacagagagtgttgacaaatgcatacacgtgtgtagcccacacctctatcaaaatatagaacatttccatcacctcctaaggatttcctcatgccttttcccaagggaggggactcccaactccctccctgtcccaggcaactttgttctgatttctgtcaccatagattagctttgcttgttttagaattctgtatcaatggactaatacagtgtgtactcttttatatatggcttttattacttagcataatgctctgaggtttctccgtgttgttgcagatatccgtagttccttctgaccttcaaaacaaaggtacctttgatggaaaacccccacaatttattaagtgccctatgtataggatctgttcgtaggcactgtgcttggtgttgaagaagtgcagtggctttcttctgtgtcaacttagctgagctggaacatttcccagaattcctgtccctgtatattctgggttagcgttggctaccagagaaatttgcagtgtttggaaggtgtaggaaacagcagccttttttcttttttactgctctgaaggtaaagcgcaggcagcaggcactgaggcagctcccatgcattgttccagtgacgcttagttcaccggca

SEQ ID NO: 1880526 - DNA, 4001 bp, Homo sapiens
agggatccagagtcctccccatcagccccaacaaacctcccctgcccaatttctaatccccaggagggagaactaaaaatataactcactaatgagttctttacaaatgaaaaaaagcttaattttcttaacatggtcttattagcaaaacaattgccttgtgcaattagctcctgcctgcagggcccccactctcctttctttggggctccctccccagtcttcagctcctcctcgtcattcagacctcagctgaattctgtcccctgatcacccgactcccactcgcacactctcgattcatccttctgttttcttttctgcctagcatttacccatgccagaaattatgttactctttgtttccttgtttatggctgtggctttcctcgaagttacctctaccagaacagctaccttgtcagggtcactgccatattgtcccagatctagaacagtgcctagcgtgctgttcggcgctctgtaaattttttttttcttcttcttgagacagagtcttgctctgtcacccaggctggagtgcagtggtgcgatctcggctcgctgcaagctccaccttctgggttcacgccatactcctgcctcagcctcccgagtagctgggactacaggcgcccgccaccacacttagctaatttttatatttttagtggagacagggtttcaccgtgttagccaggatggtctcaatctcctgacctcgtgatgtgcctgcctcggtctcccaaagtgctgagattacaggcatgagccaccacgcctggcctgtaaattcttttcgaatgaatgaagtgggtaaacaaactcagcccaggaggagataaggcccattggctgaatctggcccggcttctctctccactttccttctcccacttttggctacggtcttacaggattgcctgccctttccggagcagaccactcccatccactcgccttgctcttctctctccctcttcccttctctttctgggcctgtccctttgcagctcctcctgcctagaatgactcctttcctacccctcaactttggcagacacctctgtgttaccctccactgggaccccttcccttcccctgcactgttccaagggtggtctctgggagccggcttggagtttgaatcgcctcacaccccagggcccagcctggtagaggctctgcttgttgactaagttaccttcagttgtcctgggctccgcttcagtgctgagcaggcagtcccatctctttctgtctttcctgggaatctggctggcagagaggcagcctgtgcacagttgggagagggcaggtttcatcctctctctgaaagaatgggacttctggaagctctgtcagaggactccaggggcctcagtgagggaggctgcctgcagcccagcagcctggtatttcttcatgggatggagaggccgaccctgcctcctgattccctgttctccccagaccgcccatccactctgctttgccagctggaaattacagtcctagaggtttctgccatccccacctgttacccctttcgtccctaaatcctgtcctttctgccttctgtatcctaaatccaactccgtgacagccaggaccatgtctggctcacgtaaatcagtcacctcctttcatctcaccggctcacctggagggtggcagaggcatttcttcctcttctccaaagtctgcctgctctgtagatgcctgggggttcctgtgatgatcacgtctctgccttaccatgctccccattgcctgcagggccaggtgcaaattcttaggctggtccctaggccccctcatccacctcgtccagccagtttctcatttgctccatccagggcatggtgtttgtggttgtttttctcacacatacacacaataaacctcactcttttcacagctgcatagtatttccctagtgtgtgtgccactgtagtctcctaatgtagcagggcgaccacagtccagaacccctcagacaccaagttgtggaaggaaagggctttattcagctgggagcattgacgggctcacgtctccaaaaaccgagctgcttgagtcagcaattcctgtcgcttttaagggcttacaactctaagagagcccgcgtgagagggtcgtgatcgattgagcaagccgtgggtacgtgactgggggctgcatgcactggtaatcagaatggaacagaacaggacagggtttttcacagtgctgtcccgtgtaatgtctggaatctatagataacataaaccggttaagtcaggggtcagtctgtaactaccaggcctggaacgcagcactgggctgtctgactactgatttcatttctttcttttctttaactcctactttttctttgaggcagaaattgggcataagataacatgaggggtggtgtcctcccttactaatactggacattcttccagtgactgtttagtgtctgtgcagatatttctatgagataaattccttgatgtgaaattgcaaccctaaagtatgtaaagctggacctattagtaacaccaccaaataggtatgaaagtgcatatttttctgcattctcattaatactacatattcccagttttgtttttgagttttagtcaatctggtgagtggaaaacatcatcctgtggttctaattttcatttccctgattgccagtgaaactgagtatcttttcatgtatttattggccttttgtgtttctcttactgtaaattaccttttggtatttcttacccactttcctatcagttaatttatcttcttatcaactctgttgatcttcatgttgcttattatgttacagtatgttttctccaaaggttatatagattgtcctttttaaatctttatgtatggtacctttcagtgaactggaattttttttctttttttttttactttttcagtcctttttttttttattttagaatagatttagatttacaggacagttttatggataatgcagagaattgattgggatttttgtgtaatgtaatctttccatgtggaagacgaagggtttccccaccaagaccataaagatagtgtgctttcttctctttcaggactggctttactttgtgtccatcagctcttaatcccaactcaaatctgtttgtccttggtatgagagaaggatctaacttgattttttccatccccaaacagccagtggggacccaacgtcaatttttctgccttttgttttgttttttgagagagggtctcactctgtcacccaggctggagtgcagtggtaccatcatggctcactgcagcctcgacctcttgggatcaagtaatcctcctgcctcaacctccttagtagctaggactacagacagatgccaacacacccatctaatttttaaatttttagtagagacaaggtctccctatgttgtgcaggccgatctcaaatccctgggctgaagtgatcttcccacttcagcctcccaaactgctgggatcacgggtgtgagccaccatgcctcagctttttggtcttaataattcatcctttcaagacagatttgaagctaccttctccatatcctaagtttatgacttcactccttcatctgctagccatgttaaactgtgatttcatgaatcagtgtcttttgtggaatctgtgggtagctccagggcccatggcaattgccctttaaatgccaggaaatgaatgaaacagagcatcttgcgcctgcctttcaggcagccacgtcagcagggtgatgctttgtgccaagagctttactaggaaggagggtgccttatcgggatcagtgttattgattttatttttctaaatagataaaagcattcaaataaaacaaaattcgtaaggtaccaaggagtacctttttgaaagtactcctttcaaatttgatgttgaaaatgcgcttcttcccctgagccagagccacctggctggccgccagcctctgtctgcgtgtgcacgt

SEQ ID NO: 1880527 - DNA, 4001 bp, Homo sapiens
ccacttggagctccgacttacattcccacactagagccagtgagcagaatcaggtaagacttgtaataatttgggttatttagtatgtaaattgttttcaaaacatcaaatagtagcaaattgctattgtgtaagaagaaaatcgagggctaaaatggcacagaaacttaccattggcaacaccaacaattgccagaagtttttatttcttgcccctgtgtaagatgagcaaagaattttcatcagtgtaacatactgtttattttcctagtgctatagctaatatcacaatagctcttatttgacacctgatttttacatatgtaaatttatacaacagccctgcaataaaaagatgactattattggtttggaaataggaacactgaggccctgggaatctatgaaaattgtcttaattcatccagcctgtaagcggtggtgccagcattcaaactccaagtcagtctggctgcaatgtgtagatggagtcttgttttgctttgttttgtttccaaattcatttctatgttttcctcctctgagataaagaatgtgtattttttatttttccataaatgtattcattggtttacttatccaaccaacatttattaggatgttttagtagttaaatcaaaaaagtctagtgactgattaaatccaagtggtaaggaaaagagagtattgaggattattccaagatttttgagcctgggtacctggatatactgaatgactaccagctaaaattgagaatataggaaaaacatagttgtgggggcaacaataatatattctattttagatctgaatgagtttgaggtgccttctaatacgtgcaagaagtaaattctaaaataacatgaataatgaataagacaaaatgaagtttgttttgctgagttttctttatgcctcacgaaagtattgtgtgtctttgttttgcagatctctctctccacgttcagtgagcaggtctcctatacgcatgtctcctgcacggatgtcacctgcaaggatgtctcctgcacggatgtcccctgcaagaatgtcccctggacgtaggctggaggagacagatgagtcacaacttgagagactatataaaccagtctttgtgttaaaacctgtttctttcaaatgtttagaagggcaaactgccagatttgacttaaaggttgttggtagacctatgccagagacgttctggtttcatgatggtaagcgtgataagtttttgctcatgaatcataaaaacacaaaaacaagcttatgtatgcatctaacaatttttaaaaactattttaaaatctactttcttttaaacatattttcacaggccagcaaattgtcaatgactatacccataaagtagtcattaaagaagatggtactcaatcactaattattgtccctgccacacccagtgattctggggaatggactgtggttgcccaaaacagggcaggcagatcttcaatttcagtgattttaactgtggaaggtaaaatgagataaaataaaaataaatgaattttcttatcacttgggttataaacaggtatttcagccttactccctctaaatcatgacctttctctttcagctgtggaacatcaggtaaaaccgatgtttgtagaaaaactgaaaaatgtcaatataaaggaaggttcccgacttgaaatgaaagtcagagctacgggtaaccccaaccctgacattgtatggttgaaaaacagtgacatcattgtgcctcataaatatcccaaaatcaggtaagtatggaaataataaagctaagctcattatacaaatccaataaccagggaagctataccactatattgattattccctcccccaactttttatagaattgaaggaaccaagggagaagctgcccttaaaatcgattccactgtcagccaagattctgcctggtatactgcgactgctattaataaagctggcagagacactacaagatgcaaagtaaatgttgaagttgagtttgcagagcctgagccagagagaaagttaatcatcccacgggggacatatagagcaaaggagattgcagccccagaactggagcccctccatttgcgatatggccaagagcaatgggaagaaggtgatctctatgacaaagagaaacaacagaaaccatttttcaagaaaaaactcacttccttaagacttaagcgctttgggcctgcccactttgaatgcaggctaacacccattggtgacccaacgatggtggtggagtggctccatgatggaaagccacttgaagcagccaacaggctccgtatgatcaatgaatttgggtactgcagccttgattatggcgttgcatattctagagacagtggtatcattacttgcagagccactaacaaatatggaacagatcacacatctgctacccttattgttaaagatgagaaaagtcttgtggaagaatcccaattgcctgaggggaggaaaggcttacagagaattgaagaattagagagaatggctcatgaaggtgcacttacaggtgtaacaacagatcagaaagaaaagcaaaagccagacattgtcttgtacccagagccagttagagtacttgaaggggagactgcaaggttccgctgcagggtaacaggctaccctcagcccaaagtcaactggtacctcaatggacagctcatccgcaaaagcaaaaggttcagagttcgctatgatggtatccattacctggacatcgtggactgcaaatcatatgacacaggtgaagtgaaggtcaccgcggaaaatcctgaaggtgtgatagagcataaagtgaagcttgagattcaacagagggaagattttaggtctgtccttaggagagctcctgaaccaaggcctgagtttcacgtacatgaaccaggaaagcttcagtttgaagtacaaaaagtggatagacctgttgacaccactgaaaccaaagaagttgtgaagttgaaaagggctgaaagaattacccatgaaaaagtgcctgaagagtcggaagagctgcgcagtaaattcaagcgcagaacagaagagggctattatgaagccattaccgctgtggagctcaagtctcgaaagaaggatgaatcctatgaggaactcctcaggaagacaaaagatgaacttctccactggaccaaagagttaactgaagaggaaaagaaagctcttgccgaagaaggcaaaatcacgattccaacttttaaacctgacaagattgaactaagtcctagtatggaggctccaaaaatcttcgaaagaatccagagccaaacagtgggccaaggatctgatgcacacttccgggtcagagtcgtggggaaaccagaccccgaatgtgaatggtacaaaaatggtgtcaaaattgaacggtctgaccggatctactggtactggcccgaagacaatgtttgtgaattggtcataagagatgtgactgctgaggactctgccagcatcatggtaaaagccatcaacatagctggagaaacctccagtcacgcattcttacttgtccaaggtaatttgcatgtctttcctttgatggacctgtctttgtattcaagaatatccatgagtgtgtttacttttattttctttccccattcctcaggttgagaatttaatttaatataatgtgctctcccctttttcccccacctttttcttgtagccaagcaattgatcactttcacacaggaattacaagatgttgttgctaaggaaaaagacactatggcaacctttgaatgtgaaacttcagaaccatttgtcaaagtgaaatggtataaagatggtatggaggttcatgagggagataaatacaggatgcactctgacagaaaggttcacttcctctccatactgaccattgatacgtctgatgctgaagattacagctgtgtacttgtggaagatgaaaatgtcaaaacgactgctaaacttattgt

SEQ ID NO: 1880528 - DNA, 4001 bp, Homo sapiens
gctctttcctttgtccttccagcaggtgttattaagcagggatgacttgacagttgccgggctggtctcaccagaaccaggcagatgcgcttcgcccgcgttcctgactccccctccttcccgtctcttctcttttcaaatgacgccatttatgcaagagggggcaaaaggtgaaatgcaaaccctttgagttagccctgataaaatctcctcatttcaaatcctgctggcaaagccgcctgcagcctccctccgcgcccctctggtcgcttgttcttctacccaatccctagggatcatgcccatcagggttcatcctagagctcctgctcttctctacagcacattctcatagccttggaaaatgcctctactgacaactcccaacttatattccacgccaagaccttcctcggagccccagcctcacacatgcccacgcccctgccccccgccccccccccccacccccgccccgaggtcttcttgacatctctgcttggtgacgtgcaggcttctcaatctccctgctcctccctccgcctcagtaaatgctggcccaggctgctcgcttgctcaagacacaaccccaagaggcgtccttgatgcttccttttccctcactccccatatccaacccatccatgagttctttcggttccaccttaaaaatacccctaggggccgggcgcggtggctcacgcctgtcatcccagcactctgggaggccgaggtgggcggatcatgaggtcaggagatcgagaccatcctggctaacacggtgaaaccccatctctaccaaacacacacacacacacacacacacacacacacacacacacacacacgaaattagccgggcgtggtggtgggcgcctgtagtcccagctactcaggaggctgaggcaggagaatgatgtgaacctgggaggcggagcttgcagtgagccaggatcgcgccaccgcactccagcctgggtgacagagcaagactccgtctcaaaaaaaaaaaaaaaaaaatacccctggggtctgcccacttccgtccatcttcccggtcatcacatgggtcctgtcactgtcacctctggctgagatttgtgcagtagcctcccagtggatctcccactgtcactttgcctgcccaaccagcagatagagtgatttagaaagaataagtagatcatgtaacgccactcccaaccccagtctgcacaaagcttttcagtgagttcctgtcgcacttagaataacacccacgcttcttactgcacagagaccccgactgagccgccccacctgtctgtgcagccctgtcttgacctgttcttccctctcctatgacatttctggctggattgatctctaacgatcccctaggactttatttaatactctaagtgagatctggatcaggcacctcagcattacctggagcttgttagaaatctcaagccctctccagacctactgaatcaggaatcaggatttcagcaagatccctgggtgattcaaatgcaaattaaggcttgagaagctctgctgcagctcagagcacagcaggccctttccaccccagggcctttgcacatgctcctctttccccggttcctcatacagcttgctcctaggatacctctggaaatggatgtgatgaaccatggctgcttctggggagagaaacagggaagctggcattggggatgggagggagaattaccttttattgtgtactctcattcatcttcaaacaaacaagccattttaacagctgtttttcagccttcagttctatttacagccactatgaaaagtaacctcccttccttccttggtgtcacagtgtcctttgtttcctccatggtgttcatcgtaatttggtgatcgtgatgtttcttcgctgatgtctcacttctgccatcagcatgcaggaagtgaagatgttgtcttgttcacccccctgcatccaccagctttagatccatgctgcacacaggaagctctgaaatgctgacaaaatgagcttctctgaaatcttacattcagatgctcctccctgccccttccgtccctccatgcagtgcacctactaatttgctcccacgactcctgtttcatacccgcgaggggctcgtgtcctgatggctctgctcttatcttccagcctccttggtttgcatctgttctgtgctgctttcttctctggcttccacacacagagcagttggcctcacctcagtgtaactgagagaaatgaaagtcatcagaggcaacgcgctcacttccctgccacaaagcccgcaaacctgtccacgtttgctgctgtctttttctcccttccatttgctaacgtgccactgctctcttactgaaagtgctctgatctcactcctccagtggtgctggtaaacgtttcacaactgactctctgggaataaaaaggtctgatttgaggaatttgctggtttctgtggtgtaaatactcccatcacagccaatttcaagccaccagtgagataacacgacacgcagagttggaagagatgcatagacgtgagtaatcactcacatatagcattctcaccacagggacacaatggatggacattatctcaggggaatagctattggtagaaggtaacaaactaggaagagatgagttttcagtatttattgctttgtctctatgtaacctatttaactgtaagttttcatcatttaatttttaacactggctgtgtttggcgcctggctcagaaaattcctgcagatttcacagtcggctctcccgcctgtggtcgtgccttgcagccacttttccacccctacacatttctcaatcaccacagtctggcttccgccccacatgccgaggaacctctcccacctccttgttgctgacttccctcttaccttcctggatccccaggggtacgggactctgggacaacctactcctccagcttccacagccctgcagagcccggcttctgcctctcctctgtccatatgctcctgctctctgtccttcctcaattcctctccttgatccatcccttagggtttctggcctcagccctgcctccctttgagctctctcttggcaacttcagccgtctccccgcccaatgaacctcttctctctgtgggtgacactccattctctatccccagtcccctcccaggctttggcccacagcaggccctcacggtgcatcatgacttcagtgaacacatgaaggaacgggttgctgaaactatcccttgtccccttctcactggcccccagtccatcctccacatttatccaaaacccatctttctcaaatgcaagtcttaagcaccacttttgagcctctgggagactgctgcagtggctcagggaggctgggctggggccaggctggggccaggctggtgagagcagaggtgcacagacctggatacatttgtggtggcttgtggagcggaacccacagacaagggcacgcaccgaatgtggagggtgtgtggtgattcccaggtgcctggcacaggcatccaggcggagacaaagcattcactgacacagggactttgaatcatttctgttctaacttctgacaccaagtgtgtgggtttttacctcacactaaccagttctccagctctcccgacaccaactggttgtcctacgattcaattcagttttgacaccatccatcagcctcaggtcctacaggttaagagctctgtcctgcaaggctgcccccacttcagaggccagttgcaaggcctaggcctcccagacgtctgaccaatggactacaaactggtggttcccacaaactgctcctcaggtttagaacagctcacagaactcaggaaaacattttacttacacatactggtttatgattaggatgtaactcaggggcagcagagaaggactgccctgggcaaggcatcggggtgactgttgcggagtgtccaggctctctctggatgcgccaccatcccag

SEQ ID NO: 1880529 - DNA, 4001 bp, Homo sapiens
tgggttgtgcacagatctgatcccttgactgcttttagtaattctggggaggcgtctgatcaggcagctcattggaccaagcagccgaaatgaagtttagggagtgtttgtggtgtctcctacctgctcccaggctgggcttctgtggttcagctcaaccctgcatggtggacttcctttatcagagatcccaagcgagctcttgtactgtgcacaccacggtcatgggtcccctcttcggatgagtacatgctaagtacatggaagttagaaggtcattcgttgctttcttacagccactcccaccaagctgatggcagaggccagcaccccggctttgccaagatcagccaccctgccccaagagttacctgtccccgggctcagccaggcagccaccatgccggtaagtgtgtgaccccaaactcctccacgggtgtacgctacaatgtggtgggggctgcagagccaggcgatgtgctgcgtctccccagagaatccgttttacttagggattgagagtgtagggtggcagatgggggtgggaagttaagtaatttaattggcaactaattttaaacatttgcatgacaaaattaacatggatgcatatccattagaatacaaaatccaagtgaattttaaggattaaaggcaaaactgcaaacccggggtcataccctcatacccccagagcccctggggctacacaattaggattcttctgttttgaatcccctttcatgctggtgaaaatatttgagcagctcagtgtcaacaaaaatgtacctctgcacatatcaggtagcgtccccaacatgtgccagatccttccagaacatcgggatgtatggccctggctatatgtaaagtcactggcatgcaccactctggtcatctattgccaggtagcaaactacacctaacttagtggcctaaagcaaccacatgtatgaagttcatggagtctgggtcaggaattcagaaagggcatcatggggatggcacttctctgctccttggtgtcggggatctcgtgggcctaggctatggaatgcacccaccagatggtgtctgcacatgaatgtccagcagccgggctgggtggctgagggctgggctcagctgaggccatccgtcattgacttgcatgggcctctcaagccttaggcttctcctggcatggtggtggactccaggttccaagaggagacacctggagacgcaggcaggaaccatgcagacctctgtgacctagccacggaagtcatatagtatcaccactgccatacctcttggtcaaagcagccctgagctcacccatgaagagggatatagacctccacttctagacgggagaagtacccaggaattttaggggccacctccagatagttgccaaacccctcccacccacacttcactgtcactttggagatggagtgaacgtgccaccttcctgcttgctgtctccataaaggctgtgcacaccctgcttgagaagcttgggcgatgcgttttattttcaagtagaatgtggcaaagaccacttactttctctccagccacctccagatgcgcttgcaagctgtgcctgccattcttccagactctcctgtccagtgtgactcactttgccaacaacggaggcccagagtgcttctgtctcctcccagctgcgcagggaaacagaacccagaccagcttctggatcagccctgtgcctgggatttctcactgaaacaaggtctcctggtgtcatttcctcccaatgctgtcctgggtgacactttccatttgagctgcttttttatataggccctagcaactaggggccgtgtcggaataacttcagacgagtcctttcactgttctttaaaaaaaaaaaaaaccactagaaaaccactagcccgtgaagcagagtgtttcatttcttgttactatacattgtctcccccacccacccgagtgatcagggagcgcagatgtgactcagctcacttcccaggagtctcttaaaaggttctgggcagaggctggtgaaactgccccagtcctcactgcctggatgagttcatggacaaacatgcatggcgtgtctgtccatctgcattagcgctgagcagaaaagatacggacgcacagcagctcatggtagcagtccacgcacgtcgtcctgcttgatgacaccgctaagaattaatccatttgggaggagagcaaccaaatccacccagggcggagtccaggacagcaggcaagggaagggaagtagagctgagctaccaggcttgggcaggtagcagcagcctggcagagcacactgtggtggggtggaagcctgcaccagttgtgcaggggctctgcccttgtgccctgcgtaggaagcagtgcagccagggaacagacacctatactttctagaactcttgacttggagctgttcaccccagtgcggaacgcagagaacccaccggaccaagagaccacatccctgtcccctggaatggcagaagcagtggtaacaaagcccctttctctcccacaggcccctctgccttccccatcgtcctgcgacctcacacagcagctcctgcctcagaccgttctgcagagcacgcccgctcccatggcacaggtgagtctgggacccaggaaagggcagcccctctcaagccagaagtccgcagtgtgctgcgctgatggtcttgtacacttaggtcccaaccaaggccctgacgtgggggaatgtccctcccaatgtgtgtgtggcctgtgtcgagccatgaggttccccccacacccaccctctcgtctccaagttcttttttccagtgtctggggttttctttttttaaatttcagtagttttgagggaacaggtggtgtttgattgtatggataagttctttaggggtgatttctgagatttgtgtacctgtcacccgagcagtgtacactgtacccaatatgtagtcctttatgcctcacatccccccacccttgccccaccagtcccaaagtccatcatttcattcttatgcctttgtgacctcatagtttagctcccacttagaagtgaaaacatacgatatttggttttccatttctgagttgcttcatttagaataatgacctccagctccatccaagttgctgcagaagtccagagtctgtttttttaattcttttaacagtctctgttcacctctttgccacttttccacattcctcttgttctttacgactccaaattggccatggtattttagaaaaggtctgaattgggctgcatgtcatagaaagactgaaaggatctaaaagccgtgagtccagcactataaatatcacatttgtttaaaaaaaaagaaagaaagaaagaaagaaagaaaagaaaaggattacggctttgctgagtaattccatccttgtttcaacaacattcggtgagttactatttgggtcagtcagtgagcgaggtgttagggatgtaaagatgtaagtcagcccttgcttttagttctcagaactaaagggagagacaggcatgtaaacagagacgccgccgtggcagggcatgcgtttttatagaaccgtgaaggaaatattctacccagggaagtctgacgtggcttcctggaggaggtgacgcttgagttggccccggaaaggtgggtaggaggttgccagatggtttggcagggggacagcagggatgtgcttcagcagggagttctgaacacggggagtgacaaaccctgcccaggcctgagctctgacttcagttccctcataggagacttagctctgcccagaccatggccacaggctagagctgcgtcccagacggcagttcagcagcaggtgcccctctctgtcttggcacacatctgtcaccactgatgaaaactatttcggaacatatgccctcttagtgggggtctctcatgcattcctggagtaagacacatgctaacgcgtgctgcttgccagagtcaggc

SEQ ID NO: 1880530 - DNA, 4001 bp, Homo sapiens
agagaactaaccacaaacagtttggtgtcatttgaggttcaattctgagaggtggtacaggggagttatgtctcagagatggacaaaaacagggctgtgagaggtagtataatagtaccccaaagatgtctatgtcctcattttcaagactgagtatgtgaatatttcatagcaaagaggaattaagattgctaatggaattaaggttgctaatcagctgatcttaagatagataaattagcatggataacctagatgggcccaatgtaatcacaatgattctttaattgtagaagagaaggagcagaggtctgagtcagagagaggtttgaagatgttacattgccagatttaacgtgtgaggaagaggcaacttctagaagctggaaagggcaagaacataggttgtgatctagagcttccagaaagaacacagcacttccaatacactggtttctgcccagtgagattctctttggattactaacctccatcactgtaaggtaatatatttgtggtaatttaagccactaagtttgtggtgatttgctggcaataagaaactgatacagagaccaagtaacagaggccattacacactttgcgctgagggcagttgggagtttaaagtgaggaagagaaatggtcagtttgccatcaaagatcaaattgatacaagatggatttttggggtagatggtggcagggagatgttataaggctgtggcaatggtgcaaacaaacaaacaaacaaaaaatgattagcggcttaaccgggagagtaaagtaggagtagatagaatcgggcaaattaattttagtgataaaattagtgggacttggggaccaactaaacatgggagataaggggaaaaagaagtatctagaagcattccttagtttctggcttgggtagactttggtattgtcactgagataggaaatgcaggaagaagcctttgtttttttttcctgttttggtgaaagttgtgtgttgagatttgagtagattgaatttaagacaattgtgggatatccatatggaagctggcaatagactatatcccaagcttagatttcaaatttaagagtcctaagcacatgtgtggaattacaacaaagagagcagagtgcactgattaagaaaacagcctcaggagccaccatttaacagcaattgtcagtcttcctcaatctttgaaaaataaagagtaattattgataaggctactaaaataaataaatgtttaaaagggtgtttggcacagtatatggaagttagtagattctgaagaaatggtaactgttattactagtcgggccagaaataaaagagaacagcagtggaccaaagaaagtatgaagttaagtctaaacaacaggtgggttagacacatactgtctctgccctcagaatactcccagtctagttagcttcttacagtcaggggccatattttactcacggctgtgtcctgcccagtgcttagctcaatgactggcccagaagcgtcaagcactttataaatttcggctggatggttgaggagaaagagggaaataggatcaagctgcaggagcagagaggaggcagtgggagagtggtaaagggcgctagaaaggagaaggaaacctaggggacagaagaggcaggaggaaggcaatgagccccttaggaagccaacgcgtctgccttgtggacctggtgtgggaagaagctgtgggagcctggggatggggtgtggtctatatgggggaagatgtagaatgggcaaaaacaatcactcgggaatttttattgaacggaacagggctccttggaagccaggggaaattaaccagttacccaccaacaaagcttatacgttttcgttaggattggctaaggcgtgatggtttcagagaaagatgaagtttcaactgtggtcctctcagatcaggcctctcggaccgattttcccagctctgcgggcgctctacgcgctggcgcgagccgcccctcaggaggccaccgcccttctggggccgctaccattggaagcctggaacgcggggggcggggctgaggtcgttgggctctggccattcctggtcaggtccggacagagggacaacggggtgctagagaaggagagcggggcgggtgaggaaggggctgagggggctgtgccggccatggagctgtacctcggcgcctgctccaagcctgccaaagtcgccgtcaccaagacggtcgccagcgtcctggccgcggacacccagcagtgcagagacgtgagtggccgcaagctgggcggcgtcgccctctggcggccgcaggcctgctggggagcggggcagggatcgccacacacgggtcgcgaggctcccaactgtcccccgtcaggaggctgccctcttgcggcgcccgggggcggtggcggtggctcggactgtaccggccgcaactggcaggcgcgggacgccaggagagctggtgaccagggaaaacgggaggacttcaggatgccccgaaccctgattgtataattcttcggagtctttggttgcaatggaagtagattggtctaaactaaactaatactgcctaaaaggaaagacaaaactctccaattgtgtctgacagggcgtgcacaaaacccactttgcaggggttggaccggctcagctactggacctacctctcggggtcaagctgcctgtgatcccaggaagcaatgctgtattctatactacgaatttcggtgaaaaggtgaacaagtttttatcgtctttctttcctttaccctttactacttgctgtttaactcaaaggctgcatcatacaaaattcattaaaggaatttgcatcaacatttacaggaaaaagaaaatcccacatctgaccgaaggtattgtttagaatgcatatgaagcactttcatcttaatggtttggacataatcatattccagaaagtttagattcttagtccttaattaacaattcacggtaccatattaatattccttataataaaacttcatatatacttatatagtaagatttgatgtacttagaaacatgtttagaagctgaaaggttattagtgatagctgccatttaatgatatgttacgattttaactgacagtatcttggaccaaactctcttcacgggaaacattattttgttttgagttgaattctattttacacataaagaaaaaaaaaagaactgaaacagtgggacttaaaatgagttaatatgtttagtactttaaccttactttaatgaaagaaagccctgcctcaatgaggaagagactccataatttgccccagcctttccatccagcattgtctccaaccagagaggctcagcttcttcaagttgagtctttcacacctacccataaataccatgctaatacttcagtattttgtcaactttgcccccaaacctggcataccttgtcttcttctccccagtctatgaatctgagctatcaagattctctgaactgtgatagcccccccgttagcttatttttgcttagagttcacgttgcccttgatttgtgtgatctcacttacacaaaccatagttaatcatactggattatagtgtgtacttcccttaagccttttcatgtttttagtccttaacaccacacctacccccaaacctccccagcctttgactaagtagtcaatgctgaaggaggtttagtacattcttgttgactggttgcttttatcagttttgcaaaaagttctacaagaaagaattctaagtggcccacttacccttctaatgtctatgatgtcatcagaaataaatagaaccccttggtatttgatacttgcttaatgtcttatacagttcaggctgttataacaatgtaccatagactgggtggcttagaaataacgtaaatttatttatcattgttctggagctggaagtccaagatcaggacaccagcatggtcagattctcgtgggggtcctttgaagtcc

SEQ ID NO: 1880531 - DNA, 4001 bp, Homo sapiens
ttctagaagctggaaagggcaagaacataggttgtgatctagagcttccagaaagaacacagcacttccaatacactggtttctgcccagtgagattctctttggattactaacctccatcactgtaaggtaatatatttgtggtaatttaagccactaagtttgtggtgatttgctggcaataagaaactgatacagagaccaagtaacagaggccattacacactttgcgctgagggcagttgggagtttaaagtgaggaagagaaatggtcagtttgccatcaaagatcaaattgatacaagatggatttttggggtagatggtggcagggagatgttataaggctgtggcaatggtgcaaacaaacaaacaaacaaaaaatgattagcggcttaaccgggagagtaaagtaggagtagatagaatcgggcaaattaattttagtgataaaattagtgggacttggggaccaactaaacatgggagataaggggaaaaagaagtatctagaagcattccttagtttctggcttgggtagactttggtattgtcactgagataggaaatgcaggaagaagcctttgtttttttttcctgttttggtgaaagttgtgtgttgagatttgagtagattgaatttaagacaattgtgggatatccatatggaagctggcaatagactatatcccaagcttagatttcaaatttaagagtcctaagcacatgtgtggaattacaacaaagagagcagagtgcactgattaagaaaacagcctcaggagccaccatttaacagcaattgtcagtcttcctcaatctttgaaaaataaagagtaattattgataaggctactaaaataaataaatgtttaaaagggtgtttggcacagtatatggaagttagtagattctgaagaaatggtaactgttattactagtcgggccagaaataaaagagaacagcagtggaccaaagaaagtatgaagttaagtctaaacaacaggtgggttagacacatactgtctctgccctcagaatactcccagtctagttagcttcttacagtcaggggccatattttactcacggctgtgtcctgcccagtgcttagctcaatgactggcccagaagcgtcaagcactttataaatttcggctggatggttgaggagaaagagggaaataggatcaagctgcaggagcagagaggaggcagtgggagagtggtaaagggcgctagaaaggagaaggaaacctaggggacagaagaggcaggaggaaggcaatgagccccttaggaagccaacgcgtctgccttgtggacctggtgtgggaagaagctgtgggagcctggggatggggtgtggtctatatgggggaagatgtagaatgggcaaaaacaatcactcgggaatttttattgaacggaacagggctccttggaagccaggggaaattaaccagttacccaccaacaaagcttatacgttttcgttaggattggctaaggcgtgatggtttcagagaaagatgaagtttcaactgtggtcctctcagatcaggcctctcggaccgattttcccagctctgcgggcgctctacgcgctggcgcgagccgcccctcaggaggccaccgcccttctggggccgctaccattggaagcctggaacgcggggggcggggctgaggtcgttgggctctggccattcctggtcaggtccggacagagggacaacggggtgctagagaaggagagcggggcgggtgaggaaggggctgagggggctgtgccggccatggagctgtacctcggcgcctgctccaagcctgccaaagtcgccgtcaccaagacggtcgccagcgtcctggccgcggacacccagcagtgcagagacgtgagtggccgcaagctgggcggcgtcgccctctggcggccgcaggcctgctggggagcggggcagggatcgccacacacgggtcgcgaggctcccaactgtcccccgtcaggaggctgccctcttgcggcgcccgggggcggtggcggtggctcggactgtaccggccgcaactggcaggcgcgggacgccaggagagctggtgaccagggaaaacgggaggacttcaggatgccccgaaccctgattgtataattcttcggagtctttggttgcaatggaagtagattggtctaaactaaactaatactgcctaaaaggaaagacaaaactctccaattgtgtctgacagggcgtgcacaaaacccactttgcaggggttggaccggctcagctactggacctacctctcggggtcaagctgcctgtgatcccaggaagcaatgctgtattctatactacgaatttcggtgaaaaggtgaacaagtttttatcgtctttctttcctttaccctttactacttgctgtttaactcaaaggctgcatcatacaaaattcattaaaggaatttgcatcaacatttacaggaaaaagaaaatcccacatctgaccgaaggtattgtttagaatgcatatgaagcactttcatcttaatggtttggacataatcatattccagaaagtttagattcttagtccttaattaacaattcacggtaccatattaatattccttataataaaacttcatatatacttatatagtaagatttgatgtacttagaaacatgtttagaagctgaaaggttattagtgatagctgccatttaatgatatgttacgattttaactgacagtatcttggaccaaactctcttcacgggaaacattattttgttttgagttgaattctattttacacataaagaaaaaaaaaagaactgaaacagtgggacttaaaatgagttaatatgtttagtactttaaccttactttaatgaaagaaagccctgcctcaatgaggaagagactccataatttgccccagcctttccatccagcattgtctccaaccagagaggctcagcttcttcaagttgagtctttcacacctacccataaataccatgctaatacttcagtattttgtcaactttgcccccaaacctggcataccttgtcttcttctccccagtctatgaatctgagctatcaagattctctgaactgtgatagcccccccgttagcttatttttgcttagagttcacgttgcccttgatttgtgtgatctcacttacacaaaccatagttaatcatactggattatagtgtgtacttcccttaagccttttcatgtttttagtccttaacaccacacctacccccaaacctccccagcctttgactaagtagtcaatgctgaaggaggtttagtacattcttgttgactggttgcttttatcagttttgcaaaaagttctacaagaaagaattctaagtggcccacttacccttctaatgtctatgatgtcatcagaaataaatagaaccccttggtatttgatacttgcttaatgtcttatacagttcaggctgttataacaatgtaccatagactgggtggcttagaaataacgtaaatttatttatcattgttctggagctggaagtccaagatcaggacaccagcatggtcagattctcgtgggggtcctttgaagtcctttcattattacctccctgcatggtagaaagaaggctggagagttccctgtggtctctataggaacattatctcccttgatgaggactccaccctcatgacttaattatcccccaaggccccagctcctaatgccatcacactgaagattaggattgcatatgaattttgggggcatacagtcaatctaacacactaaataaacatgatttcttaaaacaagttttgtttctgaaaaaaagtataattgctctttaaaaaaaactaatctgttctactagattagagcaagtgaactacaaatataccaacttcacacaacttgagtcacatccacacaaactaactttgcaaaaacgtgcttgaaatttattc

SEQ ID NO: 1880532 - DNA, 4001 bp, Homo sapiens
agatgtagaatgggcaaaaacaatcactcgggaatttttattgaacggaacagggctccttggaagccaggggaaattaaccagttacccaccaacaaagcttatacgttttcgttaggattggctaaggcgtgatggtttcagagaaagatgaagtttcaactgtggtcctctcagatcaggcctctcggaccgattttcccagctctgcgggcgctctacgcgctggcgcgagccgcccctcaggaggccaccgcccttctggggccgctaccattggaagcctggaacgcggggggcggggctgaggtcgttgggctctggccattcctggtcaggtccggacagagggacaacggggtgctagagaaggagagcggggcgggtgaggaaggggctgagggggctgtgccggccatggagctgtacctcggcgcctgctccaagcctgccaaagtcgccgtcaccaagacggtcgccagcgtcctggccgcggacacccagcagtgcagagacgtgagtggccgcaagctgggcggcgtcgccctctggcggccgcaggcctgctggggagcggggcagggatcgccacacacgggtcgcgaggctcccaactgtcccccgtcaggaggctgccctcttgcggcgcccgggggcggtggcggtggctcggactgtaccggccgcaactggcaggcgcgggacgccaggagagctggtgaccagggaaaacgggaggacttcaggatgccccgaaccctgattgtataattcttcggagtctttggttgcaatggaagtagattggtctaaactaaactaatactgcctaaaaggaaagacaaaactctccaattgtgtctgacagggcgtgcacaaaacccactttgcaggggttggaccggctcagctactggacctacctctcggggtcaagctgcctgtgatcccaggaagcaatgctgtattctatactacgaatttcggtgaaaaggtgaacaagtttttatcgtctttctttcctttaccctttactacttgctgtttaactcaaaggctgcatcatacaaaattcattaaaggaatttgcatcaacatttacaggaaaaagaaaatcccacatctgaccgaaggtattgtttagaatgcatatgaagcactttcatcttaatggtttggacataatcatattccagaaagtttagattcttagtccttaattaacaattcacggtaccatattaatattccttataataaaacttcatatatacttatatagtaagatttgatgtacttagaaacatgtttagaagctgaaaggttattagtgatagctgccatttaatgatatgttacgattttaactgacagtatcttggaccaaactctcttcacgggaaacattattttgttttgagttgaattctattttacacataaagaaaaaaaaaagaactgaaacagtgggacttaaaatgagttaatatgtttagtactttaaccttactttaatgaaagaaagccctgcctcaatgaggaagagactccataatttgccccagcctttccatccagcattgtctccaaccagagaggctcagcttcttcaagttgagtctttcacacctacccataaataccatgctaatacttcagtattttgtcaactttgcccccaaacctggcataccttgtcttcttctccccagtctatgaatctgagctatcaagattctctgaactgtgatagcccccccgttagcttatttttgcttagagttcacgttgcccttgatttgtgtgatctcacttacacaaaccatagttaatcatactggattatagtgtgtacttcccttaagccttttcatgtttttagtccttaacaccacacctacccccaaacctccccagcctttgactaagtagtcaatgctgaaggaggtttagtacattcttgttgactggttgcttttatcagttttgcaaaaagttctacaagaaagaattctaagtggcccacttacccttctaatgtctatgatgtcatcagaaataaatagaaccccttggtatttgatacttgcttaatgtcttatacagttcaggctgttataacaatgtaccatagactgggtggcttagaaataacgtaaatttatttatcattgttctggagctggaagtccaagatcaggacaccagcatggtcagattctcgtgggggtcctttgaagtcctttcattattacctccctgcatggtagaaagaaggctggagagttccctgtggtctctataggaacattatctcccttgatgaggactccaccctcatgacttaattatcccccaaggccccagctcctaatgccatcacactgaagattaggattgcatatgaattttgggggcatacagtcaatctaacacactaaataaacatgatttcttaaaacaagttttgtttctgaaaaaaagtataattgctctttaaaaaaaactaatctgttctactagattagagcaagtgaactacaaatataccaacttcacacaacttgagtcacatccacacaaactaactttgcaaaaacgtgcttgaaatttattccattacaggtgatataattcctctttagtgcataaacttagaactgtggcttttgtctcctcccttaaatatattattttactctattgccattttctctgtcgaccattaattcacttgtctactacttttcaaaaagatgttctattttttattacattaattctcccaaaatttattcatttaatgaaattagtcaccatataatttctcagaagaattttctctttcagtgtactctccttcatgaggtaatggttaatagtcaccttttaagggcaaccagttattttaattgtcaatagaaaagttactctggctcaaatgggtggatttgtttaaaagtgttcttagtttacaggtcaggagctcaggtttggtcttgagaaacatatgcctgtcacagctaaaagttaacattttttaaaagtttacagctaaatgtcaacatctgaaagaaatattcaatctactccttgacttattattattgatcgtttcccttccaggaaagatctgggcttcatatgtggattcactgaattcaagactctcccctttacgagttctttctttgccttctcaggaaagcattggtaaccagggaatctagctttctgattaggctccttggaaggaattaaagtttaatgttaaacaagaggtcagaaacttaaagaagcttttaaatgcaaaggaagagctagtatcttattttgttcctctcatctaccttttacccatatgcaaagcattctcctacctacctttcgagagttcttattagggtccaacccagccagactccatagtgttcaggaattggactgcaactgtggttacggccagactggaaacagaggacccaaattggtgcctctagacatgtcgggattggtgcttagtgttgttgtggtagtataaattgaatttcatgcctgcaaatagggcaggtgctctctggtttcccatattacctacatactccaattatctgtctcctgagccagtgcctgatttaacatattttgagctattataaaacttagtttttctggcccagcaaacttaaaacagaaagaagagatgtaaaaacagccttaacacaacttcctactcttattctctactttttccatttcagaggtcccccaataagccattatcaccatcttgctattgaaaaactgagaactcacaccaaaaaactcactttgctaatgttttaattcatggtgagattgaataactcagctgttttctctaatgcagcagatataagaaacatgactagaaactgattatcttttcctccttttatatgttaatggctgttgcctaaaggtgtatttggtcttcacacaaatagaaaaacttcaatttc

SEQ ID NO: 1880533 - DNA, 4001 bp, Homo sapiens
ggcctcccaaattgctgagattacaggcgtgagccaccgcacccggaccagccttgtgtgaattcttaggaatttacatgtcacatccttagataaaaacatagacatttgtttttccttgtcaattgatgagcagtggattgatgttcaaatattcatgatctcctgtttcatgatctccttaacaaattattttggtgtcgctttttttgttgttgtttttaggttggctggttagtcggttgttcaaaaacaaaattagattgaccttttatgatgaacattgatgaacttatttcaaatcttatttaaaaatcttgtttccatttaatattgtccatcctatttcctttcccaatccttgcccctttccagtatatcttaaaacattctctctaagtaggtgtttaatcttgtcttccaacaatggaaattcacagtttgtttcttatattctgtatatattagactcaatatcagatgaatgctccaaacaacaaaacccagagggacagcctaacgttcattttcatggcaaataagattttctaatgaattcacataaaaaagaaaacaatagagtggggccagatggcataagatggaaatttatgccttatctagaaactagagataggtaagcatagacaggaggtcctgaagccacccacacctacagacatagattagacttaaggctgtgtgtgtgtgtgtgtgtgtgtgtgtgtgtgtgtgtgtgtgtgtgtgtgtacgtctgagatgagaatagggtcagggatttgggaaataatatattttgaatacctacaaagcgccaactgtcacagttaaatactcaatctccatgttcatagctactaaatctatctacctctagaaagattacatcttagttgatccagtttaatactaataccagtaaaaaggttttgtctatgtgccaactaaccacctccaatttttttttcctttctttactccaagaacaagtcttctgggcatcagagaaactcaaaaccactgtgtgaggtaagtattacatttccccccattacaaatgaggaaagaaaaacttagaggttgatcaattttcccaagctgaaaatggctagtgagtagtgaagccaaatgtttaatcagtttctgtgggactaaaaaaaccactatttctagtatttttttaactgtaaaggcaagtattcaaagaagattttttaaaagcagaaggaaaaggaaaacaatcagggtgggggaacaaaaaaacccctcaagcaccaatctctattgagggaacaaaaatgataaggcagagagagggtgttcagaaggtaagaacaattggttagagaaatttgtcttaaagtcttgagaaatacctatttctgattcctataaaagcatagtaaaatagatcaattttttatttcaacaaaattcatgcagatagctaattttaatagaagaataagaatatgctatttttcttaaaaagagtagccagggatcagtcttaatgatttaattcacttggccattataggaagagtctgtattcatacatagatctggtttgcctccatacagttttttataaatcacatttaactccagcaaattgctactattttgtatcttcagaatgagttggactggttttcacacttttcaactacttcttttagtatcagaaattcactccaacagccataagatatgttacctgcatttttgcccatctggagccctgcaagataaacttcagttttagcatttcaagtctttaagaagttttaaacgatatttcaaggattttgttattatccagatacagccatgaaaagtacttttaatcacagtccacaaacctctatgaaggctattgtgttcgagatataaagctcaaaaaattagcctccaaaatgaattaaacctacctggagtccagaaatcctccctggggttgatatcaagccctttactcaggaaatgttgccttttgttgatgtggggttgggaaatctgaggaattctcctccctagatttaatgcccccagatttaaaatgtaagtattagaagctgagccctcgaacatctcccttcatttcttgacatctttatgacaatgtatggtgcagtacctcactttgctgcaattaccgaacagacggcactgtaggcaatgtaagttgctcttaagtgcagcaatccattctgaagagatgtacaaacataaactctcaatcatggcaggcttctatgaaacctgagcattatctgtgaattttctcctttttaatcattctgttagctcacctctagaacccagtggcctaatttactaattaataactattattacttagtagaattgaaaactgaaattactgcctgccttaaacataataaaaattggcaatccattcagagttttttgaggggatgcttcattcattgcacagtcctggcagctgggtagatgtcattgtctgcttgctacatgggccttgtttccagatgggatggaagagaggcaggagattgtctctctgacttgttcagactagaaaaagaaacagaatatagtacaatctatacctgtggaatcttaatagactattgtttcagccaataattgcattatttagaaacatcccattgtcttctttatttgtgcttggtcctcctaactccagcttctctttgtaccttagcaggtgattgctaagctcaagtgactcttctttttttcagttgctaagtgaaaagtccttaaagagaaatcgatgatgtaagtttcttgtctctttatataatcaaatcagttagtaaccaggttaaatctaggataaattaagcagaaattactaccataatcatttttttcttgtatagtttcctttacagttggccaagtcacatctgcttaaagcaacagaaatgaatttatccttcaaacttttctccttttccctactgccattccaattacaagtgccaatattatgtctcattgccttaatctaggttatctttcaattgtcattacaatatgtttggatgttaataatacatatttgtttattctaaagtctagtgtgtatcttatgtcaggtaccagcagagaagctgagattacagacataaaaaagtcctattcctgctctcaaaaagctaattttctagcatgaaagtcaaagtatgaagccatatgaggagcactatgaaaaaaatatcctcaagatgcagaaggaactccaaaaaaacaaaatatccttaagcattgtttaaattttatcaagttctgaaaggttagcactacaacaaggaaaaattattgtccctcaaattttaaaatctggtccagattctcataagaccaatcatgaaggcagctctgcacatgcaggcagcaagtcatcctaagaaagcatatgcaacagttaggaaaagatgcctaaatatacaccatgcttagtgtgggtcactgctcagtcagcttagcagataactggcaaaaatatcattgtgtctttaaggtggtctcaattatttgcttcacacatctggactaaagaatcagcttttcatggctgagagtttgttaagagtttttttccccacttcttagatgtataattgtgtctcttaaggtgaatctcattcaaataatcaatccatcagctattgagagcccataatttcttagcaccctgtgatatggtttggctctgtgtccccaccgaaatctcatctcaaattgtaatccccacatgtcaggggaggaacctagtgggaggtgattggatcatggggccggtttccccaatgctgttcttgtgatggtgattagatctcatgagttctaatggttttataagtggcagtttccactcctctctcttgcctgctgccgtataagatgtgcctgctttcccttctgccatgattgtaagtttactgaggcctccctagccatgcagaactgtgagtcaattaaac

SEQ ID NO: 1880534 - DNA, 4001 bp, Homo sapiens
agtactactgaagacacagttaaagaataatagaaaagagcaggtattttcttacaatttattttttaaattctaggaaaaattacatcaatttactcttttacatgagatagtatgcattctctgaataatcaaagagatggcttcttttttttcatttgtaacaggtatttcagagtgttcctgccaatattatcaacagaagtttataatatcaatctgttctattcttgagctttgcattcactgtacaatgcatgcaaagtcacagttctttcataaatatttcatataaggtttgctgatgtatgttttaactttagagtatatattgatacatgatataatgtgtttcaacaagaaagacaaaagagcatgtgctttgctaatcctttcacagtgccttttatctgaaaattagcttatttcgtcggctgtgtatatgcttatctcataactacggttgtaaacaccagttttgtatttgccaaatatgccaatgaacaataaagtataaattaaagaaaacattattttttctgttcttatacggcacagaaacatatcttatttttaacgtactttaaaaacaaaccttgtctgccttttgaatcacaaagataattgagaattttcatttctccatctgatttctaagttttgctagtattttttgagttgcataatctgtacactaaatccaggtgctctgtgttaactaatcattaactactgaaatctgaagacccaattctctacaataaaataaatgagaagcctgagtatataaattacatatcattcatatctacagccctctacatattcataaaaatgatgtccttatgatttatttcctttcttagtgtctataattgtcccaagttctagtacaaattaattattttaatttctgttttgtcattgcagcattttattcctcttgtgcaaatataaaaaggaaagaatcttctgtgccctgagtccaaatgaaaatctcaagcaacaaaaaagcgaagtgattgggaaaataaaatcattttggactgatcccaacagcatttcagtttcattagtgttctattaatttaatactataaccagatttcaagttctgacaaagttctgtattgcagatctcagtattaggttaatgtatgaattgtactgcactacacataaaaatgatgtaaatgtgaatgtataagaatagcctgacaatttgaaaagtctttgtaatattttcagaaaatatcctagataggctataattgaattatttgatttttacaaattactttgtattatggaaacaaatggtagttttctcaagccttaacaccattgaggatatttatgtatgtctgtttaacaaatagaaaatggtttgtaattcaccccaatgattgatatgaattagattttatgaggttttcaggcattataaggaattatataattaaatatgcttgaaaattttctttattcaagttataagtaggttttatttacataatgtaaacatagtcataaagaatgatagtattattggtacacgtttaatcctcattatccctcactatatccctcattataaagtatgtactgtgattattcctattttctagatgatgaaatggaggaactgagaggttaagtaacttgcttaaggttattcagcccagtagttcagagacatgatttaatctttagtctggctccagagtctgtacctctaatcgatattatgaagtgtcagttttttgtttacacccttttaattctggtatattttgatttggtttcttgcatctatgggacttttggataatgataacttatgcttctatatttacaaaaaataaacaaacataaaacattacaagtcattgatttctattttgactgggatatataatctgttacaaagcagaatattaattggcttacctgccctcaaaggaagatttcttctgtctctgaaatttttatgttgcatctaagactgtttttctcttgataacactaggatgagaaagatgaaaatagactatagccagaaggtgttactgctgtctctgagactatctttttgcaacttgagtttttctttcagtttgttaatttgtaattcaatctctcccatttcatcttggcccttcctaatcttcacagagttcatttacttactcatgtcattagctaaccactgcagtcatgtaagtttttataaacttagataagtgtggacgcattcagggtggcatggccgtagacagtttttacaaatttaaaaggtatagagtacttcttatgaaagctaaacacctctatttcttctgaatttattaaaaagtataatagcatgaaaaagagttatacataaatgtcttaacataactatatctatatttttgtccagttattatgctaatagcagcttcatcaaattcaaaaatttttatcattgttttactggaggagaaagactttcaaacacttactgcatatgcctgtgcatacccccacacaaacacacaatgtatacctattgtttaagagattcaaaatagatatagttaaaatcaacaatattgcttagaaaaaatatctgacgtagtaatctataattaaataatgtcattttgaatatcattatttttattattactgtttttattgatcttaatgattctgttgacacggtaaagcctatctgaatgatttaaacacttattgaaggtaatactagagggaaacaactaggtgatttggataattcaccttttcattgctaacgttataaacctcgtttcataaaataactaccagtgtgagccactatgaagtacagcattcttctctcttgacttacaaacctccacaccttatttgaaactgcaattctagacctcccagatgaaatatgactggcctactgcaacacatttcatgaactggaactcaagttacaaatttgcccaggcatgtttttttgttttttttttgactggggagaaactagttttattagattttctatcctgctttcctcccctctatttctttctgtgatacaaatgtaaacttgggaaaagttgttataacttaattagcagactcctctgtatctttcagtatatgtaaagactgtaaattttcttctttggtaaagtttattcagttttgattagaaccacaattaagaagtaagctaatggtggaaatgcaaatgttgattaacttgttttgaaaacatctcattatagttggacatgataaattttaatgcatgattaaaaatcataagcctcaaccaagaacatatttttaaataagtgaagacatgtacaaaaaaaagaaaaaaaaaacttttgagaccaaactgttctttaatgaactgctactcttcaagtgcacaaagctatatctttgattatctaaattctacatattctttattttttacacattagaatttctctttctcttttctgggaaatgtacttttcatctatatttttaaagccacaccttgttctatttcacatatgactgaacactgaaatctctttttaattagctgcttagctgcatctttaccctccattccatacttggctcaatttaccaatttaccagactatttttcctgacatactcatgtgagagtctgttaactggtctgataaagacaccctttttctcttctcaaattctcaacaaattaaaaaataagacaaaaacataaagcaaattggatgacaaaatatcaatataccaataaagacaatgttgaggaatctaattaaatatgactgatacccaaacccaagaatttggcaaacttatcaacctaaagcagaggaagttctaaactggcccagaccccagggaagtggcttcatccaggaggaccagggggaagttaaaggcaggcttattaatgtgggcgggaaacttaaatattatttttcagtttaccaatcagttaaactctg

SEQ ID NO: 1880535 - DNA, 4001 bp, Homo sapiens
acttagacgggaacagaaaatcaaacactgcatattttcactcgtaagtgggagttgaataatgagaacatatgggcacagggacgagaacatcacacactggggcctgtctaggggtgggaggcaaggggagggatattaggagaaatacctaatgtagatgacgggttgatgggtgcagcaaaccaccatggcacatgtatacctatgtaacaaacctgcatgttctgcacaagtatcccagaacttaaatatactaaaaaaaaagaagaaaaaaagaaaacatttctgaataaatattctaaaaatatcatggcagaacatttttgtacaaaataatggcctctattatggatcgtgaatggtattatatcatgagctaaataaatagtgaatatttcaaattgatcatgactcaagtgcagtgatgtatggccagaaccaggaaatgctttttagcttgaaattgagtgactccctattaaataagcctaaatttcctgccacacattatatttggctagccaaaatacaagtgtgaatactgcttatgttttgcttggcttacttttaatctattaattaaacattgtctaatctgtgaaacataggatgcttttggcagctgtgccccacaggatttaattcctaaaatgactaaattccaatcactagtcatctgattaattgtgttttaaactaatcagatgttctgtagatttttctggtttctaccctatttccaggaacagaaattttaatgcagatttttatgtatggatacagaaatgagaaacctaatctctgtagcagctgatccagtaggttggcgggggggagaagaaaaacaaaacctcaaatttttgaatgttacaactggatttattttaaatacctggtgtctttcagctttgattaatcccacatgtgcttactgtctgtggccacatgaattctgaacaattatggcctttttaaatattttaactctactccatttgatatgacatctgacctaagggtcctgatgacgtctattaaatattagtaaatcttaatttctttattcgtttttgaaataatgaatactaattataaatagtatatatatactatttcaatatatattaaaataaatataaatagaattatatatttatattttatataatataaatgttttatttatattatttattttatataaatataaatagaagtttattttttattctaattattcctctattgattttgttaacaaggactcaagaaccacacaacagacagcagtgacttaagaaaaggaaactatattatttgcataaaatgaaactataataataaaaataactgtaagtgatgtcatccattaaaaactcatatttaccattaaatttattagtaccagaaactgtgctaagcccataatgtatgttgacatgcctataaggagcctatactttttaataaatagtttttgattgtagaaatgtagttttgctatttttcagctattttgacaacaatatcagcacattgacaaattagtaacttgaaacaaatattaagttgacctaaattctggagttggacatgataatacataaaagaaatgatctacaaaatatgaaataaagttttagcatataaaaagatttatatttagataacttgtaaaaaaagaaagagctttatactacctaaaagtaaattctcatggattaaataaaaatatattaatagaaactaaaaacattcaaatacaattgtcttcttgctttcagttcattgtaatctgaatcaagtggagaggaatttggcaaaatagctcttacttacatgccataaattagaaagataagcaaaaaaatttaagttttgatatttacctgatgtcatgactacttctggggtttcagttgggcttcccagatatatttgggttagaaggtagaagccaagagaattggttcatggatggccaaaagtatctaagctaaaggtgaagatcaaaaagtcttataaatattgaaggcagctaatatttataagcaagggaatgattttctataatctgagtcataattactgagaccaagccacaggagactgactaatgctgaactcaatacctctcttctagctatcactctctgctccaacttcttaacctcccaactgttgtcacttaagaatcttgcctttagggagaagtagggttaggctgacctcgaagagcttctttccttttttttttttttttaacttttattttaagttcaggggtacaagtgcaggtttgttacataggtacacttgtctcatgggggtttgttgtacagattatatcatcaccgaggtattaaacacagtacccattaattatctttcgtggtcctccacatccttcctccctccaccttccaacaggccccagtatgtgtttttcctctctatgtgtccatgtgttctcatcatttagcttccatttataagtgagaacatgtggtcattggttttctgttcctgtgttagtttgttaaagataatagtctccctgcaaaggacatgatctcattctttttatggctgcatagtattccatggtgtatatgtaccacattttcttcattttttttttttttttcaggattctgcccttaaaagtcctggtttcttcagtattctttgatgcattcaaacaaaaattcgcttatttgtttgtctgattgtattttgtccagatttcattgttgcttgtctgtttataaaagagatggtttgcacaaggcgaatttactgttatcagaaaccaaaattcctctaccagatttaaaaaatgatctctccatgaattcagatgagattgggcatattcagggtggtatggccatagacagctctcaatgaattcagaattattcagagaatagctgtgtcattttaagggccctcaaatatttaaaaatgggaatgagaatcacatagaatgagctaaagaaaaaggtgaagaaaaaatataaacagaaatgggccagatggaacagttagcccactgtgaaaaacaaggttcctgcaatctcaatgacagattaagagtagtgcatggtagaatcagttgtacacacttttaactaaacatcacagtctaaaatacctgtcatatgacagctttccacgctaatttttaaaaatatactgtctatatgaataagattaattctatgtataaaatttgacttagaatatttcgcttttaattttaattggattttcaaaccacacttctcatagctttcatactattgactcaaaaatgtagtagaaatcatgttctataagagtcgctggacgtttgttgttgttgttcctgttgaaaatggagaaaaaagcaatccttggttggcacattacagagtcctaatttttaatatgtctttaagtccaagattcttctcttttatgatttgttaatctcataaacaactaaaaaaattagagtcataacgaacttgtatttcccaaaatctatcctacactttgactgatctttctggtattcccaaagatattttatgaacctctgctgcatcttctaggaattcttgaccaaggtgaatcttaaggaagctgtcacaaatttgagtggctgttccacatataagatatgcaaatcaaagcattaccagaatgtattaaatgctccactgcaaagcttcatgaatcaaacataggctaagtcacattgaattctaatttataatgttgtggtttatttactgtctaagaaaacccaaagaatttttacaggcatttaatttatgtaatctcgaaaatgtaagtctaagaaaaagtgtgttattttccaaataaataccaatttggaggagaaagaaaaagctcccagacaaatgatttatttaccaaaggccaactagtgtgttaatgttgagaagcaaacaacatcttgatctgtttcctgtgctatgttcacttga

SEQ ID NO: 1880536 - DNA, 4001 bp, Homo sapiens
tcggccagctactctggatggactcaattcaaatttctggccataaatttcaaacaggcatttgaactgttggacaatcctactacagttacttagaaaattccttttccctctccgcagtgcaataatgtcacactttctcctctctctgcatattctcaactccccttcctctttcattctcactgtaacctcagactatccttcatagagaaagtaggtacgatctgttgccggatcttcctacctccctccaaagccaccagaatgcctatagctctgcattctctccacccaccacccatggccgagccctccatctgtgccctgggccccatccccttttgccagcacaattatcccctttctgttgtgttcatcaatttcttccttcctaccagagcctttccatggaagttaaatgggacttaaaaagctctaaagccttagcctcatatccccttcttgctattataccatgtttctgcccctctttagagtgactgttcctgaaagagttgtctacacactgacatctccacctccacacttctcattctcacttccacccactccaactgggcttttagccctagttgtctgttttaatagctcttatcaaggatgccaatgactgacatcttaaggtcacattggtggccagttcaccatcctctattcatctggcctgtcagtggcactgaatgcgtttgaccactctctctgtggaagactgaattatgggtcctatttcttgtcctgcctcactctatccctatccccttcaatccgactctgcagtccctcccgctagatgtagactatactgtactttcttgccccttgactttgggcgtggctgcatgaccccttttggccaatggaatgtaggaggaggtgacatggtgccagttccaaatctaggtctttagaggcattttatgtttccacctgcttttttgtgcctattatcaccatgggagaaaaatgtgccctagctggcctgcaggtacaaaaagagtgagggacatgtatgcagagcaggctcagcccaacggtggcttagagctgcccagccaacatcagcctcatctagccaacctccagctgactcacagctttgtgaatcaaataaatatttactgttatgccattgagatttttgtggttgtttgttacctagcaatagcagactgatacatcctctttctcaaaatacttcctttgctgagttccttgtaatcaccatcttctggttttcctccagtgtcatgggctgtcttcctcagtctgctctgctgggttttcccctaccagatctctaaaggttggagtggcatcagtctcagccatctgctaccttctttcttgactctctccctaagtggaattattctggcctactgctttgaagactacctacatgctggttctcaaatttaaatctgaactccagactcaaagctgtctacacatatttacctgatgtctgataggtcttggcatggcccaaacacaattatggatccacctcctacccccaacataggactacccagttagtcctgggtcagatcatcagtaagccttatctattcccacctccaaaactgacccagaaaccagtatcacatctcaccatctccatagccacaactgtggtttttaaaatctcctcctgccaggacttttgcaatagtatcttaactgttttcttcactccccaccttctaaccctccaaaggcttcccactgcaacaaaataaaacccacacttcttaccttgatccatgaggactcagctacctatgttcccaaggcccctctattcttcttgctcacattgctccaaccacgttggccttcacggtgtttcttaagcataaggagcacatttctgcctcagggcttttgtttttacttgcctttctgcttgcagcactcttccccagatcaccacatggctgcctccttcccacccagaaggtctcgaatgccacctcctcaaagagaccttccctggctaaataaaacagcacccatcaacctaccacacacacggatgcacccacatgcacacacacacacccctctaccacaatactctagtttagcttcctttttttgttatttttaattttcttttgcagaggcaaaagaagacacttgctgcccaggctggttttgagctcctggcctcaagtgatcctcttgccttggcctcccaaagtcctgggattataggcgtgagccatgagtctactctgtttctcccattaaaatataaaatccttaagaacaggtatttgtctcagtctctgatgtattaccagggcctagaacatgtcttgtacatagtggactttcaataaatgcttgttgattgactgactgatgctagaactgaatagagaagggatacaattggctagattgtgaacatgggaatgaatgtcccaggaaggcaactgcagaaaggctggagaattcaagatacagtatatccaaggggttatgaggggccaggctggctacaggagagaattcatggggaatgagggaagaaacttctgcatggtggaaagacttaaatgccatcactcccagtcattggagatcgtgggtgcccctgagggttacagatcaaggacgtgatatgttgaaagcacaggttttaggatgattagtagggttgaaaggtatgcatttctgagtgtccttaactatgtgtcttcccttgggatcccagaattttagaagacaaagacatctagaagaatctgagagcccaggggagccagagagattggtccccttggattccagatgcaagaagaagccattacccaacctttcagggaccgatactgagttcccggttcaggaagttctccctgtgtaattaaggatttgccaagcgcacagccggcattcatacacacgtgttaacgagctggtgccccagtgtccctgggctcccttataccctcccccgacacacacacacacacacacacacacacacacacacacacacacacacacacagttgctttcatgtacccagtggctgaacacaagcttccccatacccccaccccacggatgcatctctaacccagctacttgccttcccagccccctccacccaattctattgtcagggctgaacaaaaggcccaaggcatcctgggttaaaggatttttaactctgccaatcccaggaggctccaacatgaagcagcttcctgctggagaaaagtgactgagacatctccccaggcgacaggggaattttttttttttttaatctggtctgaaaaacagaacctagccgccaatcagacactcctccccccaggaccccaccccggagacctcccagcagtcaaatgggccttgaggtctctttcctgatgacttctatttgcaggcgtcaggcttgttgcttcccacgtcccccccgacccccatcagaccggactctggctctcctctcctcccgcacctcccccaccccgccctgtgcccggtggctgcccccggcgcacggacagtgccccctccgcctctctgctccccgggagtgccggcagtgcccgggcaaggccagaagcccaggctaggccccctccgtgggcgcgccaggttctgtgccgcgtcgtccttcccctccttgggcaccggctctgaacctgcccggccagaaaccgaacccgttttcaggaggagcgcctgcgggcgtgctggctccacgcgcggctctcggggcggccgggttcgggcgtgtgcgtttccaggcgcctctgtccccagcgggaggagcggctgtggagggggcctgctggcggctcaccccaggcccggagggttcgggaactaaacctgcatctggtgtcaaaacccctttttgcccaccctggcactgacgttaagcatgcatcttttttccctgaagttttttttccgtagaagacatactgggtaaattagaaacatgt

SEQ ID NO: 1880537 - DNA, 4001 bp, Homo sapiens
ttataaacttgaataaatatattaaagtaattttcaaacattcctctaatcatgatcagttgtctttaacaacatttctcaaacttgttatgttattccaaacgctgggtggactcatgaaaatttgtaagagtcacatctgttatttttccactctaaaaggaaaaagaaatattgcggacctataatgttgacgttagtcacttttattttaaacttaaatgtgtacaaatataaaatatgtataaacctcttatgcttacagcttttataaactacaaaaccaaaagacatacaaattaagttaaaaactagaaaaaatcaataacatttgaattaatgctattaatatgaggatactttgtttttcagaagccaaatcaccaatgttgagaccattattggtggaaagacacatttgcacctttctgtgcttgtgtttgacttgattcttttgattttttgcatctctggcctagcatgtgcctccttggaattatcagtcatcatttttccttcttaacaaaaagcttatttttatctactgattcattggtttgataagccaattcatttaatagtgtaacctgaaatacaatactgaaggataaaacatatcattgaatgtgccttgggatgagtggattctaccaccacttttctatttgcaaactattgcagagcttttgttcttagaataagccaggatatcttttatgcattatttagcatgaatgcataattttctttttaaatccatctcttttattttctctttagcctgtggtaatttacatatacattacttaaccccacttgatcattttcatgatgcaagttaatactgtaagagaaaaggtttttttaattgctaagcgaagtgtgcgtaagtggcagatggggactggtgttattatcatattgaacatcaaggccctgacagcctaagggcagccaggtgtgttcgccgtccctttaaaagctcacctctgatcactttgcaccaagtgccctataaatacaaacatgggacccgaagtcatatggcaagattcagtcataaatgtcatccatctcatctaaaatattattatattgtttcatgtgctttgatcatcgaagtgaagacacaaaatttaaaaattcttgcagagcttgagcttatgtatgcaaatttctagtagaccaaggatgccagtttgagaatcactggtctatagcatattgggcaaatacctggtaaccaagaagtggttcctttgtttttctcagaaaagattggtgacatttccaggacgtctgctgacttctgtctgttcctcagccttgatctgctctctttacaggcagtaaactaatgccttctttgtttctacgtgaaaggactttataaagaactgtttagaccgggagaaggtataaagcctaaccacgcttcaattaagtgaacagaagaatttaaatattttcacatcaaatgagaattaccttttaactttctctcttccactgcactgtaagctccttgaaaagggactttctcttactccccattggattcccagcgtgtggtaccatgactggcacacaataggcacgcagaaaatgttcactgaaagaatgactcaatatcaacataagaaagtacttactggtgtgatgtacatcagacgacatgttccagtgtctggttcctgaaagcatatgacccatagcttgtcattgtgatgaattagctggcctggtagaaaattggtctcagcctgcctctcatatgttcttacctgaaaaatcagaccagttgccttcacagactgctagtttttatctggaaagtgatgaaaagtttcccatttggcatacctcctctggtgcctttgtcctttctttttctcatcctatcatccttgtgactcaagaagcgatgatgtttttcttattcacaggaaacttccaagccgcagaccagggcctgatatctaccatcactcaactccttctgtgtagctccagttaaggaaggaggggagagtgctcagcctgtttgttttttgtcttgttctgtttgcctggattcactgtgttgatagacaaaagagataagctgcatatttgtgggagatagcttttgattcttcaagatcaaagcatggtgttactgacccttataagagtagttctttggttaagttattattcatttttcttcaagataactttcctctgatttagcttttatcagccaacatttacatctcttatcagaaaaaccattcaccagataatgggcctgggtttccatcacgtgtttcagatgtatgattccaaaacttgagggaaaatgttctgcctggttcaagccttcactgaaataaccttaagcagagagaggctggccttctgagcaactcctttacgtacatgcctaccactaatttctaatagtctttaaaaaaaaaatagtagttagctgctggcaataaagtacagaaaggaaagtttggcaaatactaaagattagctgcttcatctatcatataaaatggatctagccagaagaaaccaaggactgaactctgtttgtcatacctcataagctgtgtggctaagggcaaatccattgacttttctatgcattagggaatttttcatgtgaacatgaaaccttgccttccacctcagtgccttcaagtcagcaagcaatcttaagaaaaatatttcaaatttgggaatataaaaatcagtgcaacttggccaggcatggtggcttacgcctataatcccagcatttgagaggccaaggcaggcagctcacatgaggccaggagtttgagaccagcatggcgaacatggcaaaaccccatctccaccaaaagtacaaaaattagctgggcgtggtgacacatgcctataatcccagctactcaaatgtctgaggcaggagaatcatttgaacccaggaggcagaggttgcagtgagccaagatcatgccacagcactctggcctggacgacagagtaaggccctgtctcaaaacaaacaaacaaaaaaatcagtggaactttgtgaaaatatcaagtagaaaaacaagttgcttgtagataagaactaaatctaaataaatacttgtatcagtgattggtattttactttatggtataggaatcagaatatattgtccatagcactcagaataaaattgcatatttgcattatcctgtatattccaatgaaatagaatgattttagtaccataatttgtgtttttatatttttcttcatcttataaaagttaatatggtgtgctttgaaatagcatgatgtaaataagggaagaaagcaactaggaaaaaaattattaaaattgtattcatataacaaattgaaaatagtgacatgatgatgactcatcaaacaaaaaagaaaaaagctggtatcacatttacctataacaaaataatggtagaaataactcaccttgtgtttgatatgtatatgtatatatacatttgcacaggtatgcacacaatctatttcaccaactgttgtagcaaagtatttcagttttttctttatttaaaaaaggcatatgcttttacactgaatatatacatatgcttttacactgaatatataatgcatagatactatctgcttccaattaggaatgagctcatcacatgcaacttaaaggtatggcctcaggaaaatagatgactctcccaacacaatccctttttggaacagcagggcatcagcgtaagactatatcgctaaaattcaggcccacagtcagctttaactcaaagcagacactgattttattggttgaatagtatactatttatagtacttgggcagcaaaatgatgaagccagtgaaagaatctttctccccacaacattagaactgggaggtgttgatgcttacaagatccccccccttgaaggcaaagaccatgtctctcttggatgtgtattcctagggtattacacagtag

SEQ ID NO: 1880538 - DNA, 4001 bp, Homo sapiens
ttattgaaacaattgtggattccattttggatcagcacagatatggagaaaagtggcttcaagcttcccttccccaggaagtctcagctgaggagcctgagggaggacttgcatgaaaggaacagatccctctgaatgaaggcacccagccaggagtgcacatagctctggaagagcacgggctgcggggaggtgggctgagtccttgactgtggcccccaggacctgtcatgcactggctgtgcacaagtcaggtgtggggagtgtagcttgcccccgtgaggcccaccaggcagtctttatgattgaccatggtttggcatgaaagatcacacataggtgtttggccaggagtgagactcttcagtcatagctaagcgttcaattgagttttgctctaggatttctaaagtaccttaaaatgaagaaactttggcattttaactctaatgcaattgtgcagtaggtttttgagggaggaaaggggcagttggtaacaggggtactttaaaacccattttaagccaggtgtggtggctcacgcctgtaatcccagcactttgggaggctgaggcaggtggatcacttgaggccaggagtttgagaccagcctggccaacatggtgaaaccccatctctaccaaaaaatacaaaaattagccgggtgtggtggcatgcgccaatagtgccagctactcgggaggctgaggtgggagaatcgctggaacccaggaggcagaggctgcagtaagtcgagattgtgccactgcactccagcctgggtaacagtcagatcctgtctcaaaaaaaaaaaaaaaaaatccatttcaatgcagttattttaagtaaaaatattgcttcaagaattagaccctcaatgctcaattatcctttatataaagagttgtatgccactgatttcttcataagtgtctttttaaaataatcttgaataagttctgagacatgtatatacacatcaaatcctttatgaggtaaaataaaataacatggtgatgaacaagtgagagtgagtacccagtaccctgcggtacccagtgcccttttcatttcagatgaaactgtagaaaatactttctggggttttttctgtgtggcggtcattctctagtgaaattgtctgtggcaggttttggtcggtggtgttgatttagcctgtatctgttggagtatactttttaccattttgacaagagagaagtgacaagtggttaccccacgtggcgtgggtgtgctgagatgggatggcgggcagccctgccggcacggatcgcccgcttgctgagctcttgccatacctggtgtcctggggcagtgcagagctgcctgaagtatatgccatctggccctgcatcagctactgttggtatcgtggaggagacaaagtcctcaagtctaacgggagacctggagtgctgctcgtacagtgccaggaggagagctgaggaagggggccctgaggacagtagcactctgaggaggaggtggtggggaaaaaagaggccatgaaaggagagggtgggagtacagatggagaaaatggcgagaaaggaggaaggaaagttcaggaaatgtgcagggagtgaagccaggcgggccagggcattgctggggagggacgaggtccctgcggaaaccagctgggaaggaggctgaggtggatttgtggagggtctgaaattcatggtgatgttcctgcactgccaaaggggaatcagcctttttttctcctttgagagaacagatgagggttgaaattagaactgtgtttttaaactatattttagcaacctttaaaatatatgtatatatatattaagtagagtcatagtgcataatataacaacaaaatcggagccttaactctcaccttcttctgggcctcaggaaccccgagctcatgggaaaagtcttgaggatctccccatcaggaaggtcacggagggactgcaggagcagggagttgctagaaggaagagacctgccaggcagctattgtacatggaggggatgggacccagtgcagggaacagaaaggaagtaggtgtgagaaacgttgccactctcacctggaccaagtgcgatagctgattggctgcaggagagctgggggcgggtattcggtatgagatccacaggctgctgggaatgcaaagagccaggaagacaggaagaaaagttgatgggaggaggaggagacaccagaggggtcggctcgggtttcaggtgttcggggccacctcatatgagatgcttgaaataattggactgtgactcaggcgacgggtcagcctgctgacagatttgggaggctgctgcgtggaaggggaatttgaaacgtgggctggatcagcacggaggattgggcagggagaaggccaaggctcaagtggagaaacagccatcaagtttaaagtaggaaggagggaagagccagcaaagggggtggtgagcggtgataggaagacagcaagccaggcacagcggtcagggacgtcagtgatgaccaagaagcggcctccaggagaggcgaatgttacaggtgcctttccccgtgaggtctggaagaaatactggcttgtaacctcgcaggccactgtaccccttgagtctcaatttctttgagtcaaattggggtcattttctgccctaccagccccatctgcccttgtgtgacgatcaagtaagataagtgtaaaaccaccggccatctgctccattccagctgtaataggaactagactgtggacagtgttgatgtgaggcctccagggaagaggattaaagtatatcggagctcttgttcctttgttcaggcttgacacagtctcctttgtcaccaggtttgttaaccacaggagcactgagcttctcagacatcccacacctttgtgggaaatacctgttgggaagtatttttgacacacactgtgtgcatacattgggaagagctctctagtggctatttttttttaataggcatttgacaagattattgccttaaggcgacagtgagagctaatgcttctgtagctcctattctgttccagatactgttctaaatacaagtaacgcattcgatcctctcagccaaccctatgaggtagatattgagaaaattagtgctcagagaggttcaataacttgcccaaagtcctagagctagtgagtgcccaagccaggttggaacctagaatcccggctccagagccagtgctctgaaccactgtggaagaataccaggcgggctatgacggcatgcaagccaggcacacagcctgtgctaaaaccgtctgtgaaaggagagaagactgcattggtacagtcagaagacttgatgggagaggtggatgtcagccagatcctaatggatgggtgttgattagtaagcactatactatgctctccaaccaagctagaaccctcatcttattcaggaaggcgatgtcataaccactccatcaagctgggatcattatgaggacagtcagtgggccatacgattggaggaaagcattccgggcaatgtgatgggaagagctatgagagcccagggatgaagtcaaggtgactgtgccacctgtttgcccagtgtggccccaccatcccgccatcccagtgtgactactagatagttcccccttttactctcaagtgtcccagtttgaatgacaaatcatgagtttgaggaagtctgccaaacattgaaatcatttgcagagtgtcacagatgtgtgcgttgtttctgggcataggtcccttgttcagaacatgccctaagggggccatccccatggcgtaaggagtttggtttttgttttttgtttttttaaggaaaatgagcctagcctttgtgtgcagcacagaatccagtgggggaagtgcagcaggtgttggtaggaggctccggagataaggcctgtaccaggtgggaggggaaggcgggcccccaagactgcagaggtattggtggtgatgtt

SEQ ID NO: 1880539 - DNA, 4001 bp, Homo sapiens
ttacttttgattttctgacaaatgactttaataataatataaataaacaggttaacatttctaaagtgccacacacaatgtgaagcacatgtattttctcatgcaattattaattcaatctaagtcacacaggtccacttagaatggactgtaataacactctttattatccacaacatattttagttgaaacaaaatgttccagtcacacaatatcatcaccgtagtagatcattatagctttaacagatgacatcatgggaacacagttgctttatattgaaatgagtaaaaagaagcaatttgatgatatttcacaaattttctaatcacagcctcagccatgtatattacacgtttttgctccattgtaatgtaaattgatttgtggaggattcacttactgtcttatcctagttgctttgtttttgagttctctattgaatattgtagactttacatatgatgctagattatttctgatgtagtcagttggtaggtaagggttttcccacatgaactcaagtttttccagtaagtagatcatttgagaatggctccaaataaaagtggtgctttcacattttgctggtacacaaacatatggccctgaggaagacggattcattttggggtgctaagcactgctcaagatgtaagtgctttttatttcccatttgaactggtgcatgcaccttacagatggaccagttgctttacatactggtggcccatttacaaagcagccctgtttgaaaacagatgctttcaagtgggtcaccaggctctaagaaaaatatttaaacccttaattattggcttttggtcgtctatggcaatgtgttctcatttaaacatagagcaggggatttttcttctataaccaattacagtttaaaaaatgcaacgaatcttgcttcacacaaggagcttaacttgtggttggagaaattttccaacttattaaatgttgtttatatcctcatttttgtcttcccaaagcattttataactccctctgtaactgacttatcaattttctttctgacctttcatattaaatttaaccacacccccacccccaaacccagagcctccaagcaactagcctagagcaaaaatatacaatttactctctccatatctccaccgacgtctttcgtttttcttgtactctaatctaatcggtaattcgtaagctttggccaaatagttaaaaatgttaagtgctagcaaagccttttacctccccctcagatctgtctctgtttatggaatgggtcccagtttcctcctcttctccttcagcctggggtcttcaggtcagaacacagtaaatacacacagcccttgctggacccataaatctgagcaaagggcaggcctatatattcagataagcaggggcagagataggggcttgaaaggagggagaactagcggagtctgaggctctgcagccctgttcagagaactgaactcaaaagaccaagaatccttagtgcagaaggaggaattttgccttgaaacatctccccttatttctaatggatgagattggcactgcttcctcttcgtttattttattttttccacgttgcttatattcacatccttaccaaatgtattatcttaaaggcaatcaagttaaacaataaatttaatttatttccaatgtctttttttcttaagtgtgtttgtgttttgacctgtgtgtgtgtgtgtatatcagtgatatgaactgaagtcattttactagaaagtcttctctactgtaatttttcagtcccaaagtttttgactgtataactgtattcttactgaccacattgaatccccaagaaaaatacctctaaaggaggaatgacaaagtgacaaataaatgcttacatatccttcagtcttccaggcttctattttattcctgggttcaaatattttctgttggattttcacttcttgaaattttcagtgactcctggaagaccacccttcttgggggatgtacccattgtgaccacagataatgtcaccatggaaaatcctgggcaagatgaccatggctgagaaggtcctttctatcacacttgacagaatcactgcctgattcttctttagatgcaatgagtcacaccacagattcgtctgggtcatttcagactccaggaaaatgtgtcactcgatttgtttccgagcaatgttttgtattttattgtatacatgtatatctaattgtaatctgatttctctaggttattctttttggctaatagagaatagatttttaaaaaatgctaattcatgttcctcaaaaggggcttctttttttcttttcctcggttgaaaagttagtgataattccaggtaattaagaacattttatggaaaaaaattgccaagaaagtaattgggctgggagcccagtgtgttacacctacactagagcctcatttttgacaaatctctgaaatgataacaataatgataataatcattatgtatcgtttatcaagcacttacttttggtaagcaatgtactaggaacttaagatatatattaatttttgtctttacaagtggtaagtgatgtactactctatagtctcaatcttataaatgaaaaaaaccctccgatttgaaaagtaaagaaacttaatccagaacacacatggaagcccagaatttgaaagtggttttggctgcagagggctgtcttctgagctgcctctccatagcctcaggttctgcatcttcaggatgagtgtcttgggtgggagggtgtctatgtagtggtgatcttccatggccagttgattttctcccgcccctactctcctgagcctagccttggcattttcaatagctctctggcatctgggcctgtctctcaaagaccttctggaccacatgtctgaaacggaactcactgattctctagctgccatgtctctactctgtgatccatgtgatgtttaatgggagggagtaccctcgattctgtagtccgaacttaaggctctctaactacctaccttttttcacctgtcatgattattatccaacctggcagagaagtgacctgtgcaggaggcattacagtctgaccacctgggtttgaaccctgacttccctgtttaccagctgtgcagtgctggacaagttactttactcctctgcgccttgattttttttcatctgtaaaatggagtctaaaatattatttattttataaggttgtctagttcagattgttggtaatgtttgacagaactattaaaatagccttcaggctgctgtttctgcagtgaggctcctccttccataatccagcccctctggattacagaataaaataaataataaacatgataatttcctgcttaaaaatctttaagactccctattgccctcaggtcgaactattgaatcaggaaaaggctttcattattttcctccaactgccctttccagagtcattttccaccatgaccctctaagcaatttccactctagcagcaaaaaattatacatatgatgttcttttatttctccagacttttgactgtgctgtgctctctctatcaggaatgcccttcctttcaatttccatgtagcaaaagtacatttatcttgcatggctcagttcaaaagacactttttttttaaaggcagcataaattgagacagtcacttctagaatgcattcctctgttttagaacctagtatgttgataacaatcatatgcatggtaattatttgtctaccactaggctgtggactgctgtggggagggactatgtttttttaaacttaatatcttttgttctagggcctcacatgtagtgggagcctcccaaatttagattaatatataaaatatctttcctcactcctaaaaatgacttagagcaaatgtgaatcaaatgactgtaatgttgttaactagttgaattaactcctgttagcttaagataataaaggcagtgaacttgtaacaaaa

SEQ ID NO: 1880540 - DNA, 4001 bp, Homo sapiens
tgtactatacatttttggggcctatatgttaatattttttaacagacatttccacaagtgctgcattttaacatctgaatgcatcatgtatatattattagaagagggaaagaagagacaattgtgattattaggtcaataaccagaacacttaggaagattaatatagcaagcagttttttgtaagtacattggcttttattacctacaggaaagaatatattttctaatttcattattatgcaatttaaaaaattttagaagaagcaatatataaatatttgattatatcttattaaattccataagaaaaagaagccatcaaaacatgaccctaattgtctctttctgagtgtgaaaaacattctttatgaaaatgcttggaagtgtaatttatcaatttaatcacatacatttatgtatatctcctgagtgtatgtgaaattgagtctaaatgaacattttatgatgttaaacgcatttttccaaagatctacatttattcaaagatcatgtaaaaggctgttaatttggataaatactattctgtccattgctaagtatttataaaattctgagtttaacttaaagacatcaaacatattggtacatttaaattgcaccagtattcgtttctaaaaatctttaataaaaaatgtaaaggttttgaattatattttgtctcctttctcttacaaatggaaaattaaactggaatatattgttatgtatgaaatttattaactatgatgaggttatatactatataactttctgcctctcaaatattattgtaatatattttatatagtgtgtaatattgaatcttagtgtagtaatatattttgacatttatagatttatatatttttaaatctattcataaacataggatatgtttttcatgtctttttgtgatttttagtttgaaaaacataaacattttaagcgataacattcatagaaggcaaatacttctctgtggagtctttacaaaaaggaataaaacctcaaactagaattcatttaacttcattttaatagatatgttacgttttatttttgttgccgacatctgaagtaaataatttctgaatccaggtagttgtttttgcacagcagaataaaatatcttttttactattttactattttcatttgtattcaaatattgatatgaagtaaccaaagaacaaaacagactttactaatacattcttcagttgcgggcaatcggtggtgagagtcaaaaagaagaaaagtccaaacaaaggtttttcatttcttgctgtttacaaatatgtaaaaacaagaattcatagtgtccatatatttcctagcctttagtgtcacattttgttcagcaaaggtttcttaccttttttcattgatgccttattgagaatcctgaaatactgctgctcagttctttcctcttcatctgcttgcattgtgcatatcagtctgtagggggcactcctcagctaccacaaagacttgtgataagtcctttctgtggtctgaaatgtatttaatactcattattttatcaaggcacttagtttaaagagaattcatagtttatctttaaagcatatatagccataattgaggaaaaaaaccctcagtttcaagatgggcatttggatttccgaggatgttaataaaaatttacaaaactgcattgaactttggtaaattagtacttttcagagcttccttctttctattcttttcttggagctcagggtggattttataatacccagacttttattactatacctcgagtcttgttgtctctttgccttgagggctcccagagagcagaatgtagagtgatcatgatttacatgtgggaagaggaaccacagagtttttacatagaattacatgccctacactggagcttataaacagcttatctttaacgggagtgaaatattgaatttaagattgtgtgtggccttctctactccctttcctccctttctcctcccatctccaacagaatctacttgggtggcaattctaagaaccccttccataataatgacgtggtcctctcacatggctgtatcttccaggttcacatcagctgtgggtgcagctgctttggcttattatagatttccatagttacctctcagagagaccagcagcattaactggtccaacacgttgggggttgactttccacattcagcctcttacttgcctccgtgccagtgcttctgcgtcctgctgttaccatggttgtactctactcaccctctttgagaccagcccctcctcttgatcagagagcccctcactcctctggagcctgacactggatgccacttcagcagttgcttcgtccttttccttatcatcaaacgttccctttctctgctgtaatttctcctatctctcttcaccccacttctcctgcagcctctccatttctcaattcattttattttttatttaattttattttttttgagactggctctcactatgttgtctgggttggtcttgaactcctgggctcaagggatcctcccacctcagtctcccgagtagctgggactacaggcatgccccaccgcacctggccatttttcagtccattttagagcagaacctctcaaagggctgtctgtatctgatgtcctaggctttccacccctccttctttcctttcctgctccactgatgctctgttcctaaaatcaaggacctccatgatgctaaacctaatggtcagtcctcagccctcatcttttactttattttttttattgctgcctcctatacagtgactcagccctcatcttgattgacatagaagcagcattttatttttccccataggggatcactcactcctctttaaatgatttctttcacatggctctggttgtcttcctccctcaccagcagctcttattccactcctttgctagctgtgtctcatcttcttttaaaaagcttaaaaaatatatatttttttaaatgaagatgggatcttgctgtgttgcctaggctggtctggaactcctggactcaagcaatcctcccagcttggcctcccaaggtattgggattacaggtgtgagccaccacacccagcctgtatctcatcttcttgaacccagggaagctcaggtgtctctctctacactcgctttctaggttaatctcatctctcaggctttacatactgtctatattctgaaaaatcccaattttttctttccagccaggactacttccctcaactcctggcatgtgtatttaacttctttttcactggacattgctgtttggatgtccaacgggcttctcaaactgatctccatcctaatctcacaaaacaggccacttcttaacagtccttcctgtcttagaaaagggaattttctcaggataaaacctcagttttaagacagtaatccaagccgctgtcatcatttcctgtgtccatttctcctcactccaatacaccgacatcaaatccatagaggttaaatatcagttcatttcagtccctttctcaaaacccaccagtggctctctacggaacagagtgacggccacagtgctgttaatgacaccagggctctactggatctgacctctgagatgcctcttggcttcttcccttactctgctccctggctcacttcacgccagccacatgtcccactttgcacttgcttgataatccaggaaaatccctgcctccaagggatttgttattttctcttcctagagtgctcctttccctgataccttcatgactcacttcctcacttgcataatatctttccccaaagtcatctatgtactgcgtaggtgtctctgaccactcttaaaaatagcagccctcagctgggcgcggtggctcacacctgtaatcccagtactttgggaggccgaggcaggtggattgcctgaggtcaggagttcaagaccagcctggctaacatggtgaaaccccgtctctactaaaa

SEQ ID NO: 1880541 - DNA, 4001 bp, Homo sapiens
agagtagagcaaccttggttaagaaaatagagaggacagagcagaatgtactaatttcaatatattcacatctctggtctaaggcaaggcataacccggaactttaagtaacatttcatgatgtgatctcataaacacttgtagatttttgagaaagtataaagaatggggaaattgcttgggtaatggagctggaaaaatgttttcctgattttcggaaaagggaaaaatgtagaatgataaatttgattgttaattgcttcctagtttcaagaatggataatcaaagagacaaatactagaaaaaagtgcagtgaggccaggcacaatggttcatgcctgtaatcccagcactttgagaggcccgaggcaggcagatcacttgaggaattcaagaccagcctggccaacatggtgaaatctctactaaacaaacaaaaaaattagctggtcgtgatggtgtacctgtagtcccagctgcttgggaggctgaggcaggataattgcttgaatccaaaaggtgggggcagcagtgatctgaaatcacaccactgcactccagcagcctgggtaacagagtgagactttgcctcaaaaaaaaaaaaaaaaaaaaaaaaaaaaaaaaaaaaaagaagaagaagaagaaagaaagaaaagaaaagaaaaaaatgcagtaattactaggtactaacataggatcacaaagaacctttcacttttaaattgggttactgggggtggggtttgggggagggagagcatcaggataaatagctaatccatgtggggcttaatacctaggtgatgggttgataggtgcagcaaaccaccatgggacatgtttacctatgtaacaaacctgcacatcctgcccatgtaccctggaacttcaaataaaataagattaagtaaaattaaaaaaaaataaatcaggttattgagtagaatattcttgacataatgagtagttatgagtaaggtgtttgataaaggctcacatgattggttatcttgtggacaagatgaggaaatgttaccctgatgattgtgaagtgtaatcagaactggtgtcaattaataaattgaggttaacctggaaaagatgttcttgagaatgtgctgttgggagcttcaattcaacattttcttcattgatctaggtggctagcacaatctcctatgctctggccttttccattcctgaattcccaccaaacctgctttcctatttccaatgcttcagcccttcattgctcccacaatgtaccagcctcctcagctgcatctagtgactggggtggcattcacacacactccagcatacgcctcagtttttctgttgctctcaatctagaaatatttcccctttggaataattcaaccttccattttcttatgattctgtctactgagaaatattcgagaaaattgcaaactaatagctttcaattccagatgtccttccttagagtaatttcttttctctcaagttttctaccctctatgactaacaccatttatcgaagatgaaatccccagagtaccctgttctcttccttactctttatataatttttgtttgttttttttcactcctctcagctcatacttattcgctctttatatttaattggtcatatagtcttacttattccacctctgaaaaattctgaattctgtctcctcttcactcctattgtccttgctgtacttcagtccttattaactcttacctgaaatattgcagtagcctcctaactggcctctctgattttggtgttcttctttgccaagagaagatgcttcatcatcccagctgctgctggagatgttctgctaacataaacagctgatcaggttattccccttgcttgaaagtcccctagtttaatctccttaatggggtaagtaacggcagtcaaaccagctgatcccacctacctctccagtttcatctcttgggctcctcatctctgtgtctctctagatggcgaatgctttgaagacaaagatcttattcatttttgtattcctctttcctagaaaaacaccagatacatagtggatcttttgtaaattagtgaacaactgaaaacacggaaaaaggcttttcaaattattcaggattcaaatatgcagagggtatcatggcaaaataaaattaatagaaaatacaaatttagaaagatttcaatatgctatatctgaaactaatgaaactattttaatggggaccaatgattcaaaacttaactgtgcaagaataaaatgaaggaggcctgctgtcttagtctttttaattgcttgtaatggaacagctgaaactgagtaatttataagaaacaaaatgtatttcttacagttctggaggctgggaaatccaaggttgagggggcccatctggtgaaaaccttcttgctagcgggggctctgtacagagtcctgaggtgtatcacatggcaagggggccgagtgtgctaagatgcttgctcaggtctcttcctttcttagaaagccagcaaccctacttccatgataaaccattaatccattaacccattaatccatcaacccatgaatggattaatccattcatgagcacagagccctcatgatccaatcacttaaaggtcccacctctcaatattgccacatcggggattaagtttcaacatgagttttggttggaaataatcaaaccatagcacctaccttacactcagttaggatgaaaaatacccaggggttttgttgtattacaactgaatagtggccagaagtgtgttctggctagcaaaattttatgaaaccctaagttacatttctaaacaaaggacgagataatggagaatatggttccacaatcatttgtgctggccagaacaaaactaggtttcagggacactgacagctgaagctcaatcagagaatggcatgtaggaggagggaggttctggaaaatattcatgtgaagaaccattaaaaactgagagtatttaccttagagaagagaaaacttaaagggaatattagtttccttaaatttttgcaaagtgactgtggaagtgtttgatattagctgagttcttctgagggcagaactagcatgaatgaaatggcattagaaaggcagatgacttcagttttatataatgaagacatttctatcaatgagagttattaaacaaatacatgggctattgtttgaatttcttgagaactggaaatgttcaggcaacagctgaatgatggtatgtcagcagtatcggagaaggaattctagacggcctccaagatttttctaacgccaagattttacagtcctatattttatttttagtttaattttaaaggagaccaccgagaaaatccatttggaaactttcaataacagtgtaaggtataaaaatcccaagccaccaactaaatttgtctaaaaggcaacccctaacctccttggtgaaggcctgtcttttgtttcattgttttggcgccctaagcacccacaagggggtgcttgtggggaaaggatcatggatgtgattaaaatccttatggctaagctcaggattagaattagtagttaaacaactgtgcaaagatgtttgcaaatcctgatgaggaagcaaaggtagagagaaaaatgtccaaaatggaaccttcatcagacccaagaattctcctttgtttaagtccagaggaggctaagtagaagcaaacacagaggaagcattttgttatcaactccaaggccctagagctgaactcctcaacatgttcctctctgtgtctttggctgcttgctcagttgcttgttttctccaactacaaaacatagagactaaaaggcaccaccgatcccattcaccagaagccgggattcatgagttaatgtctgcaaagcattttgagcttgttggaagaaaggcgctagataaatacaaagtgttgttgttattatagggaagaaaaagcaactgttagctcagggtctataatta

SEQ ID NO: 1880542 - DNA, 4001 bp, Homo sapiens
aaccccataggttcccatctcttcccaccgcccgtcagcaacacagctctccctttctagaaacagggtttcccctccaggcttggattcttaaatctaaaaagagcctctcacctgaggccttcacctgagagctggagcctgtgcgatggattatctggacagggaccccaatgaacaggtggaaaagtacatttatctgcctaaggcttggaatgaaaattgggggtggggtgggtagaggcagattttactcttcttcagattcttttctctgtctcccagtgggcacaggctgagccttgcggggatagaagagagatagagaggttaggccctggttctctgtgtagggtggtatgcatgtgtgtgtggagggatatgggtgtgagtgtgctgtgtatatgtgtggaaagcgtgtgtgtaggtgtgttagaagcgtgtgtgggtgaatatgtgtgtggggtggtggggagtgtgtgtgtgggggtgaatatgtgtgtgtggggtggtggggagtgtgtgtatgggtgtgtgtgggggaatgtgggtgtgtggatgtgtgtgtgggtagggagtgtgtgtgtatggggttgtgtatatgtgggggaaatgtgtgtatgggtgtgtgggtatgtatgtgtttacggtgaatatgtgtgtgaggagagtaagtgcatgtatgagtatgtgtgtctgtatgtgggtatatgtgtggggtatgtgtgtgtggggtttgtgttttgggggggtgtatgtgggtgtgtatatgtgggtatgtatgtggggtgtgtgggtgtgtatgtgtcggggggaagtatgtgggtacgtgtggggggatgtatgtgcgtatgtgtgtggggtgtgtggatgtgggtgtgtgtgtctgtgggtgtgtgtatatgtgggtatgtgtgtggggtgtgtgtgggaagtgtgtgtatgtatgtaaggtgtatgtgggtgtgggtgtatttggatgtgtatgtgtgtggggttttggatgtgtatgggtgtggggggagtatgtgcatgtggaggggtgtgtgtgtggtgtgcatatatgtgttggggaagtatgtatatgtatgtgtttatgtgggtatgtatgtgtggggagttatacgtgtgtgtggaggggtgtatgtgggtgtgtatatgtgtgtatgggagaagtatatgtgggtgtgtatgtaagtcgggtatgtgtggggagtgtgtgtatgtatgtgggggtatatgtgtgtgtggtgtgtatgtatgttggtgggtgtgtatgtgtatggagtgtatatgtgggtgtgtatgtgtgtggggtatgtgtatgtgtgtggggaaagtgtggatgtgactgtgggtgtgtatgtgtgtgtagggggagtgtgtgtatgatgtgtgtgtggctgtgtgtgtgtatgggggaagtatgtgtttatgtgggtgtgtatgtgagtggagtgtgtagggagtgtgtgtatgtatgtggggtgtgtgtatgtgggtgtgtatgtgtgtatctgtgggtgtttatgtttgtggggtgtgtgtatatgtgggtatgtgtgtgtgtgtgtgtctgtgggtgtttatgtgtgtggggtgtgtatgtgtgggggtgtatgtggggggacctgtgggtgtgtgggtggtgtcaggggagcctggatggagccccaggacagcctgctgagggtggaagcctggatggcagatgctcaggtctgactgctgggctgcagggaagaaagaaatgccaagctgaactcgcaggtagggaggaggagaggtgggacagtgacaggtcactaaagaaaaagcattctgagaaaagcctgtgctccttacggtatgctgcaggggctgagcctgcgtccctgctgacaccctctgggaacccccatcgcaagcctcaccttgttgcttctcactggggccgttttcggttggcgctgcttctctttgttctgttgtcccccagtgcagtgaacccttacattatgggtttctcttgtagttctaacctctaatactcaaccattacatcttatctcgtcttctaaattactctaaaatccaattataaaaccctctctccttcaagagcacacaacttgccacattactgaaatgctgggctgctcttttgtttttctaaattaataataactataccattttccgtctgctcttaccatgggactcttttatatcaccacataaaatgcatattatgattctttttgcttcttttctgggctgcaaaaaagcgaaggatgattttccaaatattcataaaagatctgtcagttggtttttagtgtaaaaacatttgaaactacaatccttaaagaagaaagcatcttaatatttatcagttaaaatttcactattgctttcttttgtatgggcaaaatagaagtctatcatttttaaggttttaagagatttgaatgaattttatgtgttagttaaaatttttatggattgaaaacgcttagtttcactaagatttcaaaagcacaaacgatttttaaaatctaggtcccctcgtgagtttcttgaatttacaggagggcagtgactattcttaaatatagattcaacttctataagttatcaaaatatttcaggaagagagaacatgcccagaacatataagaaaaagctttaacagtatcaggaatatcctcaaacactttttctgacaaaaggttagtcgtggttttcaatgctagaaaattgctcttaggaaaatatggttaagttcaaatttgatattagaaaaagaaatttgacttgttttagtattttataatcacaggcatgtaattgaatggtgattgcttttcttgcaaattcttactttggtcatgtggaaaaagtatatttgatatacctaaggcatctgattatgcagtaacaaaatatgcttgctctgtgattagtaaaaatatgtgtatggctaatcagccactctgctttcaacttcacgagcttcagcagtgttcagtggagctcttcattgtaccatctgtatttatgaatgattctttctcatgctcagattttagctgcttaggttaaatatattataaaatgtaggaaagattggaaaagtcctaaattacaaattaaatttcattgaaacatttaaataataacaacctagctaagtattttgtgtagtttttgtgccctgaagttaaatctctatccccttaaatattaaatacaggagaggccagttgtttctttaataaattagttatatttaagggttttcagaggccaaagtgaaggccaagggagaagacagcgtgcaactgaagcagcactacttgcaatttataggctaaatggatgaaccagaaggacatgctaatcaccaaataacatcatcaaatacaaaatataggaacatgattatcatgagcaacaactcagggaaaaatggacatcaggaacaagaaaattataaatgatatataaaaaacaaaaattatactttttcattcttacaatatatattacatatacagtatcaaaacatatgcaaatacacactatatactgtatgttcttttgagttgttttgtacaaatagactctataatcttaatttaatcatagtggacacatccatattatcacttaacatttcaactatgcatcccagcatagctacatctccctccctccctttcttccttccctttccttccttcctttttaaaaaattttctgtgaaaacaagaaaacttaaagttattttcccttgcacttctaaattttttaaaaatttaattttttttgttgttgttgtttttgagacagagtctcccattgtcacctaggctggagtgcagtggcaagatcttggctcactgcagcctccgtcgctggggttcaaccgattcttgtgcctcaacttcccaagtagctgggtttataggcatgtgccaccatgcctggctaatttttgtatttttagtagagccagg

SEQ ID NO: 1880543 - DNA, 4001 bp, Homo sapiens
tctccatgtctcccactctcacagctatctagaccttgatccactggagaagcagcttggtttctgtccttcctgagttcacgggctcagtctcctcgagctcctaccttttcaagtgttccgttccctggcagagagaccagcaaagttctaccatggttctatttctgtcgcccccctgccaaataccttccagcctacttctacaccatatgaattaaaagcacatcagtgagaaaattaactggaaggaataaaatctcatggccatttggcagcctcatggttcagcaataccagtggtccctcacctttggcttcgggcgccgtgcacaagccggctccggtgagccaccagccatcacccacagtgctcttcacagtcatggccttggtagaatgatcagaccactacagctgcaaggagggaaatccaggtcaccgaatgccttccctctcctctccactcctctagcctatttccttctactcaaaatctccagctatcagtgcaatctcatcccgcaaatcttttctcagggaagatgagaggaaggcaccctccccacccatctccacttttgaaatgcctccaggagtgccagctgtacagacttttccagaagggtgttggaggagagcgtggcgcattcagagcaccaaggctccctgattatgcaaggcatacaagagcccctctattcatcacctcgaggtagactattaaatctctggaagccttccacacagtttagtaacggagatccattatgccctccctcaggttccactgaacaccagcaaacaaacatatggtgagtaagttctaatagaattccacaccacatgcaggctctgcgcagagctctgtgctggagggaagctggccccaagcagcctttgatggcagctcctccaagtggtttctgcaacaggattttcctgctttcaccatgtaaggatatgaggcgtggagaatttatttctgttttctagtaaagcatttggtgaggagtgtggacatcttcttatatccccagcttgtagaggagcttattagctgactttgggtaggtcacttggccccccaaacctttggtgcctgtctgtgtaaaatagccacaaatgatacctgttgtctatttcacaggtgttgtaataatgaaacagctcaatggacataggatgttttggaacgcatttcagatttgtatcattatcacaacccgcccccggatttcccgcctccggcccatgtctataggcttcattccatacaagagccaactgcattatccttaggagagttaaaaataaaacaacaaatctagagtattgatgatattgataacaagaaaatgtattttctacaattcagtagctttacagttcctttttgaaaactatacctttaaaaataaaaacctgtcttctctctttgtcctccccctctccgacctcccccctcgtcccccttccccgccaaaaagtgattatggagtgagagccatactgattattttgactgatcaactggagaaatttagataaatttggcttttcattaactgcagctgttgtttctttcagtgcttaaatgcaatttatcatttgaatgtgccggctgaggaacgttgcttgagttttcctttgctttcaatcattagtcctaacagtatgaatccaatttctatagttagcccttaaaaagggtcccattttctgtcctttatggttgttcttattgaaatattaagttttaggatcagttctctatcacacacaccactatcaacatactactattcaaacccaaatccagcttccatgccctgaaatcacaggtgcaaaagcctaaaacctctcaaggctctctgtctccccacctcagccccagcccatcaccatccccacccacccacttacttagaacaatgtttaatttggtcaccagattcaaatatgcagaagtaaggcctcccaaactcaacgagatttccagctccaatgcacaaaaaggaagttgtgtagttccacatgacttgactgtgaatgagagctgtgaagtgataaacgacctccaaacaacattggcttatttaaattaaactattattcatttatacaggatgatgactcatgattatctggacaggaagagaaaaaaaatgtagtaggaggagatagcctcagaacttgtttcctgttaatgttctaagagtaatatcatgctagtctttatgtggtttctcattattcttagaactttagttaccatcttaattattctattgtttctcttggaagaggaggaggagtagacaggctacattttctttttttttcacaccatgatggattaaacgtcaagaataattaaatgccacaggttgctagccaacaattgaacgctgacatcttttaggagaacccacccaggaaagaagaaaacaaacatcttaacatctcagtgtctttcctgacttcatttacgtaggcagggatcccaacatcttaaataaaaaaaaaaaagaacaaagcctctccaagctaataattattctatgcttggaatgagagtgttcagaagaaccagacatttatgtcgaaacgttttccaaagtaggagaagtggggggtttgctcctgtgcacgctggcaaatgaaaacaacaaagaatgtggatcatcccagagactttagaaacaacatggagccatttcaaaagttctgattctgagattttgagggcaaggaaacaaaggaaatgttattggttaatttatcaataattgatagacaaggctgtacttccagttccatttaagagccaactacaaataaaattgtcagcacatggctgagtaagaactatctggggtggaagaaactgagaaatattcactgaagcattaatatttcatgaagaccagaagaccaaggtcagttttgttatgaaggaccctgaggttccagttcactttgaaatgctgaagccaggcaatttcaggacgttctattcattctggcaagtaaagacatcttccaaacacacagcagtgactttattcgagcacaaaagttggcccctctgggagtagcaaaatcgagacaaacgatactctagataatgtgttcttctctacaagcacccaagtttttgtgaagaacagcttaactttcgtgtgtttaccacaagactctcaactctccacatggcttgagtgacaactgatatctctacaatattatggccacacacatcccatctcttgtttgatttttttggatctcctctttccccaaagcccactcttccttaatatgaagaggttggtcttgaatctgcattctctggttcctatccctttagtatctctcattttgggtggccagtcactcacttacagggcacagacaaagtaacagacaaactaaaagcccttccaaaccaaacaacaagggccaggcgagaaactatcagctcttcctaggaagctgagacgcagtgccctgagtgatgatggagcctgacaggaacagagagcacagcccactcatcgtagctacaaactatcaaattcttaaacaccaacaccagatcttccttttctttctctatcaagagtcactggtttaaacacttgaccaaatgatgtggcctgactacactaaaatctcagaatttaacactatataattcatccatgtaactaaaaaccactcttaccctaaaagctattgaaattttaaaaataacaaataaatttaaatgtaaaaaaaattaaaattaaaaaagacgtgccctgaaagcctagagctctacaacacccctgaaatataacacttctccaagaccccagggatgtcaaaaaaggagagctagaacgtaactgtattagtccgttttcacactgctgataaagacatacctgagactgggcaatttacaaaagaaagagatttatttaatggacttacagttcacttgcctggggagg

SEQ ID NO: 1880544 - DNA, 4001 bp, Homo sapiens
gagccactgcacccagcctatcattggtttttatccaaacttttctacctttggaagggctgttagttttagcactgttctgatacacactgctgatagcaatactggtctagcaggtgcttctctctcagttcacttctgtttaatagggtgagtttacacacatacagaactagtgggctatcttgaccgctaggtaataatatatctgcattcatcatcaagaccaattttgccacatgggctgaaggcacagtctaccccatcaggcgcttgggaattctgacataaaagttcaaaagtacggttacagtttcctgcttagggattatccctgctcttgcatccagttgcagctctggttctgtggtcactgaatcaggtagaaagaagtgttaaagtcatgcagggaaaagaaagttgcagtgatgtgaagaagaattgtatggtcatattagcattgtcctccaacccctcttcctggatggcaccccagaaatggtctctgccaatgagagagctgacacacagtaaatacagaataaccactcctttctcgttcccctgttgctgaggtcttagctgatgatagcaaagatgcaccatttgccaggagtgtgtttgtgctaatcagatgttggcctcaacatttgtctttctatagttatcccataaggcaggcaaaggccttcacccccatgggaaggagaatgtccaagggcaggaagtggggggttctcattcaccagggcaagaagcaattccttagggagaaaatggagcctgagtagggaagagattcagcctcctttgatgtgcattttgagtggtctaactagagagttcctaggaggtgaggcttaaggatagtgcagcagacagaatagcagcctcccaaagaagtccatgttctaattcctgaaacctgtgtatctgtgaccttttatggcaaaaggaactttgaagatgtgattcagttaaggatcttgagatgggaaatcatcctgatgagcccatttaatcaaaagagcccttttaagggaaagaaagaggcaggaaagtcagagtctgagaagaagatgtaacaaaggaagcagagctcagggacagaggtttgaagatgctgcactgctgtctgtgagggtggaggaaggcgccacaagccaaggagtgctggcagcctacagtagccagcaaaggcagggaaactggttctcccttagagactccaggaggaacacagccctgctgatcccttgattttaggacttctaacccccaaactataagacaataaacttgtattgttttaaaccaccacgtttgtcagtaatgtgctacagcaggaacaagaaactcataccaacaacatcagctgaggaagtcaggaagcaagctcccctgaatgactattttctgctttctgtggtcccacagggtctgtaaataaagaaagcaagaccaattttaggactgcttaacctggaatccatagcccatagaaaagatttgaggaatcctcataagccatgaaattgtaaaattttacatggccagttttggtgagagatggtccaggaatccatgactcctgaaaggttaagaactactcaccttaacaaagagaaaaatccaagccaaaaaagagccccacagtcaatacggagaagtgatgtcaggagccagatgaaagagaatatggaatctctacactccaggagaaaggtgaggggaagatctgggtggctgtgaaagcctcaggctggtgaccaggctgagcatgatggcaaaggtggcctgttcctctttgggggttgaggatatgatcctggtttaacggagatgcataaacaaaagtaaacagaaattcagcttcagtcatcctgaaaaaggagaatttgcttaatgcgccccactatgcagaataatagacaccccagcatttgtaggaaacatagagaagtggtttatggtctttcgttcacctttcactcttttcctatcccaagtcaagtctctgggctggatccagggaggcagaacatttgtgctgagaagtcatcccaaggaagccctgtcagccatggtttccctaatcccattaagaccataccttcagggatgtgggccagctcagagtcagtgtagagcaagttactgctgttaaaaacggaggctcccaaaaagttcctggccatgaaaagaaggtctttttctttgcccattaactgctaaattatcatttcatgacctaagagtaaacaaaccaaaaccacatgtccctttgtaattcaaatgaatagagtattccagattagagaaaatcatacctgaagacagagcgatctaaaatccagggtgaaaaacttctagtaatacctggtggatcccaggattcagtggaaaggtcactttacccggtgtctctgtctagcacataaccaggcaatcttgaaaaagatgaagatgggtcacccagggaagtgaccacattagaatcttctagtatagcgatctcaggactcccaggagtgtgtgtgttgagggcagaggggagaggggcaagtgccactggcattgtttaacctatgccacttgagcagttgttaatgcatgaccctgactctatggttgtgttaaacacattcacaaaatgttactcagcatgattctaaaataaagaaaagtgaagtatgtgtgagtgaagggagtgggggaaaaatgacgtcaaatatgtgagaggggagtgcgtgtctcggctgcaggagtaaaatgtgttttctccattaaaaaaatagtttttccataaagtcacaaaaatgttagcttggaaatcttgtctgatggactcatttaatgggttggtgaggactcctaagtgcaaagagaagaagggctctcttaggtccatcaagggaaggcgttaatagcccagcactggctttctaaccccagggcatttgcactggctgttcttgctaccttgactgctcttctgcagctatcctcataccccattctcttattttattcaggtctcggctcacaggtgcacctatcagaaagaccctccctgaccaccccctctaacacacacacaagggcagtgaacagtgtctcacaggcagtaggcactcaattcatgtctgctgaaagttattgactgaccagctaatgatgcttcactgcagcgcctttccaggatacatgacagttggaaactctagcatcttaacttgacatcaccatgtgacaatatctgcaagacatcaagatgggaagacactggcctatattcaaggcctatgtatctagttggtgatacaagcattgcagacaggaaaccaagttaacacagccttacccactacataagcaagattctgtaggggtgatagaagacaatgcaattatgggatagttggtacagttggaaaattctgaaagttcagagagagagaacaatgtgtgagacaggcaggctggttgattccctgttttaaaataatctggaggaaaaggatcaaagtccctcactcaagctctagcttttatctaactctcagctaatcagtaatgagagacccaagaagctgttaaatgcaagctcctatttcaggcagctagagacttccctggaacgccacacaccagttagacttcaactctaacctaaagttacctcttcctcattttaacgctaaaattcgcacccagggctggagatttacaatgctaatgctacacccaatgtatgaagcagcatgttgagccactgcacaagcgttagaaaactttcttctacacatgccctgatgtaatttttttcctattaagagaccccataaaacgaacccccccacagagtaccctcggggagcagtccactcctttttcctctctcaatgctagctcccttgtgcacaagctgggataaacttaaactgacctttgctgctatgtttggtgatatctcttgatttctaatctgggagattgcc

SEQ ID NO: 1880545 - DNA, 4001 bp, Homo sapiens
tatcatttttatttgtgaaacgttgtcctttaacagaacttcagatgtgaaaaatacagttctgggggaagagcaattgacagcactgacagtgttaaattagccatgaagtgaagatgccagatagtgtggactggggccttgggagaaaggaaggggctagacacttagagatcagactccagccacttccctctgctccccacagccctcccaatcacactagcttcttgcagttcctccaacagatgcagtttgtttcctgcctccttcccactgctgttgcctcaacttggaagggcatagagcctggatttaacaaatatttgcttaatgattcagtagatgatcttggaactcttttaagtggagtaaatgttaaatccttgagaatgtatgagactgccatagaagaaagtatccagaaagaaaaggtatcagtacagaaaagaagagtcagaaaataccgtgcaaaggcacattcagaacgtaaccaggatagctggagccaggattcaaggagagaggtaggtaacattcaatgctcagaggaggcaaacagggtgaagaataaaacactgggtttggcaataatttcaggaacgaacgctgagaaagtcatttttccatgaagttgcgggggggtggggtagaggtcagatagttaattagggaaaagaagtcaacaaactattttatcaaaaggtttagggaagagaagccactctcctcctaccagagagtgaggaagcaactggagagaagtaaactactgtacagtgaataaaaacatggggctacatcctagaggcgctgtgcatctttatctgcacagagttttgtcacgtccacagtgcttttcacacgcactatctaatctgatcgtaccccagctccctgatgatatagcctctaactgaggggttctcaaggtgcggaccagcagcagcatcacagataacttgttggaaatgcacattcatgggttccacaccaggcctacagaatgagaaactacgggtggggcccagcagtctgttataacaagtcctccaagggattctgatgctctccaagtccccatagccaccacactcgggagacaaccgctgcagcgcgcagggaccgcggttggaggacagaatttccccttctcaatcttcggcctgtgtcctcttcgctcttaagggaggtagtgaacaatgagacagcccctcagagaaaagtcgccaggcaggggactcagctggagcgaactccgcccatcccggccagggcggaggcgaggtgcggattccttccccaaaccacgcccccatgcccgcccccagcctccgcccccgcacgacccgagggccccccgccctcgggcttcgacttccggtgctggaggagggggccggcggcgagggactccaggaggacgcgtccaacttcgagaccggcgggggccggctccgctcttccaacccctccatgtgtgaagagggcggacgacgcagcgggggaagaaaaataagctagtctaggacaagtgtccaggcgacgtggaacccagtaagggaataaagaagactggaaacgtctctcccctcccctatcccagtccctcaccctaatccgcgcgcaatagaaaaggcggaagcgcctgtccacgatcagggcggggcaaggggaagaaatctcgcgataggagagcggtccgggcgggggtggcacctctccctcctcctggcgttagttccggtcgcagaggagacaccgccgcagttgccggtacatcggggatttctggctctttcctcttcgccttaaattcggtgagacgcggcgccccgctcaccccgggcggacgctgcgggtcgtggacgccgggcagagggagagggaggcggcgggctggatgcggcccggcttggatgggcccgaacggaggtcgcctcttgaggccgggccggatctagggcctgaaaggccgccgcttcggcagggaggccgaggggtagcggcggcccgggtggggaggtggggtccgggtgtgcgccgcggcgctggctgcgaaggcagtggccgaggcgggctccctctgggccgtgcccggcctggctaacaaagccgccgcggcctctgttgtgtgatgtacgcgtgggggcttccggcgggcggggcggaggggctgccacccaccaccgctgcggccgccgcctccgccgctgctttcgctggagggcgggcggatgtacggggcgcctggggccccggcgcaaagcgcctcagtgactgtggtccgctcgttgcggcggccgccaccgcaggcgacagggtcagtggagaaagagccgcgggaccctacggcgccccgctgtggccgatggggtcctgggcgggaagcgggtgatctgtggctcgggcgggaggcatgggaagggtgtggattgggagacacgttaccggggaggaggctaggactgtgggatatgggcgaaggaggctgggctggctgttagttttgcaggcctgagtggtgcaaggcggccgctgttgcggtcacaggcatgacctagggtaggatggtgctgcccgtaaccaggcttgtcagaagaaggggttcaccttttgacagtgttttagaattggcatacacattttggatgcctgctgactatggtgataatctctctttgcgttctgcgatgcttagtggtcgtggaagatgtaagtgaatgtaaagaggaatgtggagaaaactgaacaattaggtttatgacgggtgatcactgtagcactacaatgtcgcttaaaagtagttcacagcactaatttgaagggtttcttgtagagagaaatgcacattttgacgtacatttgattcaagtgcaggtaattctttgtgcctgtatcgggtataattgccagctttatatcctgagagtgggtgttccatttgattcatatgtgactagactaaggtttgatgttttgctttaaaaattagtattatggcactgatattaaggctttatttctcctttcctagggtgtcttttatgaataatcaaaagcagcaaaagccaacgctatcaggccagcgttttaaaactagaaaaagaggtaaatatttacgttttaatgtctctcttcaaacctccagaacatcttgtgtatcttgccttctctgacaggtacttgcatattactaaagcctcaaaagaagataccagaaagaaacttgaatttctcgttgactgccatttcacatacacctttaatatttctactgctttactgctcaagccttaatttttagtatcaatatatctctaagccggttagtgaatcttcttttcggtgtgaaggtaaaatatttttaaaaataaaaataagggctctgttttcactagcaggcagtctcatttaagcaaacttaaatgagcaaaaatgttaatttataaaaggagaactcctaatgtagtcacccagattttgtgaagatttgtgagagaaaactcagacttcacccatggaagttaattgtggaacaggattcacattgtaatgtcttttgaaatacagacttagtagaaaaagtattagaattatattactattttttttttgcattagtgtgtacttaggtgagtattgaattctgtagcaaagtgctgtgctagtgatataaagctaaataagacgtagtctcagatatatttttactgtttttggtcaaaagcatattaaccttgttttacaggtggttttgaggaaatgaagaactaggtcagctactggttataagttgtgtttttctttttcttccttaagtagcagacattttgagatatatattgtagaattttaaaatcactaatcataggctgtctgtccccttgtagtagtggtggggagaccaaagtgtgatttgattctaatctttgcagattcatttagatttagctggtaaattttcttaaggagctggagttgtaaactagaacagtttg

SEQ ID NO: 1880546 - DNA, 4001 bp, Homo sapiens
ctcattccacctagaaagagaatcctgatctctctggaaaaaaaggagagatgttgagctacaaggaggcaaggctcacagagccagatgaaaacatcctgcttagagcacatggaatgtctctgttacatttctgcggtcactgaactataaactaggctcctgcaatatatatctgcacttggtcacctgaatatataaaggtgtttaaaaagcaagtctgcaagccatttctctcttttttttttaactgactctcttccaaaaaagtaactaaatgacacattactatgtttccacataatctcttatcagatttgagcagatttgtcatagtcctagacaggtgttagtatctttgtttatcccagccttccacaccttgcaagatcattcagccttccttctagaaattttattcccttctttgatacactggattgactgaaaacaggttttgcatatacttcaagagaataaaaatattttttgcattaaaaatagaatcaccacaggcacagagatagttagacatttaaacaaagggtatatcaaatcttctattcttctagctaatctattttcagtactgccagaaacacctaacaaactacagtctcacaaaatcagaatctgtggtactagtatcatgtggtgatgattaaccttgtcaacttattttttaaataatcctcatcgtttataccattgtagtaaagggttcccctctcccatgcagcaagtccagaatgaaagtgggttgttcccatggcaacagaatacaaggcagagaactccagagaaggggggcgggtgcatctctacactcaaggccatagctgcaagaaagccccaggctccaggatggtggcagcaaagagatgcaacctgccatgacatcacactgccagatggcctgctgttgacatagggttcccccccaactaattatttgcataaatctggatcattcattcaaagaaaaataaaggattcactcaagtatacattgacgtacttattagacagtttttctctttgaacaacttagtattacaaacattccccaaacaccaagcacatagttgccttacacatggaagctgtttaagaagcatgtatttcacgatatattggaccccttcctgaaccaggtattgctcaagatccagaggagagttctctctctccagagagttcactgtttagtgggtggacaagcatgtataaagatccatagaaccttacatatcagcttaatgatagacttgcccagggtatcacaggggtgagaattcaggagaggagaccacaaccctggagaaatacataggaggggagaaaggagacaacgtacgtgtcacatgaccccgaggatgaatgaggagctattgatgctccattgtttgctctgtctgcttgctttgagattgttggcggagcaaacagcacaagcaaagacccaaaggcaaaaagtagcacagtctaagtaggggaagcatatgcagtttgcttgtgttgaacacaaatctgtaaggcagggactggagggagctgaagctagagacacagggagctaagatgttaagagaacatgtaagtccctccatctggagagcttggactatattttctgggcaatgatggcaccaacgtgataaagcctgctttctggatagactcaacagcagtgaggagagttgcttaacagataagattggagtccagaggacccgtcccaagactgcttcaaacatccaggcaagagacaataagagcctgacttagatggaggactagggatggaagggtgaggagacattctagaaatatttagtgagtaaagtcacatagcttctcagcatgactcaccttcccaaattcctaagactcaaatctccatccacgtctccataccaatttcgacactgaagaaaacctggagggaggaaggataagatttgcagcggctaaagctccttcaatagtacatagcttatacggtacattcgttgagccacttaaaatgatcagagtcactttaaaccttattggctgagtcgatgaacaggcaaaatatttctttcttgaatagtccagtacattgttttccacaattagcggtcactggggtcggaaaaagaacggaggtttttagaaagattctgaacaatgtatcaatgccaactgagagtggcaggcacaacaaaactgataatgcttcatattgagataggatcattcctctgtggctttcctagtttcacagtgaatattaatttttagagcattcctatgaagtagaaaagtggcaaagcaagttggctccatttccgtgtgtggggcgggggtggtaagatactagtgcagagagatgaactgactcgtcagaggcaaggctagttggaggaaatccagagggcagtttgggcttcttggtttcttctggttttatcatctaaacccatcctaatgaggttactgtctttaactcagcctgtccagatctcatctaaaaagaggaagcaaagacctgggtaattttccagataatttctttaaaagagaaaaaagcaacctctctttcctccaaattgtttataattgatgcaatacaggaagtctcactgcttgttaatgagctcccaaactcaaattttgctatttaatttctttttgaaatctgcgtttgcccgaaatatctcagtaattcaagtggaaagggaagttttgcctaaattatgaaaatgacctcaatttccttctttgcgtagctaagggagaagtgggcagaacatggtatctgagctgtaggaatcaaacccttccccatggcctggggtacatggatcccctcttggtgttggggaaaccccacactcaagttcaacattgtcatcctgttttccgtcgtcaatctgtaagtcttcatcctttactcatttgtatctcccaggactgcaacagacaccacctgctttgtttcatttatgcattagtaaaaacgtaggacttatactaatgattggaagaaatgactcatttcaagttcttgctacagggtcagtcttggacacagtttattttgtatgtatataaaatgggtaaattgagctagcagtgatgaagcaaggaaatgactgccctgcctgcttttttgccaaagcacacgtcccagttctttgtctgactctagtccctgtcatctgccagtctgcttttgtctttccctcattcggccactcttcccttactcctttcttcttgtatctctcgggatagagccacatgcctctggacggcttccattcagtgagaaccttggataacaaggtggtccacaggcagcagttcagctgaaaagcagcagccctatcctgaagctattttggaggcagactatgagtcgatagcaggacaccaacagtttgcctcttcactggggctcacagataaaagcctcagatcttgatgatgaacagcggcagctcctttgggcgggcatgtgggctgtcctgctgctcccggcagtcagaagagccaagaacaaaagatgtccgccaggccgccctggtacccagccggagcacactgggtgtcttgcacactcacatccacacactgcccgactccctgaggcatggagattgctctcttctggattcacacatctcccaaaaggaagagcccctttctgagataaaatcactgcatttttacaccctgaacaattagacaagatttcccaaaatgtaagagcagttagtagttagtagactccatccaaggcggtgaaggcaggaggagagaaaaggagggaggagggagagggtgggggaaggagagcagcagctttggagtctttgtttctctcccatctggctgaaagccagaggcgaagatcgaagagacctatcctttgtccactgatctgacagtcatcccatgttaccactcggcaaaatcaaagtgaaatgcgttcacacattcacgtccatcgc

SEQ ID NO: 1880547 - DNA, 4001 bp, Homo sapiens
tacacacacacacatacaattatcagaccttgtcactccatagccaagccatcattaaaccatcaactttagcttctaaatagactttattttaaatctaggactttaagaatggccaattctacaggatgttaagattaaatgaagttaagaagttttcctagtacagatttgttagaatctttgctctgccatgggcgctatgaagcctcattgtgaaacaccacacaatttattaaagtctgcggcctcagaaccctttatctggctcactaggcactagtgttccggaggatacatgctgggaggtgtttctccagcttattccatcaactccctcccaatgtccccactacagctaagaccatgccttcattttcctaggttgccaatgtggccagctaagtgacctcccttccacggggaaaccacatccattattccctggagagacactacagatttcctgggttcaatgatgcttattcccacccaagctctgacattcaacaactgtgagacttttagcaagttacttaacctcactatgcttgacttcctcatattgagtgttttctatacatcaagtgatgagcgaagtgctctatttttatctcatttaattttctcaacaatttgtggaaattgttacttatcataatcaccattttgtagattaaaaaacccagaggtaaaataatgtgcctagcatcgtacagaaggtgggcgttagagccagctaatgcttgccctgcagagttatcatggagatcaatgacttgctaatatgaatctctaagctcacttattcatacacagaaaacacataacacattcatgttaactaagaatgttattagggataccatgaatgaatttcacttctgcttaaggagtagcagggatctgatttatcttcccacttcccacctgcaacaagaaacaaacaaaatatagtaaacattgcttttcaaaacactgagtatcagacaatgaaggacagtcatctctcagagatagaaacaaactaggtgagccctatgaatccccaactgacggcttgaaagaatctccaggcgaggacagagagaggaaacccaggcacaccttgctggtctccctaagttgacaagatagagctgagagtccagggagatgaaagcagttggtttgcagtatacaaaagagtggagcatccataggcagaagcttagagatctgcagaggctcctcttcactattcactcaacagagtaatactcagcacttcgtgtatagaaactacaccagggtgtgggggaacatctgaaagtacaatagaagagaatctagggctcacatgcatctggtaatagtatctattcctgctggctccagtgagtggaaaactcataatttatggctcattgggtagtctacttgagaaaggcttgccttagtagtaagaaataataagcaacagatggagcatagcccctgacccacctaacaagttgtagaattaagtcctgaaacaggcaaactgtttctaagtaattgcttcccagaataaagttcaataatatttttaaaaataatcatagcggaggaggagccaagatggccgaataggaacagctccggtctacagctcccagcgtgagcgacgcagaagatgggtgatttctgcatttccatctgaggtaccgggttcatctcagtagggagtgccagacagtgggcgcaggccagtgggtgcgcgcaccgggcgcgagccgaagcagggcgaggcattgcctcacctgggaagcgcaaggggtcagggagttccctttccgagtcaaagaaaggggtgacggacgcacctggaaaatcgggtcactcccacccgaatattgcgcttttcagaccggcttaaaaaacggcgcagcacgagactatatcccacacctggctcggagggtcctacgcccacggaatctcgctgattgctagcacagcagtctgagatcaaactgcaaggcggcagcgaggctgggggaggggcgcccgccattgcccaggcttgcttaggtaaacaaagcagccgggaagctcgaactgggtggagcccaccacagctcaaggaggcctgcctgcctctgtaggctccacctctgggggcagggcacagacaaacaaaaagacagcagtaacctctgcagacttaaatgaccctgtctgacagctttgaagagagcagtggttctcccagcacgcagctggagatctgagaacgggcagactgcctcctcaagtgggtccctgacccctgacccccgagcagcctaactgggaggcaccccccagcaggggcacactgacacctgacacggcagggtattccaacagacctgcagctgagggtgctgtctgttagaaggaaaactaacaaacagaaaggacatccacaccaaaaacccatctgtacatcaccatcatcaaagaccaaaagtagataaaaccacaaagatggggaaaaaacagaacagaaaaactggaaactctaaaacgcagagcgcctctcctcctccaaaggaacgcagttcctcaccagcaacggaacaaagctggatggagaatgactttgacgagctgagagaagaaggcttcagacgatcaaattactctgagctacgggaagacattcaaaccaaaggcaaagaagttgaaaactttgaaaaaaatttagaagaatgtataactagaataaccaatacagagaagtgcttaaaggagctgatggagctgaaaaccaaggctcaagaactacgtgaagaatgcagaagcctcaggagccgatgtgatcaactggaagaaagggtatcagcaatggaagatgaaatgaatgaaatgaaccgagaagggaaggttagagaaaaaagaataaaaagaaatgagcaaagcctccaagaaatatgggactatgtgaaaagaccaaatctacgtctgattggtgtacctgaaagtgatgcggagaatggaaccaagttggaaaacactctacaggatattatccaggagaacttccccaatctagcaaggcaggccaacattcagattcaggaaatacacagaacgccacaaagatactcctcgagaagagcaactccaagacacataattgtcagattcaccaaagttgaaatgaaggaaaaaatgttaagggcagccagagagaaaggtcgggttaccctcaaagggaagcccatcagactaacagcggatatctcggcagaaaccgtacaagccagaagagagtgggggccaatattcaacattcttaaagaaaagaattttcaacccagaatttcatatccagccaaactaagcttcataagtgaaggagaaataaaatactttacagacaagcaaatgctgagagattttgtcaccaccaggcctgccttaaaagagctcctgaaggaagcgctaaacatggaaaggaacaactggtaccagccgctgcaaaatcatgccaaaatgtaaagaccatcgagactaggaagaaactgcatcaactaacgagcaaaatcaccagctaaaatcataatgacaggatcaaattcacacataacaatattaactttaaatgtaaatggactaaatgctccaattaaaagacacagactggcaagttggataaagagtcaagacccatcagtgtgctgtattcaggaaacccatctcacgtgcagagacacacataggctcaaaataaaaggatggaggaagatctaccaagcaaatggaaaacaaaaaaaagcaggggttgcaatcctagtctctgataaaacagactttaaaccaacaaagatcaaaagagacaaagaaggccattacataatggtaaagggatcaattcaacaagaggagctaactatcctaaatatatatgcacccaatacaggagcacccagattcataaagcaagtcctgagtgacctacaaagagacttagactcccacacattaataatggg

SEQ ID NO: 1880548 - DNA, 4001 bp, Homo sapiens
tagtagctgcagattgcttgctaaataaacggttctggtggggcttaataaatatttattgatttaagacaagcaagctctgccttgggataggaaggtaggcagcctccaggctaaacagcatcacagtgtgttaaagttagaaactttttgtgaaccacccttggtactgacctctgcatagtgctaagtgaaggcttcaggctctgtgttagagccctgctgtaacagcattggtattcctgtggtctgtggccaccaccacgtaagtcttgactaggaccatatcatttcttaaccctggtccttttatgttcaaatcaagacaaagatttttcttgaggtctcaggagttatatcagtgtcattgaggacattgttcattctgttttaaggcccatgtctgacaatcttagcctcacacaccttgactcccatcattgagacagaatttgttttaaagcacttatgtgccaggaactgtgttagctaccacaaatgcagaaggatggaacacaagagccccctcaacagccaggagctcatagtctccatgctggagcaatcgttagaagcacaaagctgattgtttcactatggccaccttaccaacaatgctttggtagacaggctggataggaagccagatattttaggccaaggagggactgatggaagaaatggaaagaggaaatataagttcctatgaagatgtatggctgtgaagggaagtagaatgggtgataagaaaccacagtggaggttgagcaaagggaagattgcttaaaggtgggggaaattaggtaagtttatagtagataaaaggagataagggcagtagatcaaaagatagagagattgagatagtgatttggaaagaataagcaaatatttgagaaagaacaatagatattcatgtacacatacatatatacatgcgtgcatacatacatatatacattgtatatttatatatgtatgtatataagtatagaatgtatatatgtatgtgtgtttatatatatgcattttgtatatggggcaagaaggtgaggagaaaatgaaagactaaaattttgagaaagagaattatacatatatatgtaatcactctatatacatattatctatttatctacctacctgtctatctatcaatccatctatctgcctacctatttatatagagagatggagatcagccagaaaagggaaagtcaaagaagaatcattcattaatggaaccatgtcctgtaggaagaaggaggaaataatttgaaagcacaggtgaaaattccttagagacagaaggaaggaaggtcagaatgagatggaagggaggaaagttagagttcatgtagggtgccctctatttctctggaaagctgagaagatggaatgagaagattgaagaatgagaaagtgagaaagtaagatgtcagggacatacatgtaagctttcctagcagcactgggggcctccattgattttgtaaactcagcatttgcaatgctgcaaatatgaatgattatattttttcagaagcactagcctgtagggaggagagcaagcaggtgagggttggagtgctttgggagttaggcgtgaggttgaggagagggcagcagaagggtcctggtgagagcagcatgtagtgtagttgtagtagccaggctgtgcagagaaaagatgaatctaggatgacagtgataaactgagtgagcagggaggggatgagaagatagaagcctcagagagcttggggagcacgtttactttgattcaggtatggagagtgcatagcagtattctcagctaataaagatatactcagctaataaagcagattctagctgctaataaagatatacccgtgactgggtaatttataaaggaaagaggtttaattgactcacagttctgtatggctggggaggccttaggatcatggtggaaggggaagcaaacatgtccttcttcacgtggcagcatcaagaagtactgagcaaaagggggaaatgccccttataaaaccatcagatctcatgagaactcacccactattaggagaacagaagcatgggggtaactgccccatgattcaattaccccccagctgggtccctcctacaacagttggggattataggaactatattacaagatgagatttcagtggggacacagccaaaccacatcagagaggtaagatagaggttccgattggagagtgagatttctcagtgtgagtcattcatccagcaaacagtccctgagcattagctctatgcacttattgtgggaaactctgagaacaaagataagaattaaggcatggtccctgcccttacggagttcacaacccagtattcagaggtaaaacctttccaggtgatgacaaggtccaggatacatctctggaaatgattcactgtgatggttgggaggggaaggttgatggggcagtggaagccaagtggctggcaggctggcatgttagatgtatcatccccaggtgcttatcagtgctacaaagaaaatcggggtttctctcagctcagttatttctctggggccatgtgtatcctctccccagccggtgatataaggactgtttttccatttgagcttttgctcttcagactccctgtgactgtcctagggtcagtgcctgatagttttcaccagtgtagagtggaaggtcaatgggcctcaaagacctacttctgcactttggtacatgagtctgtagacagttacccatcccatgcttccagtttccttttctttcttgcccttattttcttgacctgtaaaattaacgtaggatagtgacaccaatccattttggggaagaaatagctgagatgtgtctctataaagtaatcaataagcagaagtcggaagccacagtagttggaagggtgtgatgatgacgaatgaatgagtgtgcacacgtgaagtggggacagctcaatgctcagagctccatgactgatttcattcttcctgcaagcttctaagtgaagctagacacagagaggagatttcctacctgggcctagcagaggccttgacactttagcaaggaaggcatagggtgtcggaatctacatatcagcatttccaggattctagttcctacagagctgtgtgagacttcatttcatggcccatctgggcattgctagaaggaaacagaattccctcccttcctgttccagagaggctggcctgcaaacttcactgatgaggggccagattgggacatcccacactagctgttttgtggattttggctgacaggagcagagaggaagcatgtttctttgatcttttacctcttgcatcctttctggtatgaccctgggagactggtttatctggctgtctagttcaaattccagattacactctgtcaatgggctttctcctctctggggatgctattcatccttccaaggatccagacactagccaccaaagcttctctgctgggttcacacacataccaggtctaaggtatgatgtgatctcctgggtatatgatggtttttgtgctgcttcttttttctttcagagtctgagaagccaactggggccaaacaagttttagaacctctactggctgatgccaacatcatcagagatgaactgttcttaccagaaacttctctgctcctgacaccccacctctccccaggtagctaaagggataatgagattattaccccctgaacactatgtatgggggtgacataccaggggacactcagttccaattgcaatatcataggcacaatattagaagaatatttggacactttgatagccaaagaaaggcatttggaagattaatagggggcttcactgcaataggtctttcctttgcttaaatcatgaattttttattaaattttacacaaatacattttttcatctattcatacgatctttttcctgttaatctataaatatggtagagtacacttatttacaa

SEQ ID NO: 1880549 - DNA, 4001 bp, Homo sapiens
tttgaaatttattcatataataaatatattccatagcaatcattattagtactcaccaatattcagctcttttcttttttgggcatatgggtgactatatttcctggcccttttagtcagtggagtagtgaaatgtcctgcagaattttcccggtgtttctttttcaggcctccaaagtggaggaacaccatgagctcatgttagtgcatctacaggataatggagactctgtcgtactggttgttcgagaaactgtgtggagcaaagccctaggcaaactaatgtggcttaaaactctaaaatacatttatctctcatttttctgaccataagagatgaatatattttacaatattaagccattgaaattttgaaattgttaccacatcattacttagattattgtaagcaacatacacacacaggtgaaacttaaaattactaatacaaaaatatatatagaaactcacatgtcttctttctgtaccccattgcatatttctgagcattcccttggatccttttgctcccatttggaaatcactgctctagacatcacctaatattaccaagagaatatatagacatataaggtcaattatgataattctttagagttttatttttaaaagaataaattatttaatcctgaaaagtgtgcactttgtcaccaggtgaagtttgggtactttccttgcatgttataagtgctagcattctggctacaatcagatgttatacaacctttggttataaaaagaaacaatacttcttaaaaagaaaatataaaaattaataatactgtaaaagacaattcttacacagaatttacaaaaaatgtgaggattaaataaataagaattgttattcctaacccatatcattcttcgaaaatactccagattttatttttttcacgctttctaaaaaataaataaaagaatactttattgaagccaataccttcccacttttggctactgactgtcagataaatatggtgtcagaatagtttatgctacctagttatttgaaatgttttctatcagttaccatgcaaattgaagatgaggtaatgtatttgccatgtttattttagttgcatacaatagaaagtaaaatcaaattagctaaagcaaaagaagaaatgtattggcctatatagctgcaaagtccaaggagtaaacttgctttaggcatggctgaatccaagagtacaaacaatatcattagagatctacctcattttctgtctctcggctcaggttttctccctgttgattttcttttcaaccaaacttattctatgtgccaggatagctgtgccagttagttctgggctttcattatgttcaacttctgagatttcagtagcaagataaatctttgtaattaccatgcccccaaaatgttcagattagccacattagttacatgtcttctgtaatgtaaaagcacaaacaactattggtttctttgcagaagagaagacctccaaaaaggaaaagacctaagtaacttagaaatggaaaaatctgacctatgcagggagggcttctgatttagctcttgcagacatcatatcttgaaaagaaatctctctagtatatttttggttaaagactatgaaatgaaatcttctacagtgctaaatttcctgcagccaaatcatttttagtaatcaatagcagaagaaaggataataatgctttcctttacaactaaaagaacagaattttaaatgcacactcttcagaagttcaagtcaaacaatgaaaattcaagtagatattcagaaggaacatctcaaaaaaaagtagcactgctaaaatgcaaaagtccaatgaaaatctagagttaacattatttaaaatctaactagattaatcactcatatctctagatggcaaagcacatgataaaattaaaagttacaatgcgaatggaaggtcgagaactctaccctttgctagaagcagccaagtgagagattgtgaattgcgatctcagtggttcagagggtggattacttgttttcaggtctttgaaatctctaagtaagaatgttagtggagtagagtggggcaaattcattcttcctgctcagtcattaacgactcacattgtctttcaatattcttttatgattaaaaatgatgcgtgcgtagtacattaacagagccactataatatacaaacacaatgccattcaaaaaagccggtgttttgcttaaataaatgtgtttttaaagcattagattttatctcctttttgattgcctctcacattagtcagaagcctctaacttcctggattccttaacaaaaacttcaaatcatgcggcaagacatttgacataacagaattttcactaacatcctttcagcagctagcaactttagtctcaggaggagatctttcacccggctctgggttattaaagctaattaaagtgatgacccttgtttgccatactgtcactcaaggtctctggaagggacatcctattgcttcttattcctctgttccttttctgtggtgttagcagacgaacggaaagaaatgctatcccactggggctctaagctgaaagcaaactctgtgaatcgttctttttacagaagcagcaatctctcaatttacttttaaggaaacattatcccccaccatttaattcacaggtggggaactttttaaatataaacaacttttacatctttctaatacaaactctttcaccaaattttctaaattaggaatgcatgtttttttacaaaataatctcaaataaaattttaaaagctcttctaaagtgtaccaaaattttgatagaagataaagaattccttttgggggaattgtataagagaaactgcttgaatgtatgggattttgaaagacccactcatacaaagaaaattaatactttaaaaaaactttattttgaatgtctagaatgctgtcgtagtgaaacttctatcctctgattttccccaaatttcagaaaaaataattattttgctctgaaacgagttaataatgcttgctttttcaaattcccctctactatctacttgtgcaaatgtatgttatgtctacatcaattttttcatcatgttaacttgagtgtgagcagcaatatagttaggaatgctttgaactgcagtaaatacacttaacatgagcttaaacaagtaggagtttattctcctagataaagaatcttgaaaatagcagtttagtggtaattcactggctccatcatatctccagtgtttcaggcttctgttgtttttctgatcttccaatcttaatgtgtcagtccttgacctcaagttgctagaagccttctccacctccagcaccatatcacagtttagggtaggaggaacaggatgctgcggagagcctgctagctgagtatgtgtcatccaacaggcttttccttaagtcccataggccaaatgttacatggccatgcatacatatcggtaagctaagaaacagggaattttggatgtagaacaactaaaacatgcaacagtatctgctgtttttgttgttcattctctttgacataaacatctagtaatgaccaggtgctacaattctaccaaaaaaactacacatttaaaaaatattgaaacatttctaaatttgaggacaaatttcaattaatgtgtactaatataaaatatattttatataaaaaagcaattgctattaaatcaacaatacatcataaagctgtgaaaagctgtcttatgtgtatcacagtatcttaattctcagtcagatgattttcttctgttttgtgtgtctatttttttaaaatgcaattactaacattttaacatacaagtttcattaaaggtataaataattcatcattgtttaggtaaccatgtggtgaatcttcattcagatgatgattacaaacagaaggtattcaggtagtcacactggaaattgctctgcctgtttgtaatgaatgtttgt

SEQ ID NO: 1880550 - DNA, 4001 bp, Homo sapiens
atcatgtgagttagtgagttaataaatacatttttttttttttgaggcagggtctctgtctgccgacaaggctggagtgcagtggtgcagtctcggttcactgcaacttccacctcccaggctcaagcaatccttccacctcagcctcccaagtagctgggactacaggcacatgtgccaccatgcctggctaatttttgtatttttttgtagaggcaaggttttgctatattgcccaggctggtctcgaactcctaagctcaagccatccacacacctcagcctcccaaagtgctgggattacaggtatgagccactgtgcccggccaatacatatatccaaatttttaaattttgtttttgatggagtcttgctctgtcacccaggctaaagtgcatggtacaatctcggctcactgccatctccacctcccaggttccagtgattctcatgcctcaacctcctgagtagctgggactacaggcatgcaccaccatgccccgctaattttttgtatttttggtagagatggggtttcaccatatggccaggcttgtctcaaactcctgatctcaagggatttgcccatttcggcctcctaaagtgctgggattacagacgtgagccatcgtgctgggccaaaaagtttaattttaaatatttgaatttttttttttttttttttttttttggcagagtctctctctgtcgcccaggctggagtgcaacggcatgatctcggctcactgcaacctccatctcccggttcaagcgattctcttgctttggcctcccgagtagctgggactacagatatgcatcaccgtgcccgttttctttttgtatttttagtagagacagttttcccacattggccaggctgatctcgaactcctgacctctggtgatccgtccacctcggcctcccaaagtgttgggattataggtgtgagccatcacgcctggcctaatacttgaataatattttaaagcaattggtgctcttggtaattctatatgttttattttttgcatttaaggcattattctgagaagaggtctgtaggcttcaccacactgccaatggggtccatggcatacacagggaaaaaccattaagaaccctgagtaaatttcaaaatcccagacctgtcatttggcagagacaccaccagggagcagaataacaaaaagaatgtgagctccaggctgcaaagtccaaaagggagaaggtaatctacacgcgctttatccaaacctgtgactgagtgccaaaaaggaaggagccttagagagcgagccccataggatattgtcatctggggagattgaggcaggtaggcgcagagcctgagtgaggaaaacccaggtcccgcagctcccagtccttttccactgcaccccactggaccgccagctgcttcttaggacctggctaatgaagcagaacgtggcaccactcctgtcctggacgttacccaccttctcactctagatggtagagaagaccgtggatcacctggggacacaggtgaaaggcctgctgggcctgctagaggacctggcctggaacctgcccgggggacccttcagccccgtccccgacctcctcggaaaaggtgagcagtgcaggtggcagaggacagcctctgggctgctgtcatctggcgctgtgcaggcgagacggggacggctgctacgccgcacaggtgtagcctggatagcagggagggtcccagcgccccctggggacggaatcgggaccgcatcatccctgctcccctcccctaccaccccgcccccacacccggtcgctgcctcccagcgtcaaatgaggttctggaagagccggccctagatgacatctcagcacaaccccggcgcagagaagctacctgcttcattggccttctcacgactggagctcctcagttcctttcatttccccctgaggagccactcctgttccaccccaaaaccgtcgcagggaagacgggcacccccactgatcaggcagggatggggttgcactctgttctctccttgatccctgtgtccctggcgcaggaggagttcccgggggctggggaggggagggaaggcactgctgagcaccacgggggcgggtaccctgcagcaccccagcttgctcagtggaggccgctgctttctttcagatggcttctgagccccggagctggagcccagcagctggaggtggtgcacctgccaggcagcaccctctgatagccagcgctgtcctctcgccttccttcctcagcttcgtgtgaaataaaagctactgtttttggtctcctctgtgtctgctgacagagtaacccgtttacagccccctctccctccacttccatgcctgggggaggccggccaccccctccaggctcagacctggggacacgcccactcccgccatctgtgctttagcattcccttatttataggggcagatggagcaggggttgattcacagaggtgggggcccttcgagtggccttgcgtctcaaaatgtggccataggtgagaagcaaggggagcacggtctcaggacccacccggactccttaatccaaatctgcattgcaatcagacccccagggaatttatgtgtccattaaagaggtttgttgttgttttaaaaaaaatttcctatgaagtggaattcaatgtaaaattcatcattctaaccattttaaattgtgtaaggctgggggcagtggcttacgcctataatcctagcattttgggaggccaaggtaggaggatcacttgagcccaggagtttgagaccagcctggacaacatggtgaaaccccatccctacaaaaaatacaaaaattagcctggcatggtggcatggtggtgcatgcctgtaatcccagctactcaggaggctggggtaggaggatcacctgagccctggagaccaaggctgcggtgagccatgattgtgccactgcactccagcctgggtgacagagtgagaccttgtctcaaaaaaataatgataataaaataaataaattgtacaaatgcagtggcgtccagtacattcagaagttgtgcagtcatcaccgccagttccagaacattgttctcactctagaaagaaactctgtatctatcaagcagtcacatcccattcctgctgccccccaccccccctggaaaccactgatctctgtctccatgaacttgcctcctctggacattttaaatacagtagtcctgctttatctgtggtttcaccttccatggtttcagttacctgaagtcaaccacagtcctaaaagattaaactccagaaataaacaatatatgagttttcaattgcacatcattctaagtggcgtgatgaaatccctcgccatcccactttgtcccacccgggacatgaacgctccctttgtccagcatggtccacgctgtctacacttccagcctgttagtcacttaggagccttctccgttaccaggttaacggccacagtatcacagtgcttgtgttccagcaacacttcattcacttaatcaagacccaaagttcaagagcagtgttgctggcatacgtggttgtttttcacgtaactctcccttcacagaagctggcatattgttctagtttttctattttattcttagctattgttactaatctcttatggtgactaatttataaattaaacttcataggtatgcatgcataggaaaaaacatagtatcatagaagtagatactattgtagtttcaggcatccactagtggtgttgaaatctatctcctgaaggtaaggaggtaccacagtaaatagaatcatacaatatgtagcctagctgtatctggctttttcctcagagcataatgttttcaagggccatctgtattctagcatgtatcagtacttcattccttcttatggatgaataatgtttcatagtatgaatataccacattctatttttttttttagacagaatctcac

SEQ ID NO: 1880551 - DNA, 4001 bp, Homo sapiens
tattgtattcaccacacacgtaggcatatgatcaaatcttcacagccttttgttgttgttttttctttctagtcctctgccacatgatatattttcttcttaggtaggcatagtaatggcattactgatgaagtaagtaaatgaggtaagattgcctttctctaaagaattcccagttgtgaaaaggctgtgaaaagaaacggtggctcatatattcaaagcattaataaatctgaaatgaggaaatagataaaatgagaaataataaacatataatcagaataaaaataatgataaatgagaatgtaaatggactacctactgacaattagttaacttctatttgttaaatgtggaaagcaataagattattatttttagtatactacctggaattgaaagcacagagctatttcctttgtgctctctctcactgacccatcaggtgttttgttgtggtacagacatggttcaaaaatgttttaccccccttaaccattgtattttaacaatttttgttgcccactcaccttcagaagactttaggagttatggaggcagtagacagtaagtggataccaccacatactgtgaaggtgtatatattttcttgaaatgttactatttgaaatgttactattttgctgttctctagtgttgctgtttctgtttctgttaatctgtttctgtatgagaatctgaaaatagttaaatcagtaaaagtataatgtgacatattttctcatatttattatactttaaatatacaaggtatctcagaaaaaatgagaaattaatgtttcaaggaatttttcagctctgaactggatgcctccactgtggtgcgatagtggtacgatctccgctcactgcaacctctgcttcccaggctcaagccatcctgtcacctcagcctccccaatagctgggactatagacacgcaccaccacacccagctaatttatttttatttttattggaagaatggggtttcccatgtttccaggctggtctcaaactcgcgaactcaagcaatccactcgcctcggcctcccaaagtgctgggattacatgtgtgggccactgtgcccaaccatattttttatttctccttacatttctaaaactactcacgtatcactaaacttaagatattcaactattttatgtcaggtgttttcctcatgatcaatctggtccatcagcatatagcctatagtcagatttgtataaatagtctttgtacaaactcatacctctttccatgctgtcccagcataacagcttagtcctaccatgacttattcctgaccctgttttttttttttttaactgcctgtcatttgctttcaaatgtatattaatgagccttaattacttaacagacattaagtaactggggataacatttgatttttctctaagcttccaaatgtaaaatcaaatatagtgataaaatcatagtagcttgagatcaaatcttaatgagagttttataaagtagatatttaaataaatacttactttaaagccattttctcctatattaattcactaaagtattacagaaaagcattcttagcaacaataacaatctgcatactactagtgaaggacaacaaacaacatttaatatacaaaaaatgtctataaaaaagtcatttcgaaataaatacattaaacataatacatttcatactatttaataagtattttttaattttacaatttaatctctcaagcattgcaacgaaaatcaacacacttctattattttgccatgacaattatttttgttcattgcaactgtaaaattcagtagaagcttatcaacacttacctccttcttttagaaaaatgcacttctgtgagtcttcaaagtaattattgtgcttcataaaaactgtgttattatgttggcttaggataatatgctttttacatcaaaataacttatagttattctctcctctgttggtaattataacccgagtccactgtggtaataaacttgggctgaatacttgatgggccactttattttattctaactaccctttttctattatgactatttattatgtcatcataaatgtgatgcacggcaacagtaaagtgcaaagacaccaacacatctaactcatttcctgaggtgtgctcttttttccttaggcaaaggcttcaagttttatttatttgcaatatcagaaagtattcaaaagccatattatcccaggtgttttcatcatgaaaaggagctttttgaacatatattattgaacagaaccaacattccccataagaaatggccttgttgcctatagtcgggcaacttcacacctaacttcactgcaaaaaaacaaagaaaaagcatttgaattgaacataagaaaatattttagtaggtggaaatatgcttagttgtgtccattattgagattgctaaaagatgagaattagtctgacatacattcttttcaatattgatcaaaggaaagatgaaatctacccattaagtttttatagtatatattttatatgtcctcttctttccataacaagaatgttttgttttttgctttttttgtattctttttatgactatagaaaatttacaaattcgtttgcagagataaaacatttcctaaaatttaatgtacacaaaaggtattatgtgacctgttataaaaggcacatgataatctcattgccatgacctccagtcataattttacaaaaaaaaactaataaaatgctatttaactggattgtgttggtatgtacattttatgagcccatgtgtgacaacatagtgaagaaatattacatttagtggtattgttctccagacattttcacctattatgatccagcctaatttgtcctgtcctaaatatttccaaatgtttacattattttgcctcttttgccaagtttaaattcacttttccatcccacatctcatttttattttttgcacataaatgtttgctatgctttccaaataggtcctatattatctgcaggcttctaattttaggagttatagcattactcaacttagaaataccaaaaaacagaaaaaagccccccctcccccaatttcattcatgtaaattcttccagatggatccatgatccatcctgtggccttcatttttaaaaagtatgttgggctttactgtaatattcttagtgttaaaccacttttttcctaagctgagccttctattctgagacactgaaattgtaattaatattcctaataattcaattcctgcatctctgaagacacactctttagccctagatctaactctaagtgttgaggttgtgaaagtcataaatctgtgtcaaatgtttaggtttgtagtatttattaaaaattattttattgcataaataattcacatatatgatctttaattttggggatttttatgccactaataaatgctcatttaggataacaaaataaagtaagaatttttaaaagcaaatttatcaaaaatctatcctatagagataatcataattattataaaatatagttttaaaaatgcaaatatgctcatgggtatgcatcttacacgtgataggtaaacccatataagaaatcttaaataatatttacatgttgaatcatattatctacctctttttgccgatggacctataactagactcatgtcccaacacagccaaagaatacattacaaaagaaggtgaggtaaacaccaaaagaattgcataaattttcaaatttatgtcaacataattagcaaaatatgtttggaaatgcatattaaggatgtggaatttagcaggaaggagtaagaaatgagatcggtttagatttagtgatgtgggcccattaagtagacattttagattcaatgttttacatggagggttattttcattagatactaaattctgtgttgatagtgttttcatcaccattttatcatcttctaatttatagaatttctgataaaaa

SEQ ID NO: 1880552 - DNA, 4001 bp, Homo sapiens
atgaaaaagggttgacattaaactattagagcaataaagcagaataaccagagggactttaacactgtgaaacgcagttgcaaacttgttctgctataactggagtctcaaagggctctgagtgatagttacaacacaaaataacaactgaaacatgggaagaaacaaactataaactattagaaatgcagattatttttattgcaaaagtaatatatatttactgaggaaaatttaaataaccttatccaaaatagaacaggaagaaaaatctaaaactcacatgtaatctcaccagttaagagatggtgattgtaaatatttggctataagatttcaaactcttcctatatttacatttatacaaatgggtttatattatacataatttttagagttttttcacttaacaataggctgcaaagatctattcatcacgatcacttagttatctgtattattatactattaactgtgttttcattgttgaactcaggagagctttttagttgtgttactaatttaaatatgcatgtgaatcaacattcttgcaggtgaaaacatgagcagactcttgtcactcctgtacgataagttcctaaatgtgaagttactttaccaaaagggacaaacacacacacatatatacataaataatactcatttgtattcattcattcattcaatttgtgcatccataggttgctagtaaacatggtgattttcacccatatgaatgtgggtgacagtttcaacatctctaccattattaactactcagacgtctaaattatatgtattaactaattattttaaaatgcgtccagcttttctcatgtgattagttttttcctagggtatttttctttcctcataatttttacatgctctcaattcattgaggatttaatttttttctctacaatatggttcagataagcatttctgcatcaacctttatcatttaaagttgaagggtaaataataatagttactaaatagggtacaacaggatggtttgcaatcagaaaatcattaataaaatataatatattgaacatcaaaggaattatatgaatgataatctcaggtgatattaagtttctttttagaaattatcttcaactccatctgtcttctcttccaattttgctgttaataaaataactattccaatccctcaatctgagctctagatgccttctctttttactttctcatgaactttgctcattcattttatttctactctcctatcctgtaattacaatttatccatatctattgacattagtattatattcacatcaagttctaggaaaggcaaagctaatctacagtgaagaaaaatacgcacactggttgcaggattttgggagaggtttggtctataaatcgactcaaaaatgacatgagggaactagtagtacagctaaaatcccatgggtgatctttcaggcctgaccataggcaatcacaaaggattggcctggcaggcctcatggagcaaagctatatacctcacattgaatttagcatacagcgaatgcattgcagcaaaaactcagacccatatggtcagctgtgccctgacaaatatctgcattcttatcccacgtgccttcatttggaggtccccttgtctgaggccttcctcaggcacctctgcaaacacttcgttatgggggtagaagaggggagggggatcttgaggacccttctctccactctgacttagtactccacatatttttattcctagctcttctgtctagccctctccgaccccaggtacaaaaaactgcagaagacttttagaaaatacactgcaactaatgcgatggaaataaactgccacaaaacacacacacacacacacacacacacacacacacacacacagaaactgaggtgctgctaacactaacgggaaacacacagggaaggcatggtcctctccccttctcctccagcttcccagtttcccttctggtatctcttggaagaatgtgagcagctggtgatgttgaagtgtgatttgcaaagttccaagcccattgttgccaaacagagtggaaagtagagggattggagctgaaagacaattatttaataaagggcataccattcaactattaccataacacctatcacctcaagtctcaatgtcctcatcttaaatgcatatgtatatatatatatgtatgtgtgtgtgtgtgtataatgattaatatatacacatatttatatgtgtccaaatacacacagatgtaaatacacatgtatgccctatatcaggccaataagattatttgatactaaatgtggagaaaaaaatactcaggtcactctaaccaagagaagaatgtgatttctaatatttataatagaatattgctattggaatcactgcagtttttgcttttacataattaaattttgttttaggttttaatttttttaacaaaggaattatttcaaatttgtattgcgtttgtactataaaagaatggtaaccataagatataaattgacaatgaaacatgaattatggtctgatcacacataatattcaaatttgcaactatctaggaaaatcttgaagtttattattgtaaagatatgttttgagctatgcatttctctttattttatggaaaataaggaccattcaaatagtatgtaggaagcattggtaatcaatccagtgggtgctgcccagaatgattctgaaaatttgctgatttctgtgtgtgtgtgtgtgtgtgtgtgtgtataaatctaatgcctataacagtatctggaatagtaggttcacaatgaatatttcttaaatgcatacgtgagaaatattgtatacatacatttgtatattaaaagtgcaatgcaacaatttacagactaaaagaaaaaaataaaagtgcattgcagaaccttttctttagggtctaaaaggaatttggaccctttggtggacttaatctcgagccttacgtctttcagcagatagcctattagggccatttatcatgcttgatatgtgcactttattttgcttactttgttgtaatagattacatttattgtcatttgtggggtatttgtactcctttaataaaatacatgagtttttcagggtaattgtttcatctggtagtcttctttttgtctcctttatagctttcctttttcttgacttgctcctttttagtcgcttcaagaaatttttctcatgcctaaattcaaggcaagtgtgatagaaattatgtagctccttatactgtcaaaggagtttaatatagcttaactgtgtatagaagttaggactagccattattccatgtaatagttcagaaactgaagggaagaaaattatgtgattttaacttttttaacaaatgtgaaagagttcagttttaaaatttcacggtagtgaattttgtatttgttacatgcatagagggaagacgtctatatttataactaaatcatttagatagaaaaagaatcccactgactatatattcttacaattttgtcttcctttctgcctatttcctcttcaagtttggctccaggaaccaaagtgacttgttcttgttgcagcttgggtttgatgactttggttagtaccactaccttccccttccctccttatctcccttcattttggaaataaatttctgcatatgttgaggggaaaaagtgcattgcagcaaatagaaacaataaatatccttccgatttctaaggctaaaagacttctacatctgctaacattaagtgggcagtgactaaatgccagtcattgggcaaaatacctatgtacatttttcattaaacttgtgaagatcacatgagcaggtggcacagagacagcattcaaatgtagatatatttgcctccaaagatatagttctttatcatttattctacaatacttcagcagtttgtcaccttagcacatgctaaatttggaactatggtatttagtcactaat

SEQ ID NO: 1880553 - DNA, 4001 bp, Homo sapiens
atccacccgcctcggcctcccaaagtgctgggattacaggcgtgagccacggcgcccagccctatttatttattttttgagaaagagtttctctcttgtcgcccagtctggagtgcaatagtgccatctcggctcactgcaacctccgcttcctcgattcaagccattctcctcctgcctcagcctcccaagtagctgggattacaggcatgtgctgtcatgcccggctaattttgcatttttagtagtgatggggttttaccatgttggtcaggctggtcatgaactcctgacctcaggtgatccacccatctcagcctcccaaagtgctgggattacaggaataagctactgctcccagccacttttttgttattttaaatgaataacatttacagaattttgctagccaatattttttagaagttcacagattaaattagaatacgctattatggagatagaacttcaaggaatggtgtggggacagtggagaaacagaataaattcagtaaggcttcagtgaaagtgagattttattattattattatttttattattattattattattattattattattattattattattattccccactgttttcttccctgaatccgggaaacaatctctgccgatcagataaaaagacagctaattctatctgctgtacttctactagtctgatatctttctgctcatatagtatttttcatatttgataaggggataatattttaagagaataagtcaatataaaataagtggcatggagaataactggcactgatgtaagcaatatttaacaacttcagtcatttttatatcatcttaactatatagtgtacctgcacaccactgtgttactattacttatttaaatccacttgtttctcaatatttttaaaaaaatactgagaattatatctcatttcatttaaagaaattcccagctgggctcggtggctcatgcttgtaatcccagcactttgggagaccgaggcgggtagatcatttgaggtcgggagttggaggcctgcctaaccaacatggtgaaaccctgtctctactaaaaatacaaaaaaattagcaggatatggtggtgcatgcctgtaatctcagctacttgggaagctgaggcaggagaatcccttcaacccaggaagcggaggttgcagtgagccaagatagtgccactgcactccaacctaggtgacagagtgagactgtcttaaaaaaaaaacaaaacacccatatcacttgccaaattaaatgtaaaataatgcaatttaaaatagatcaaatcatataattaaattaaaaacatattaaaatgagatagattacaaaacaaaagtcttgacctagtttgcaaagatatgtatctataaataatttaaaagaaaagcatgaggctgaaaacagtcaaagcatttgataattgattgatgtgacctagttaaaaattagaaattataacacaagaattttaattctgtcctacagttatgatgctctatatcttgagattttctactcatagatatctagtcacaaatggtcaaaattgtttaactgtgatttctcctaggataggttattatgcataaatttcttaataaaatagaaattgtgtgtaaccaactcacctcaaaaattcatcagaacaagcttcagattccatctgtcatctgattagttcttatcaggtaatgctcacagaataacagcaaagttcctcatccacacaccaacactaattcgtttgggaaaataaggcttttaaatggcttaccaaagccatttaaaaatctcttcctgaagttcaatatatttttagtgagttcttagatgaaactataatccagttacaaaagtctacacgtatttcaccaatttttttaatcatcaagttaaattttctgatataaatgtgtctctaaagataagtgaaataacaaagtctgctaacatgcaaagctaaacaaaggatgcatatactatctctgaaacaaaagtcttgttcagaagaccttagattctttgaataatgtaggcagaatatgttagtgtagaaaaggccaacaaacaagcatcactgtaaaaggagttgtttgtggtctaacagaaagagagataaagagacagaggggcatagggagaaagagagagaataaaaattgaatggtctgttattaatatgatttacacatttcttcatgtagtgtatgtggggaagtgggctttcatgtgtgtatatttgagtccattctgcacccaaagccgcaaaatcgaagtaacttcataacttggatttgaggaacaatactcacattagactcactatacctttagcatgctgtgtgcattttctaaaacctagtttctaggctgagtttcatttgtttacaaataagtaagttggcaatcagtttgaaaatgatctttttcagttataggtatgggacaaatttacagacttttttatttagaaattggaaattcttacgcagctactatctgataaatgccaaagagttggctgaatttatttatttgtcttatcaacagttgtcagtgaagagtattagctttgttactaggtgtaatcattgataagattccagtcatgtctataattctgtaacatatcatattgtttaacttacatcaaacattgtgcatattttgctgctgattatatgtttaccattaaagtaaccccagcaaattttaaaaagaatcttcacaattacttctgtggtttcaatgttttttgcttttggccattttaaaatttttatagattcaggggatatatatgcaagtgtgttatgaggatatattgcataatagtgaggtttaggctttgagtgtacccattacacaaattgtaaacattgtactcaataggtaatttttatgttagtcctttataggatgcatagttggcaaatattttctcccattctgtaggttgtctatttactttgttatttctttaactgtgcagaagattttattgtaattaaatcccatttgtttatttttgcttttgttgcatttgcttttgagattttagttataaattctttgtgtcggccaacgtccagaaaagtttttcctaggttttcttcttgtatttttgtagcttcaggttttatgtttaagtctttaattcatcttgagttaatttttgtatacagtgaaaggtatgagtccagtttcattattctgcatatgactatccaattttcccagtgccatttattgcataaggtatgttttcctcattgtgtttttatcaactttgttgaagaccagttgcttatagataggtggctttatttcaggttctctattctattccactgatctatgtgtctatttttgaaccagtatcatgctattttggttacatcagccttttagtatactttgaagtcatgtaatgtgatgcctctggctttgttcttttgcttaggattgctttggttatttgcacttttgttttagtccatataaattttagttttatttttgttaattctgtgaaaaatgacaattgataatttaataagaattgtgttgaatctgtatattactttgggcagtatggccattttaatgacattgatccttccaatccatgagcatggggtgtttttttcatttgtgtcatctacgatttattttatcagtgttttctagttctccttgtagagatttttcatctccttgattaaaggtattcctaggtattcaattttttttgtggctattgtgaatgcgattgaattcttggtttggttctcagattgcacgttattggtatatagaaatgctactgatatttgtacattgattttatatccctatcaaatacaggagtataaatgatactggtttcctattatcattctaattctcactgcatatttatttttatgattattgaacgtttattatttctaaaacataggttttgcaaaat

SEQ ID NO: 1880554 - DNA, 4001 bp, Homo sapiens
tatcaaactccacattagtgtatttgaaataatttgcttttccgagcagaggcagaaaagaatgatattttcttccataccttctcttatttgcagaacgttcaatttaagccaatccagtatctatactgtagacctcagtgaaggctggaagactaatccaacacaatctgacatcctgattctttccaatcacctttatgttccaccctctgtgagtacataatcatttcctaaggcagaagaagtgttgttataaattacttttctataactgcataacaaagaccatcaacttcctagtttaagaggaaggtatccttttcactgacctcttttaccttgattcagcaccatacacttgccatcatgttttctacccactcagagcacaatagctgcaagtaacagaaaaccaggtcagagtatcttaaacaataagaaaaaaaactgaatctcataaactgaagtcagagctagggtgggcttcacaaagctaccatgatatccttcctagactgatgcaattccctgataccttgtctgtgtacatctgaatgtgtcccctacatcacttctccatatagcagtcacagcgatctgttgaaaattaaaattagattatgttcttccctgatcaaaacactctactgacttctcatcgcaattataataaaatccttaatccttcccatagccacagacactattaggacccctttagagctcccctctagatttcttacgccacctatgtaataggacccctctaaagctctctagtcctatctgctgatgctcgtctctcactcactccacactggctatagtatcccattttgatgtttcttcattgtgacaagcttgttcctttcttaggaccttgacatttgctactgcataggcccagaatgctcctacatggagccttgcaggcaccacttactgtattatcagagttctccagagaaacagaaccaatatgatttgtgtgtatatatagaaaaagatttattgtaagtaattgactcgtgattatggaggctggcaagtctaaaatctgcaatattggccagcagcctggagacccaggacagccgacggtacagacaaattttgaatgccatctgttggagatttccctttttgttctattcaggctttcagctgattggatgaggaccacccacattatggaggccattcttgtttactcaaaggtcatggatttaaatgtcagtctcatccaaaaatatctttcatgttgacacataaaattcaccatcacactcacatactctttcagatctgtgctcattcatgacctttcaaaaagaaattcctcaaagcccctattgaaaaattccactaatttctgtgtcttctatacctttatcatattttacttcacttcatagcttttttcaacatctaaacttatattacatatttatttgttatgtacctgttacctacctccatttctataatacaggcattattcttgtttaccaccatttctatgggatacaaacagtaattatatagtagatgcttaataaactcgagtcaaacttttatattcacctgggaatcaaatgcagtccttcttatccaggagatggctcagaataattgaaattacacagaataattgaaatacacacaaaaaattgaaagatttttctaaatcatattggctacagtgtgtatttttctactttctctcaccccacccttctctgctctgaaatactgagaataggggtatacaaaatgcattccttagcctttcttgacagcagacctctactcacatcattccaagagaagacactagtggagggatgagattgtctcacgggagaagctattgttcttttctcttgctcttcttctggcagcatttttgagtgactacatcctttccacccaacagcaatccaccttcagcttcaatggtccctcttgcatggttctaggacaagctgcaggccttcttcgtcatggtttcagcactgtctaaactagctaccctagcagggaagcactgagtgttcttctgggctctgattacaccgttttgtcacttttgttttccaagaacttgatgaagcagccactgtcagcaattactaatctgtggtgtactttttattttacttctctcagactcaatacaatgtaacaaggctcctgaattagacctctaaattacagtctattgttttaaaacaataaggtactctcctttgtttttgtttttgtcttgttaattcagtgatgtgattcttgggttaggtagcttgtacagtttgaatataatgatgaccttattacccatggaaaatgggttactgctaatccatgacatgccatgacatcacatttaccaaattatctgttgtggctttattcaaagtttatttttctgtttatttatttatttgttagatatggagtcttgccctatcactcagtctagctggtcttaaattcctggcctcttggctggtcttaaacttctggcccacctctgcctcctgagtagctggatctataggagtgagccactgcattcagcttatctgttgttgctttagataaaaggccttcttaaggcaaggctctgtaaaataaagtggtcaatgcattcaactgccgtaatagtgatgatgactactaaagactgtggggaaagattttttttctctaatactgcactagattgcttatagaaacaaaattacaagcccagtgctttaaaatcttagttcaaggcaggtcagggaaccagggaaatttcactgtggtcttaaaatatttgctcatttattgtagtttcagggaagatcacaaatcccatcccaaatctaaaagtgaaaattccagaattacaatgtaagttgaatttactgcctcatcatgtatcttatgtgaaactaaaagcacatgatcttgtgtatattttagagcattaattgggaaagaatgggactctggggtttgaaatagggatatttgggtagatggaggtgaatccgacgaccctgaaccctcaaatctcattgaactttctattgctagcagaaatagtctcccatattcaaggatattagtctttttttttttttttttttagttcaaggccctgcaattacctcccctaaggaagttactttcaagtggatgcctgttcataagacctatccccaccatgcttcactgccttcaaaactgcagtttgagtctgattttagcaaacacctggggcacaagtatacaatcttacccagggaaatgtgacttaaatacaaaaagttattgtaagagtattattagttttactcattttagctaaaatttggagaatatgtgtgggaaagattctaaagattttggaagaaagaaagatttacagagattctttttgccatgtgctatcttgagtagctaggaatggctcaactgtggacacaacatcagactttaatgtggcttatatttaataatgttgagaatgtacaacttcttggcataaaagtgaagaaaaattctacagctttgggatacaaaaataacagactgcatttgtgatttgcgacttggtcattccctgtcacacataacactcccttcattcaggttttgagaaatgcattagtgagagaagtactagaatcctcaaaactgtgattgaggtggtgaatatgaatacagatggaagaagatggcttatgaactgataatcgttgaagctgagtgctggggtaatagtggaataattatgctatttctattcttttatataattttataattatccataggaaaattaaaggagatgagttttgtggtggctgtcttttgttggctggggatgatattggaaaacaccaactttgaaacaggctccctagctttagtggaaatcatgaaattcctaaataacagaagcttagtgaaaatgcttaactaccacagaaaatgtgtacatgatg

SEQ ID NO: 1880555 - DNA, 4001 bp, Homo sapiens
tctagtctgaccatgttgaatcttacttggtcccaacttatttccagatttaaaggtaagcaagaacttaaagattctgatcgccaagatttatatatctgagccaatcctcactctatcaagtttctgtaatttggaagactttgagaacagatcatcttcccttttcatccccctcaaaaaaatggagaaaatataagaaactggaaattcctggggatgtttttagttggagttgtgtgtcttggtatttatgtttatctgtaattttgaactggtatcttaaaattctgcagttacaaataaaaacagattgacatgttcactgtctgtgttaaggaactaaaacttaatatttccttttcatttgttttagtacatagtactctgaatcaatggagaaatggatattcacctatatgtaagcctcaaataaggtcagaatcttctgcacaactgttacagggaagaaagaaaagacatttgagtgaaacagcattaggtaggttaaagtgaggatataagcagtagtgataaatattaaaaattaaaaattctgattttaaaataacctctcatgggagtttataatccagaacagccactaataacacaaaacatctatgagtctacaaacatgaaacagcatattcgtagttaatttagaattatttgtggactggtatctacccactttatggcaattaagtatttccctcctatgttccctgactagttgtcttctaccaatcagtccctggatgggatttaatcttcaaagttgtgttctatgctcaaaataggctagtgcaaagttgccttacagaaactgttaaccatttatggtacctactgtggagatgttgatgcactgcagattcctcaggattttgagaaagtcaacaagattcaacttatatatatatataaagctttaaaaacatctaataagatgcaacatgaagtatacattacctaagatataaaatgtttcacttaaattgactgacactttagatctaacttcaagtttgatgtacatacaggaataaaataaagaaatgtcatactacaaataaataactagacaattccaaaagggtaggacatctggtccagcctgtcaaaagtcaatgtaatgaaaaatgatttattctagactataagaaacctaggagacaatggccaatttttatatatagatccttatctgaagaaactagctataaaggacttttttttaacaaatggagatatttaaatatggactgggtattagattttatattatgcaggaaatattctcattttaaaacacttgtactaaaataagggcagtaagtaaacgcatacatatatatatttactacacacacacacacacacagtaactgggaaccaaaacaggaaaaaaaaaaaaaaagaacttggaagatatacagaaaatactaacagaagtaaacttctaatcaatatcctgagagatatgagaaatttcatctatgaaacaagaacaggatgctgttttaaaaaaagagtaccagagaacaagtactttcggaaacatgtacttataatagcagaattttttcaaaaaattaagagtgttcagaagaccaaggacagatacctcacataaattaggataaaaagtcagatatgaaaaatgagattagataagaaaattaagatagttctggtggttcaactatgaataggagtcacaggaaacaagaataaagggatgagatgagggattattcagggaacaataagaaatatattcgataaaaactgccaaagccccagaaaatggaaataacttgtggcatgactgcaagtaaggctcctcttttttcatttccttttttgttttctaatacacgaatttaaacacacacacacaaaacaaggaatcaatcacctgtcatctaattaggaaagtaattctaatgatattagacttgtttaatgtgtaacattcaatggttctttccatggcaggagaaagaactaaacttgaagaatctgattttcaacacacagaatcaggatcccatagcaattttactgctgtttccaatgtcaacgttttatcaagaatccagaattcatcacgagtaggtttttccatatgttgaactctaaaatagctttaaaaataaaaacacctgattttgaaaataatttatattttgctaatctataacagccttactagcacatattaacagacatttataactatcttgttagaaaacaatatatttgattcatacaacttatttttaactatgaagctaaaagttcattaatatttggttatagcttctttttatgtgttaaaaatttaaacattatcatgatcatctctattccttaacatattaagctaaataaagtcttactaatgagaattcaggactttcttgttcttgtcctgttttttgtttgtttgtttgtttttttgttatctggccagggaatagagaggtcaaaaggtgggagggtttagaaatgaattccgaaactcaggaaccaggaatgcataaatgaagagtatactgaagggctgaccaaaaatgtttcactgcctttcctaataaaaagtggttactgatcattttcattgacatttagggtgatgtatgttggtcttttctgataaagagttttgcatttaagacctattttttgtggtcttaaaaataagcttgtatgcttgcacacataaatacacattacacatctaccaagagattgttctgatttacaaaagatagaaaaatgttttattttttggttttcttaacattttttagtcagactttataacaatgtatttacaaaaattatgtaacgtgtactgccatatttacataactgatgaaaggagggtatcattacaagtaactagacagtactgtaaatctactgtaatcctgttttgcagaatactgcacgacggagattgagaagtgagagctcttatgacatagataacattgtgattcccatgtcattagtagccccagctaaattagagaaactccaatataaggaaatacttactccaaggtatgtatacttacatcttcatatttttcttccttccttccctaataaacttaaattttcaaagtgaagaattttaattaatgaaaggagcatccttctcccagttccttcatagccatggaggggaaacggtgaaaaaaaaattactcgtgccttaagtgttatatagtatcacaactttatttctcagtttttattaagatttaggaattcctagactactttagcattcttagtcttttttattattattatccagtgttatctactatgtatatgacactaaaaggtactttagtgacataaaaactatagcaacaaataatccttgcccttgaagatacaggtgtgacataagttgcaaagagttctacgttttcatggggtattcacactgtaagacagtaatacctgtgaccaaaaaaaaaaaaaaaaaaaaaagattttgatgcattgccaagtcagcaataaacacattcaaaagatgagtgggaaggtctgggaagtcatccatgaaggaatgggaaggtggagaaggtatttacatagggatacgacaacaaaggcacaggacaagtgtgtaaggcttagccagatactgttttgtgcaggttgataatggaaggctaaaaacaaagttaggtccagattgataatggaaggctagagacaaagttaggtccagatttgtggaggtccctgaatgccatacacagatctgctccctactggcagtaacgttagccaaactttttagaaatcatgaatgcagcttcttaagaatataaatgacaccaggaagtagagacagaaaaggctgcaaacagagacaggtgggtgacaatttcagtcaattgctatacatctctattctaatttcatttcttttactacttcataattactttgaggtattaagagca

SEQ ID NO: 1880556 - DNA, 4001 bp, Homo sapiens
ctgaggtgggagggtcacttgagcccaggagttcaaagctgcagtgagctgagatcgtaccactgtactccatcctgggcaacagagtgagaccttgtcccaaaaaacccctcaaaagaccaaaaatataatttactggggccattaataatcaaaaagatctgggttaatattctgccactgttgttatctgtgcctccatcctggacaagtatgcttttctttttacaaatcttacttttctctaaagatgggggtcttgctatgttgcctaggctggccttgaaccccggggctgaagtgattctcctgcctcagcctcccaagtagctaggactacaggcatgtgctgagccccttgggcaagtaaattaagatctctgagccacacctgcctcctcttattaaagagcactgtcttagctgttataacaaaatactataatctagatggcttaagcaacagaaatttgtcatatttctggagtctagaagtctgagattagcgtgccagtatgactgggttttggggagggccctcttcttttgcgttcttgctgtgtcctcatgtggtggagagagagagaactctctcttcttacaaggtcattaaccccatcatgggggctctgccctcataaccccatctaaatctaactaccacccaaaggtcccctccaaatactatcacgttggggttacaacttttaatatatgaatttgggggtgacactacagatactaatgcccatttcatagggtccctataaggcttaaggcaggtattaacataggaaagcacttaaagctgggtctggcttgggtaggtagttcaatgattcaacaaacactgagcacctacctggagccaagcactgcatgtgccacatgaagcgatattgggaaatgagtcacatgcagccaatctctggccttttggaggttttgaactagaaggggacacgcacataatcgtatgtgtgtgtatctacatacacaggtgatatgatgcacctgagagaatccagtctaggaactaggaaaacctttaaggagtgatacttcagctgtattctgaaggatgaggaatggagaggaggccaattccaggttccaaagtgaatctttgcgcaaaagccatgaggcagcaaggtgcaggggcttttaatgacctaagggaacgcactgtggggttgggaccatgatggccagaggaggttttgacaagaggctagtcaaagagcagagaaaaactttaaggagttttaagaaagggaagtgccacgatgagttttgtgtttggaaatgttttaggcggccacaccgcagtctcgggactggctgggacctggatagacacttggatatcagctagaaagctacgacaggaaaccaggcgaggacgaggcaactggggatgttgtggagcagagacggagagaaaatgggtgcattcgagacaagttagggggaaaaaatgcaaggacttggaaatgaacttggggcgcggcaggaaggcatgacgggttgctctgtaggtcttatctgtaaattacggcgatcagtgaaagatctggaggaggaaggtggacacactctctaacaaaaaaaaccctttttgaaattttataccaatattttaaaagtaaaccagatcttttcagacatgcctttgagctgatatttgttaactagttagaattagaaactttccttatttttactcagttacaatatacgccacagctgaggtgagaggaaagaaaaggttgctttcttaggaacaaagagtggtaccttcagtatcgtgggcaaagcttttccaagtccaacagcagtcaaaacagcgctttttataaataacactcagctaaaagtttctgggtttgtgattgttccaacggttaagctcggatgagggtccctggagtcgtagctcccgggaaacgtcgactggctttccacctggacttcatccgtccaggcagcccagaggggcttcaggccccgcccgctctcctgccaactacagcctcgcgactgcgctcagccttcaggccccgccccttcggtcaagcggcgtgctctcactgcacggcgcctgggccccgcgcgccgggacctcggtttcagccgtcctgtcctgccccgaggcccctaggccccgcccctgggccccgcgcgccaggacttcggtttcgaccgtcctgtcccgccccgaggctcctaggccccgccccctctgtccccggcgtgttctcgcggctccgcccctaggacccgcgcgccgggactttggcaagtttcagccgtccggccccgccccctcggtcccacggctctcgcggcccctcccctaagtcccacacgccgggactttggcaagtttcagcctccagccccacccctaggtcccgcccactcggccagcggctggctctcgcggccccgcccctgtgccctgcgagtccctattttgggagcattgcggccgccgtgccccgcccctccccgcgcgccccgcccctctggcggcccgccgtcccagacgcgggaagagcttggccggtttcgagtcgctggcctgcagcttccctgtggtttcccgaggcttccttgcttcccgctctgcgaggagcctttcatccgaaggcgggacgatgccggataatcggcagccgaggaaccggcagccgaggatccgctccgggaacgagcctcgttccgcgcccgccatggaaccggatggtcgcggtgcctgggcccacagtcgcgccgcgctcgaccgcctggagaagctgctgcgctgctcgcgttggtaaagacggagcttcttgggggtggctgcgagggcacgggtcgcacagtttctgggggcggcagaatcttttcaaatcttccgtttcctccttccgttcccgcgctgcagtcgggtcggcgtgcggttagcacctgccgggggatatagtattaacaacttctgcttctcattcactttatttttgggcgacttaccggcctccccttgccctgaatccaactgaaacggtagtttttgaacttcagcgggctgaagaaccgtctggaggtgtggctaaaaaaatgttcatcccggtcgcgcctccagagtttgaatcgggctggggtggggctgaggcttctgcattttttacccggccctggattaccccgctgctttccgggagctgtggcgaattgggctggcgggccgccccggagaccctctaaattagaagcagctgccactctaagttaaactggcctttttgacattttctccgtgccagctttttcgagtgagatgggatggagcatcggatatctaccatagttgtagattgaagatggcacggaatttctcattttcttagtttgctcaaaagactgtatgtctggtgtccccgctcttagtgatgctgtttattgttttccttcatgctgtcacattatgggagtcctctcagggttttcattccgtccaaagacattttcatgagtgttacttcttgctttttttcgtgtagctctttctagtatacaaaccaagaaggtttgtaaaacccaagaaaggtttgtctcattttcatttcttctgaaaagcatttttattgagcacttgctgtgtgtacagctaagtatttctgtatgaagatcactggcagtttttttgttatttgtagctgtcaaaagtttatatcctttttggacttttttcccctttgatttctaacttgcagaacttaagttacctagttgcataaagtataagtaacacaactttttcttttctttccttttttgagacggagtctcgctctgtcgcccaggctggagtgcagtggcacgatcttgtctcactgcaagctccgcctcccgggttcacgccattctcctgcttcagcctcccaagtagctgggactgcaggcgcccgccatcatgcccggctaattttttgtatttttagtacagatggggtttc

SEQ ID NO: 1880557 - DNA, 4001 bp, Homo sapiens
aaagcaaaagaatgatttgagccctaatttagaattttattcagttttcacagtaaattatatttatttttgcttagctcttatacctatctgaataaagggcttaaaattttcttcaacttttccactggtgatttgtttatccaacaaattatttcccaaacaaatactgtcattcaaggtaattggacatttcccagcacttgagaagaatgtataaaactagacataatcccattggttgtgttcttccatgctttaagacttgtttgtatgtctctaggactactgccatttatattatacttgaaaacatttttttgagataatccttgtgaatctatcaccagtacaaatatatgtgattgtattaaagtggaatttttggaatagttcaaagtatattattgaaaggagcatctcatttcatctacaggtggagcaatttctgcttggaaaattttcaatttttgaagtcattattttctaataaaatagcatttcttgaaaaatagtattttcatgagaaaaagaaaaaaaaatatgcgaatcttttaaattcaaaatgaggctaaggggaattcagcgttttcttgcccaaagcagatttccttttatctctggaaatgccaacaggaggccaagggccaagcttcctggccaattacactacactacacggccgttctcccccccaagagctttattcccaactgcacttgggaaccaacttctgactccagacaaatggctgttagttccagctcttacctgccaattatgatactttggatatctgtgccagtctctgggtcagctccatgataagattaagagacctgtttgtttagttcattagcagacattcgttccacccagacagagctgaggctgggggtgggggcgtgaagggaaccagggacctgcgggaatagattttttttttcttactaggaaatgaaagcactatttccccttctggatccctgcttcccttttcagttcctccgttaggggcagacaatagaaggctccaggccccctctcagggcgcccggtccccatcgtcccctcacccccacctcccttccccgcccctcactctccagcttctccaactccagctccaggcggagatttgtcagaaccgttcggttgagactgattatgattgcagcagatgggctggatttgacagcgccgatcctaagcagcttctgatgggggggcccggcggaggggaggggagggggagtgggtagggggtgggaatcgatgggccccagcctcctcatcagagcgcaagccgagccgcccgccgggcgctcccaggcagatctttaacgcgcgcctccaggaggaaagtggcactgcccacccgaggggcctccctgagcgccagtgaaacgtcccgcggcaggagagggctcggggacactggcaggcaggcgcagggggactggcggcggaacacaacaaagcggaggagcgcgaggtgcccgggctgcggtgagcgcgtggcccaggctgcctccgcgctctggacatggcaagtttggcaactcccggctctgcagcgcgcgccttgctgcccccgaagtgaaggcgctgcggagtcaacccctggggacgcagcgcccaccccgcccccagcccgcagcagcatgctccaccgaaggccaggtaaggagacgccagcccactccccgcccaggcgcgccccctgcgcgccgccaccctagccccagcccttcggcacctggctcccactaccccgttcagtccttgtccccgcagactgtatgcttccgcgcctcccgcctgggtctccttgacccctctctgccctctgactcaatgcctccctcaaggtcctgagtcctgtcctttcccctttaccatagcccgacggcagggggagaagttttgggaggtggggcgaggttaggggctctcccttccctgaaagcctgcaccaggacacctgaagggggacagtctgtgggagtcggtccgtgtgtgcgcatccccgcccagctcccacgcagcccgagccccgctctacaggcgcgcacacacgccctcctctccacctgtggggcctcgcttttgtgtgggaagcacaaatgaaaacacacacacgtgcagaaacacttccacgttggcatcttccagagactcctaaagggtgggggcgtaaaggggctgcaggggaggggcagatcttgagttctgtggtcctcccaagcagagggccagcgcctctcctgtcgcttggccttgactccagtgtctaggggccactggagtggcgcctttcccgggccgggaggccattgggtttggcaggggcatagctgtgccactgggaaaactccctccctgctccccagcgaggtcagaggcctgggccactccctggcccggccccagcagggcgcgcctgtccccacctaatgccacgatcccccctcccccaccctccgcactgcctcccttgcgcgtgtaggggagatccctgaccttgtctgcccagctgcaggccacttgcccaggcggcccctcccttgttgccacctcccgcccagctcaccaggagcgtgtgccctgttgctactggcaactgcctgtgcctaaagctcagcccccaaactggcttaatgctgattgatggtcagaaataggatattttctggaacagagcggagcgctggtgcaaggccctctctgctgctgagtcctagggacctcccgggtggcaggccttcctcctcctctccttttggccccaccccaccctacactaccccttagagaaaaagggctgttaggacatcctcatctcaggttaagtgctgagccagcaagccagtgttcgctttcttgctgagtaacaggcagccaccccggaatttctcttcttatccttgaggcttctgagttttatgaatgaggcccgtgttgctggacgctaccacttccctttttattttcatccccactaacttgttcactcgttcactcctccttatacataggtacctaaaatagactacccctctagtaaccagaactattcctgcaaacgcttacaagagcattttccagaaataaatcatttcatatcagtatcccttcctcagtcatttcccggcttcatgccacctccctcctaagacacagaattggtcatttccaccactttaaagacacagtctagataaaaagcctgcatttataatgttctttgcaggagtagcttttgcctattttgtgggggttttgtttgttttttgttttctgtttgatactccctctcaaactgcagcctcccttcccttttctgggatggcagcctccttctctgagccatcctggactaacattttctggactaataaatttctgcacctgtctctactccttctccttcccagtctgactgtaaaggaccagatttcattatcaaatcaattctctttagaagaactttgttctgtagcatttctttccaggaccccaatatttttggcagagtattttcattatttaaattgtcgtacttagcttctttttgcctatggacattactttggaaaaccatgtgatgtttctgagtcactgatttgttcctccaaacaaaacttccttcagaggctcccatatgttgggcaccattgtaggcccccgggggtgggaatggagcaaagacaagacccaaatgggtttcagcattttaaagcccccattacagctggtttatggttattgctatgatggttaatgtgataacagcacactacatttgactaggactttacagtttacaaaaggctttcaaagacattatctccattaatcccagcagcaggaattttaaatagcaaggattccaccaaaaggcccagtaatgctcaccaatcctgcttaaccaaaaagaaaaatattgcaaatcatcctaacagctgatggagctttaaaacacagaataaacaattcat

SEQ ID NO: 1880558 - DNA, 4001 bp, Homo sapiens
gagaacaaaacagtcctttaaattttgcactgctcaattctgtttttcgtttgcattgtctttaatataataaaagttattacctttacatattatcatgtctatttttgatgactcatcaattttgtctattaaagatatttctttaaattatactgaattaacagttattttgatattcaacagtttcttatcaaaagacagaagtttgattctcctcctatagtttaatctcacactcctgaggctaaaagtgtaagttcaggttcaaaagaaaggcttcaatataaaattatctaaatttggataaaataatgatgagctttacattaatataagctcctgagaagcaaatatatcctacagatgtaaatataaaatataaactttaaggaaggaacaaaaactaaatataccaaggaaatatataaagcatctcttacttttcaaaaattttgaaagggtatgacatagagctacagtagtattttccagacttttttgagcccaaaatcagtaatacatattaatataccacagagaaatggtggtatagaaggaataaatgagagttcatgtgcaagaagggaaagataaagagaggtgagttttcaggtgtcaccatcagtaactagcttcaactaattatgtcttgaccagtttattggaaactcctgggttagataatactaatttgtctcatgcgtccagtatagggagcctatggacaggggccaatgtatcttaaacagacacacaaacaatggaaagcaaacattatctgaatgggattgggttaagtttggaaagaattcctcatggagactgatttgtgctggtttggctaggcacaactggcctgttaagagggtaggaccatatataaagtggcttgggaagcagagccggatggaatgttgccctgcagaaagcatattggcttacttgaggtgggggctccctagtaaaaacatttaggattgagggaagatctgattttggatggagtttagatttgctaggaaaggcactagggactattgtcaattctataatagattgtgctgggtgagacaaatcacccaggtcaaaggattggaggatttttattttatttttgtctgagatgggaaaagactccaagtggggaaattaactactgatgcataaattacatgctagattatggtaaaagggaaaaccagaaataaaaacataggtgagaccaaataatttcatgagtggttctacttggatttctgccctatgccttagactttgaggctttgtaactctcaagcattccaaaaggacaaaggagaatgaagaaagaaggtaagaaaaagaagagaatatgtaacagtcgactctagacgagaaaacaccaaacgctcaaatatttgtaaaatgggaggccatgccccaatagcaattgtacgctgtaattacccaacgtttacagaaattcctttaaaaggaccctcggggttgcggtaataattaaactgttaaaaaatatcaaaacaagcggaataaacaaaatcttctattcctaaattgctctagaggttctccaatccccaaagacacagagaagggttgtaagatctcagtacgcacatttgcactttcatctggccagtggcgccagcctatcaaatacagtaaatggcttttccctttcaagaatgttggaactttggaacttacaaaatactaaataatttgcccttattcgaacgggcgcctctcctcttaggtttatagtaatgccacctgaggcgcggctccatagcgatcatcacaggtgtggcgggagggagggcggcagtgaccacgagacggggcgcagagggcgagcgcacggctggcagtgacaggtcgcgacccagctccttgcggagagcagaaaggcccagacgccagggaacaggactagcccagctaccgcctcgcgcctcgcgccctgcgcccacaaacccatcgacgtccgcgcaggcgcactacgccggtgcccggtgcgagggcgtcaccggaagtgtcccgcggcgccccggatgcgaccgggcaacagcggttgccagggcgacgggagctttccggagctgctggtactcccgattggagacgtagaaccgttacttgtcgagggccttagcggccgccgtgaccctctcggggatcccacgatgttcttctacctgagcaagaaagtgagtttcctggggggcgtcctcgtttctccgccattcccgcagcctgcggcgattcccgctgccttcccgagaagccaggctccttcacccggtcctggtcgtggcttcgccattccgcagccatccttcccgccgggtccagcctccgacctcttcctgcggttcccagagcctcagtctttggccgagcttgctgccctctcgcagcactctcccattcctgcccctggctaggtccttttgggtggcttgaggataagtcgccacgtgctaccctatgtttcctcctccacttgttgctgatccacgtgatttaaactctttggatcaccacgagccattgggcaagagaaaagaaataacaataggatagcctaagttgtaggtaaaaaggaagagggactggtggtatggatttataccctctccccgtcctccctttaaaaaatccatccggtgagactctggcgttggcttcctccgcagtcactatccttctcttttgtgcacttctttccctctttcccaaatgctagagcccgggtcagttcaggggaccatgcccattttcacaacagctcattttttttctgcaaggccgttcgtttttcttcttggaagattttcttcagctttcatctcctgcagacttacttcccagctccttcgtgaaaagttgctagtgcggctgtggttgctttttcagatttccattcccaataacgtgaagctgcagtgtgtatcctggaacaaggaacaagggttcatagcatgcggtggtgaagatggattactgaaagttttgaaattagagacgcagacaggtaaatgaatgcaagcccacatgtttggtagtaaattggctaatgttatttgttcagtgcggtctactcatgttatctgtcaatatgcagttctgattattttaaagggaaaactaccaaaacattttatggtgtttttctggagtatatttgcaataaagttcagagaatgttgaatgtaaacatcggatggtttttgctgagttattaatggaaaatgaaaaataatgaagaatgaaaataagtcactgtgttatgctatgtctaattattgtactatattattaggagtctaaaagaaatcctgtgagtcaacatttcactaagaaaatctggcagattgtttacaggtctgtgtcatcctttctgcttatcagatgcattaatggttattcacctagtgtccaagaacagaaaatgggatacgttttacatttctattagtaggtctcttgtctttgctgcttgatttctttctttatctagttctctggaatcacagcaaacagcttcccacttcttagcccccctagattgaagacctagataaggtaattggagttaaatctcagctcttccacaagactactgaatgactttcaacaagttagctgaggatcttactactttagtttagtcttccataaaatgaaaatgtagggggttaaactgcattacatttttggattccttacaacatagcttctcaaactgtattaggtataagaatcactggaagaggttgttaagatggatttcatgctctacccccacacaatagacccgggatggggcctgagaatttccatttctagtgaagctgagttgctggtcctcagaccgcactttgaatagcattaccttacaactttgaatgcggtatgaataataaatacttattgacgattttccatgtagtggatgtttaaccttcacaatcttatttgacttcacaataatc

SEQ ID NO: 1880559 - DNA, 4001 bp, Homo sapiens
ccaaggctcccagggaccaaaaaagaaggtgcaaaaacaaatgcttaaaagtaactaagtaactctgacctgtagcgctgaagttaattccctttctacatcatttccataatatctccatacccaaatggtatcccaaaatacattaaggaattaactaagaagttgcatggaaaataatagcagcggtaaagtgcaattaatgccataggcaggaaaggcaaatacactgatttagctgagatttgacacaactttggaattcaacttggcaaagcaagaggggacatcggaaaagccataccttgctaagggagaaagcggctttctattctgaagcgactatatatgtgcagtcatagaaggcccaatccacgggagaaatgagcagggaagtttatgggaagaatccaatgcaagaaggcatttacttgcagctaaagcgctgatcttgaggggttgaggaagacagaaaccttttttaatgacaaggaaacaaaagcagaaataatactttttaaattatttttaaaatcttacttgtgatgcatacttaatgtcccatagttgtgtgggcttttctccagaagtacagcttcacaaagggttatttatttatttactttattatactttgaattctgggatacatgtgcagaatgtgcaagtttgttacataggtatacatgtgccatggtggtttgctgtacccatcaacccgtcatctacattgggtatttctcctaatgctatccctccccttgcccccaacccctgacaggccctggtgtgtgatgtttctctccctgtgtccgtgtgttctcattgttcaattcccacttatgagtgagaacatgcagtgtttggttttctgttcctatgttagcttgctgagaatgatgttttccagcttcatccatggttattttgagaaaagtttagagtaaaatgaaggatagacaaaggccctctgtggtcagagtttgtgctctgaaagggggtccctttctccatggtgctaggtagtcatggtgatgcacagacaaaacagaaatgatctccttgttttcttcaacaaagttccaattactcccagtatcttcaaaatgggtgagaatgaacctctgtgagtgcaacatgctccatggtttgtgtttatttactttatttttgctgtaaggttgcaggctcctttgtagtctacaaacaccttgagaacagggatggtctttactcatcattgttcttattcctcagctcaaggcctggacacataccaggcatttaataaagtgagttctgttaacctaatctttaaatgttgatattgctttcttttcaggagataaacttatttaggtcacacacatacacacacaccacatgcattcacactccagaaaactaaatctgacacatacacacacacaaagaacaactgatgtaaaaaataataatggtaaattgaaggcaataaaacattcatttttatactaaaattaaaaaataagatacaaagaaagctgagcatagaagattgacatatacagaagctataggaaaacagacccacaaagcattatttcatatctccatgcagtgattttttttttctctaacttggggaatgaggtagaatttctattgccccccactttctgttggctgctgatggttacatttcctcttctgagagtctcacatattgaccatagatgttgttgtcactaaataaaccacatgcatcattaattaaatacgaattagtaaaaaaggaaagaggtatagtgggttgaataatttttccctaaatttatgtacatctgtgtcttggttcatttgagctgctataacaaaaataccatagactaggtaatttataaacaagagaaaatttattgctaatagtttctggaggctgcaagttcaagatgacttcctattcagcgtttggcaggggtctactcactgcttcattgatggtgccttcttgctgtgtcctcacacggaagaaaggttgaccaaggtctctgaagcctctttatagggcagtaatccaattcatggggaatctgtcctcatggcttaatcacccccacctccaccccgacccaaaagaaaagctgcatctcttaatactctcacattggggatcaagtttgaacatatgggctgggcgtggtggctcatgcctgtaatcccagcactttgggtgtgctgaggtgggaggatcacctgaggtcaggagtttgagaccagcctggccaacatggtgaaaccccatctctactaaaaatacaaaaaatagctgggcgtggtggcacacgcctgtaatcccagctaccaaagaggctgaggcaggagaaccacttgaaccctggaggtggaggttgcagagagccgtgatggtgccactgcactccagcctgggtaacagagcaagactgtgtcaaaaaaaaaaaaaaaacagtttgagcatatgaattttgggggtatacaaacattcagaccattccaacctggaacatcagaatgtgaccttacttgaaaacagaatctttgtagatatatttgggatataaaaaggattctggaataaaaccaccctggatttacggtgcacacaaaaatctaatgccaggtgtccgtatgagaagatggaaaaatacaaagacacaggggataaggccatttgtaaactctagcagagactggagttatgctgccacagaccaagaaatgccaagacccatcagaagctgaaagaggcaaggaaggattgcagctttccaaggaagggtgtccctactaacacaccttgattttggacttctgaccttcacaacagtgagagaatacattcttgttgtttaagccacccagtttgtggtactttgttatggtggcctcaggaaactaatacaggaggttttctgtttagcatattataggatattgacttgagtaggagctcagattccacagagagatagttggatgaggtctatgtattaacaccatattgaatacaaactctgtaagtgggaagcattgtttccaggaagagcaaataccacattccaaccatatttatggttgttgagtcagggagattcctgtcaacactaccttatcagcaactgtctggctgagagtaagaataaacttttgcctcttttatatacagattttatgtagttaattaaataaatgttaataaaaaccatattaaagcaatttctaaaaatatcttttttagccacttttttttaggtcttcaatagaataatgaaatccgtgaaaaatcctcaggtcttcagggtttcatcttgatatcttatcattctgtcaaactataggctgagggagaaacattctgcagcttcccttagaagacctgctttcaatctatctttccacagaggcatttttcaggattcctgtgtctagatttcaccctgggaaaaccagggataaaaccatcagtcacattaattgcggcccagggaatgttcagctggcacatgtgactagaccagtggtagaaggcatgcaggacttaggattttacatttctttacatttggcctttacatttcttgttacagacattgtttattaatgtcatttcacacaggaaaaaaatgaagatcaggatatttaagtgaattgctcaagattacacagctagtaaatgacagactcaagtcctgagcccgacatagtcttgccccagggctgtgcgccatgttgcttttctcaaaatgtgcttaagcctatttgcttgatcaccctccttcttgagctctagaagggcaaacaccatctgtctgttgaaaacaaaatgagagtgcctattttttgccagacactgtgagagtaaacagtggtttataatccaagctcaaacagtgtattggctgagtaaaatttaataattactttacatcatttagatagtctggttggatgattggcagtaattttcctatgtttttcac

SEQ ID NO: 1880560 - DNA, 4001 bp, Homo sapiens
acaccccagccgtaaaagatatttcaatctatgcatgctctgatccaccttaccctagctccctagttatagtttatgtccagcaaagacttgtcactctctgtccaagacttccaggggctgtgcattctcttctgctatttctcaatgtgtgattcacatggcaccagtgactcagccgccagtgaaccatataaaacaatagattactggagttcacaccagttctaatgactctccatccagacctggcagaactgaggaatcagcatttgacccaggcactccactgccatcccctgctaggaactctcagagtcaaagatcaactgtgagtgaccacttgatctggaagagggcacactgccatggaagcctggggcctaaaccctcaccccttggttgctggtgctttctgtgaaatgagtgtaagaattcctgtgtcacagagaagaaatgaagttggaagatgataccctctgtggccatgttttgtaagctctgaaatatatatataacataaaaaagctgttagcattaccttcaagcccccagtctggtctctgcagcctctgccacggggtccctcccaaggccaaaaaaagacaaaagcatccatagagttgacatcatggtggtggggcgcagcacagaatctacaagtaagggtgggaaaataagtgttaattaattctcttttatattgataattgaaagaaacactctattaaccctttaaaaatgttaagtgcattcatgtactttcttttttgtatcttgtaagatgggtataattatcctcccttctacacatgagaaaacgaaaggtcaaaatgagatttttatgggaggagaaagccaaacccagctcagccaatcgcagctcagctaccacccgtgtgacatttggccaagtcacctgaggccttggttttctctgctacaacataggcccgatggctgtattcactcaatggtgaaggcaggtattgagtaagataaggtatgtgctcagcccaatatgggggttggcacattgcatgacactgtgagtctagttccaggatacctgctcccgattctctgctctcagcctaatattgaggaacttcaggggaccctaaaaaatacaagaggaatgaaggcagatggggatggctgctggaatccggccatgctctgcccagcaataaactaggtgaagagtgaagagttttattctgagactattaagatgtctgttgaccaaagcaggctccccctggatctattcactaaacacagctattggaccagggcagagctgggactaggaagacacaggggatgatcgagacaccacccaaacccaatttggaattcctattgtcctgcttttccccaaaggcaacttcagttggagagagtagaattcagtgggcaaagttgtgagccatcctcaggaatgtctgtctgggtcactttacctgatattgccaggtactgatagcttccttgctccctgcctggagcctgaagctgctgggggcagttacagaagacaactggagcccttctgtctctttcctgtgcgggcccttggaaaaccgctgctctctctcaccctcattccttccttcaatatttgttgagcacctgctatatgccaggtttcaagggcaagaaagaaagtaaaacactccaaaagattttcaaaaaagaaattattctaaagataatacatattaaaattaaatatggctgggcgttgtggctaaccctgtaatccagcactttgggaggccgaggtgggcaaatcacttgaggtcaggagtttcagaccagcctggccaacagggcagaatcccgtctctactaaaaatagaaaaattaaccgggcgtggtggcacatgtctctgttagaaacaagtgctcggtgccgaaaagaagaaccagcactcaggcaaaaagttttctcagtaaggcaactacttctacagaagggtgctgcctgcatcagccatgatcacaagagtaccccaacaaaggagagaaggggtttttatccctaacgcagttgttgtttctgtgtcctttccccattggctggagttggacctcacaatctaagctgacctgattggctaagacttaaaattctccaaatagagtaaacgcgcaatttgctaaaagaggagtggggaggagagaccgtctgttactaactaggcaggagggaaggcatgcctaggcatgcctggatatgtatgggtacagcaagggggttggttacagaacagaaggaagtttgaacctctttctaaataaggtagcgagacgaggactttgaaggccaaagtggagaaaggggaaagcagggagaagggctagcttataaccttacaacttataaacagggaggtaagttttgaagaggaacttagttgtgctaacacctgtaatcctagctactctggaggctgaggcatgagaatcgcttggacctgggaggtggaggttgcagtgagctgagatcacgcctggtgatggagcaagactctgtctcaaaaaaaaatttttttaataaaataaaatatagctcacaatgattgagcagtcactgtttgccagggcaggcactgggtgttcactcttggactcctcacagccccccgctgaaagatgtaggaacaaagggacttaagaacacagagagcgagcaaactgttagggacagggggttgtcaaggcaggattcttcagaggaggctgtgtaagctgtcagctgggggaaactgggggaaaccaggagaaaaagttgtttacaaaaagtaacagcaagtggaaggcaggaggtgggagaggggtgaatatgcgtgtagggcaggttgagatggggttggagggaggggttgctgcctcctaggaagggccttacgctgtgggaccccccacgtggtggttatacagggagatcatgaatatgtaatcagacctgtgttttatgattcctctagagttaaaatggggaggactgcaagggccgttcccgggtgccatagaggaggcctgctgcagtggggtctgaatggagggtcaaattcgaaggagatttctgaggcaaaatcttaggattttagtagctatttctcagagctgtttcctcagcctcctgtgggaaggtgcagcaagcgcctcaaaagcagcgtgttggggtctcaactcatccttctctcctgtgcctgatcccttcctgggctcccctaccgctgtcctctcctgctccagcagatccaggtcatggctcaccttcttgctctgtccacctaggggagagacagtgatggtctctccagaaacagacatttccaaggtttctgaacatctcagattaagaactagcgaaggatatctccgaatccagctgatcttcttggtccaggtagttgttcacactgatggctattaatcaatgaaacttggacattagggagcaagacaaccgtttttattaaagttttagaataggccgggcacaatgtctcacgcctgtaatcccatcactttgggaggccgaggtgggtggatcatctgaggtcaggagttcaagaccagcctggccaacatggcgaaaccctgtctctactaaaaatacaaaaaattagcatgcacctgtaatcccagctacttgggaggctgaggcaagagaatcgcttgagcatggaaggcagaggttgcagtgagccgagatcgtgccattgcattccagcctgggtgacagaggaaaactctgtttcaaaaaataaataaataaaaataaaaaaataaagttttagaataaaacttttatttagaataaagtgacatgcaagttttcaaaaatgactaaaactttagggttggaatcaaatctgggatttaaattctggctttgttacatgtggacttgagccaggtacttaacctccctcaacctctgtttcttcatctgaatatgaagacgaaatatgtgtggtgtgtgc

SEQ ID NO: 1880561 - DNA, 4001 bp, Homo sapiens
gtattagaaggggaagggggatgtaaagcttatgtgatttacatcattttgttaatctgctaatctacttccctggaaggtgagaaagagtgttgtctgccttctgcaattgaagagactagggcagaaacttaattatgttcttaccctgtgtatacctggctgtcatctggctggcaactagtccacaaactattggttcaggcatttgcctggcaataatgttagccatcatttaaattgttaaatatggatcagaagatctctaagaattactgatatgcagctattaatactggatgtaaataatattatttggggtgtgggtaaatcatttgactggaaccacatttaaaaaaaggacttggaaattttatttttgaaatgctgttggggagatggcattgatgaaaaaaaaaattgaaaatggaaaaaaacatcatctacaaagagatgggtaaaaatgactaagcaaagaagccttgtcaccttcgacctgatgcttcattgtatcagaagaaagtaaacagattgctaacaaagagaccaccccttctaatttccaaaaccggcccagcaacaagagggagaaaatagagaagagtgcactgcgtggtggctcagggtgatcctttaatttgagtgttaaaaatgagggcacagacctagaggtttttaatggtccgcgggtggacttcagattctgaacactcctccaccttctgtggagaattcgggacacggtggagtttaaccagtatcttaaatcccagggacagggtggagattgctttgtgatcctgattaattaaaaggaaagaaatcaaagcagacatctctcctttttccatttgagccgcagagccatggaggggaacttgtgctctctggtgcttgcagctatgttccctggctttcatcgtcttggcttttccccttgtatttctaatgctgtgataccaggccaataaaatggaatctacaaaactgcaaaacaaaattgtgtgtatgtgtgtgtgtattagaattttactgaagataattgcaacactttaagcacaaaatttttaacttaaaatgtatgagtaatgaagttttaagaagcaaaatgtgctcaagcggagtatttgtagtcccttttttgtaagaggttccccagacctctgggtgcatcagcaaactgtcctacacgatggagcgtgcagctgcaatttggccccgggcaccacctatccagagttactacctaatgcattttacatttgcacacattgtcaaggggtggggggcagctaagaaggggcctcccccccaccccccagcgttctgtttccttttgtcgcggccgtcagctgacacgtggaaaatgtggtgtacggttttgtttgccttttatctgtaattaaggatcccttgtctggggcttgctacctcttttctttctgcctccctgccgctcgggtcttccgccctcggtcaggtctggcctggcgcaccgcagcctggggactccgggtcgccgggcggagaagcaggcagtgggcgcagggacctccgcggagcccggcgctcgcctgccgagagagcgcacgccccggcacgccggccccggctcgcccgagcccccgaccagctagtgccttgcgtcggggcagctgcgcccgcgttgcccagagcgggtcgccttgccgcgcgtccgttccctccacaccgctgcgcctgagcggccagcgagcccgagctccggtctgcggcggcgcccgccctcgacgcctagctcagtctcgtccagagcggtggggggagttttctgcacctttcaggcgcgggaacatgtcgagggacgggggaggacgttgaggtcacgaagtcatcacccactcctctcggctgcgtgggcgctgcgggagcgcagagccggagcacgaggggctcgtcccagggcgcgggccccgccagcccctggcgctcccacccgcgcgcactccctcgcacacccgcgctggcacgcgcaccctggcgcgcgaactccctgccacgcgcgcgctgtcacgcacacacaccggcacgcacccgccacgctcgcgccgacactcccaggctggcacacgcacacgcggtggggacccacccctgcccgggtttggctgcgccgggctcgcgtgctctctctcgggcacccccgggaagggagcgcagctcggtgggccggcaccctgtgctttatgcgtctgaggatttcattgaactcggttccctgagtcggccaggctcagtcctcagcgagggaatacgatgaagacgcactaagcaaaaccagaaacaccgatgcctactaccttttcaaaaaacataacttgccctcagcaatcccgcgaaggggagtggggatgggcacggggactctccgaaagggattttatctacacagtttagaataactcctgtctctggtatgttcggatatgtgatttaaatctcaccccccggacgctttctttttcacttcacacctgtatattgaaatacaaacctcatttctcctcctcaccaccaactggttatttaggaggagtggagaagaggagttaagcaatattggggcaggagaatatttagaagcattacattgatttgtcactcatttgctctgattagctttttgaaaacttgtgaagatattcctattttgaagcttgtattttgttaaaagcctccctcacactgccgtgatttatcattatttatctgagtatacacacgtatgtataggagaaaaggaatgctgatccttcctgatttcagcagtgccgttttcctttctatccatgtggttttagcataattttctccctctttctcaccaatagagatattatagtacgcaaaagcagggcacacctgtgaccaaatacaagcaacattagcctggagtgtttgcgaatactccttgtcatctgtcgctcaagatttcccccctcagatttgaaatattccccaaactggtttaaaggtgtgagcgggtgggttaacacgtgagagcagtccaaaagtaaagcgaggttgggagagggtggcctacataaaccaactcttggaaggctgaacaagaacgcatgggaagtgcattaagaagagactgtaaacaatgataatcagggctttcaaaaatcataaaacggattgaaatatctgattcattatttattcatcacagcgcaactttgcgaatctgagaatagtgtttggaaaccaagtgccttctatttagtacatcaaatcagcagatgggtctcccttccaaactgcggctaaagggttaaagctataattttagaaaagaatcttaggaaatgacactcagatctaatatatttccttttctttctggcaataatatcccccaaagaataaatatatacttattgatatcatgataatgtttctcattctgagtacaagtgtcagactgattcccgtttgtgtaagtgtttttaaaactgcgaggacactttcgctactctgaaagctgacgagccaatgaaggggagcttcttttaactccataatagcaggttacatagtaaatgaacactgatggtcaaatagccaattatggtataaatatccgttgtttacagagaggtgttaaatgagccttggagtacaagggattaggccgatctatgctacaatttgttcttcaacccattatgtcttccctttaaaaggccagtgccattgtaggtagtacgcacacagaacatacttctctatgttgattttagtttgctttatttcgatgcacactgttgtttactttttaaaatttaaataaatgtcagcattgtataatttctatgttaacaaagcagtgagcaaaatcccttgtatgtttataaaatattattgtttaattcacatagtttagaaattccaaatgttgagaataggaaggaggccaaataccatctgtttataactatgatgcatcgtaatat

SEQ ID NO: 1880562 - DNA, 4001 bp, Homo sapiens
atggtgctggaattgaactgaagataacagctctagtatttgaacctagaacgcctgtgtagctgtcaaagatacagatggatacatatataaatacttacagatatgcgtatttagtcaggttagcatatccacaaatatttccttgctctgtcagctgagagtgtctagaagcaacaacatcccaaatgtccaaatcttgatttctaatatcattttccattaaaagtacccttggctttttggggaagcagctgattctaggattggggcagggaatatacaagatgagcctggagcaacttatagaaattaagaaaatgctcaagaaaaaaaatcaataaacataaaacgaggagggtttgtcaaaaagacacaaatgccaactaaaggaaatctcaatagccaaagctggaaccaatatgaacaacaaaataaagtagtattggattataacccaaaatgtaaaataaatatccatgagtccatactgacataaatgattgaatacataaataaatgcagtacagacaaatctcccatgcagaagaattccaaataattcatgaagatattctgtcctcataaaggtggagtataacaatttcccattcctatagtttgggctgcacagagagatgtccttccaaatagtatagtatggagaggaaaagaaaaacagtaacttcacagtggagaaacctgacaaaccctacatagggaggtggaagggcttactagatgaaacaaaggggatctttgtagaactataaaacttttctgtatgacactgtaataatggtgataaaggttagcatcaacagtaataagtcatgttgatagtatatacccttgatgtgatgtgatgagaagatcactttaccttacctcttaactcaagaaaaacccataacctcagttaatgcatgagaaaaatacaggcaaaacccaattgaaggacatttgaccaaatgaccaataagtcgcttcaaaactattaaggttatcaaaaacaaggaaagtttgagaaacggtcacggtccagaggagcctggaagacatggtgatgtactccggacaggatcctggaatggaaaagaataccaggtcgaaaactaaggacatctggaataaaatatgggcttatgggctttaatcaatttttaaaaaagtattagatacatgaaaatgatacacgatttacaaatcaatcgcctaatatttatcgagcatattgagagcctggcactgtggtagggctggggacacagaaagaggtaagtgccctatgctcaaaaacagcgattcatgaaaaataaacaactatgacaaaaagaacagaagactgtatctcctggaggcagtaaggaaggcttaagttgggaggactatcaaacgcatcaaggagttactgaagattaactgacccgcctaacgcaggtcggaagccctcctatccatccacccaaatcacccctgccccaccttttctcctcccttgcgtttacccaatggcaggtcggctccacgtaggcctactttgcgcgtgcgcatcatcgtttcgacgcgctcggaagcaacttcctttgcctgctcaccgccagcgtaggtgctaccaccgctgccgtcgccgccgccattttgatggcaggaagagtccggttctgggacagctggagacagtggtggtgactggtacggatggtttccgcccatgttagcccctccaaatttgcccgtgttagggttacagccctcggtattgcccgtattttcactgggtccctgtcgttgtccccagccatcctgtccgtctgtctttagtctcttttctgcttcctcatctttccgatcagcctgaagctttgcttggagctgttgttacgcagccccaacttctgttaaagcagccgcttcgatcctctggactgaattttggccacccagcccccattcccctcccggatctggtccgagttgtttttccgcggctgtaaaccggaagggctctgagctgcactgccggctccgggctgggggatctgtgcctggcatgggggcgagttctggcctccttagggtacggggagagcttggactttggtcctgacgtggtggacgacacaccttcgaagagtggacgttacctcagttgtctgttgttagagtttaatcgatcactcgtctgttttgttgtgttctttcccagaaataactttaccaaaggaaagctattttgcgaactatcttctccagcggagatggccaatgtgagtaaattatctcttaagaatcagcatagtaaactcgtttgggaatgttaggaatgaaagaacgggtttaattatgatggcattgggtggtatagtgttagatataatgtatcaaaaatgtcaagggaagcaagtggtgtgaaattatgttatgctttgaagatggtagcattctttgcactgcaaatacacttatttatacaatttcatttgtacagatgtggaaattcaagcaccctttcggtattttttaaatacagcgtttcagtaaatattagaatctatgtttaggcccttttttagcttttgggttagctaaactgaagggtttttttaatctttttttcttttttttaaaacagtttccatattggaagtgaccttctaaatcctacaaaataagaataggagatactctcacacaccagagatatttattgactgtaactttgcagtgattagacacatcctatctatagaattcatatgtagcggtcataagacatatataaaaacagctacaattaaagtataaagtaataattttttttagaacctacacgaaggtgcaatgcagattcaagtctttgtggagaggagtttgggatcacttcatgagggaaacatttaacttgaggtttgaaagataggtgggatttgtatagtctaaaatatgagcgggaaggacaggaaggtatattcaaagaactccccaacccgcctacccctttgaaaaactgaaaagtgactgctgcctgccaacctgaatgtaagctgcatgaaagagataagtgggagataaggttgaattgtgaggttggtaccaagtaaatgagagccttgaatgccgaactcagtaatttagacttcattctttaaattgtgattattcacttagagctgtgtgctaggaagatttatatggcagcatttagccaggatgctatttctgtaattgaacatggtatattaagtctaaagtgtgactatagagacaagtcataagaatagattactagtcttggccaagttctatggtgaatttttgcctgcccataacctgcacagaaagagaatgctgtaaaagaagtatgtggtactttcaaaggagagaaattaattgaagtagaatagaatgctattatttgacctggttttattttggtttaaatgaataaattataatagttcagtagggaagatccttttataagtcttttgttagaaagaagttcatattaaaataaatttaagtttcagtatccaaatgtacgataacaatttttgtgttaatttatatggattgtaaattgtggatggatgttactaatgaaatatgcagatagtgtttcataacaaggggcaagaatgttcatgtttcagagtctagacaggtacattaagaagccttcatggggactgtgacaaagcctttctgaacaaaggggagcaacctttccttagctacagtgatttgttgctaactaatgccatttggttatgtgaatccaatactgccagatcttctgagttttcaagaagagccaaatttctggaccttttgtgtaaatattgcgatttctcaatgtttgtatttaattcaaatatcttgcaacactgtgggatgcacaaaaatgtctggatagatgtggatgcactacataaactaccagtttttagtttttgtacagaccatattttttcctcacatgatcaaaagcagaactt

SEQ ID NO: 1880563 - DNA, 4001 bp, Homo sapiens
taatatatgctggggataaaaagatgaggggacacacctggcttaattacttacagtcttgtcagctttacatgcaagtagatgactttgcaaataaataaaatatatacaataatatttgaactaggcccagaatttagaagtaatactgagttaggagtaatgacttcattgttctgaaaacaagttcgagtttcctatgcattaaggtaagatgaaatgtttattcagaatgtacaactgacaagagatcttcacattagtgtactctgtccctctgtcccttttatctagactctaatgccctcattttcaagtagtaagatagtgtatgtgtgtgtgtgtgcgtgcatgtgtgtgtgcgtgtgtgtgtgtgttttaagtgaaaagggtggtggaacaaaagttgtttgtacctctgcttcccatctcctaagggaaataaattgtccttagctttctttgctattacttccatttgttagcaaaatttgacttttacaggcttatgctgataactaagccagaataaatgaagtgagagccatacagattcatgactgagatgtgtaagggatttgcacaaaaggatacagtttatggtttaattcctcaaggaaagtatcatatgcaagtgagtcatttttgcatgacctcagctgagaagaagctggattgaaagaaattccaaagacatggaagaatggcagttagtttataagaggtatttggaaaatcatatagttattcattctgacacacaccaaacaccggatttcacaatgcaggagcaaataaaaataaagaaagaacaaaacaccaaaaaaggagtagaatcttaccttaataggtaatgaattattaagtgtatgctacaaaggaaaaaaagggaaatagaacaatgttgttgaaaaaactttatgtgatgatgaaaatgtttacaccaacattattcaatacagtagtcactagccatatgtggctattgagtgcttaaaatgtttctgatgtgaataaataactgaattttacgtttttctctaattttagtgaatttaaacttagttacatttggctagtacttctatcttagcctgtctcaaaaatagcactaaagatgaggaataccaaattcttctctaaaatctttcacaatttcattggctgatctccaccaaatatctcctttgtattttattttcctgtctttaaaatggtgcttacaattcatagtctctaagtaaaaacattagtgacataatatgatttaaatacaaggttattcaatataaatgtcctattgatagatttctaatctaagaggtaagatatttggaagttaatttcaacttgtattgaattactaagggtagcataattacagaaatgattatgaaaagttctgtctgctcaaaaagcttaaacaaacatagaaagatagatggtgggccaggcgcggtggcttatgcctgtaatcccagcactttgggaagccgaggcgggtggatcacctgaggtcaggagttggagaacagcctgaccaacatggagaaactctgtctctactaaaaatacaaaattagctgggcatggtggcatgtgcctataatcccagctacttggaaggctgaggcaggagaatcacttgaacccaggaggcgaaggttgcagtgagccgagatcatggcactgcactccaacctgggcgacaagagtggaaaaaaaaaaaaaaagaaaagaaaagaaagaaagaaactccgtctcaaaataaaaaaaaaaagaaagatagatgttgatattatttcaattaagtaatgggaaaatagatgagggggcaataaactctgacttggagaatgtattagtctatcttcacactgctgataaagacatacccaagactgggtaatttatagagaaaaagaggtgtaatggactcacagttccacgtggctggggaggcctcataatcacggtggaaggcgaaaggcatgtcttacatggtggtagataaggagaatgaaagccaagtgaaaaaggaaaccccttattaaaccatcagatcttgtgagactttttcactgccatgagaacagtatgaggaaaaccaccccatgattcacttatattccactgggtccctcccacaacacgtgggaattatgggagctacaattcatgatgagatttgtatgaggacacagagccaaaccgtatcagagagaactgggatattgaaagacaaagttgaatttgggctgagtgtgacacagcaggaagaaaagcctttctaagcaaaatagtgtggcatgagcacaggcatagagggaaagtcagagccttcagtacgtgatgaattagtctggtctggctctagggcagcacattgctagttaggactggtgggaaacgtaggttgaactgattttctagggggcctaaaatgctcactatggatttgtattgatattctggaggcaatgaagtgaaactagaaggttttggataaatgagaaacaagataagatctgtgattttgaagaataactctagtgtcagtgtcaatgaacttgcagagaaagatgtgcaaggatgaagattaattgggagaatatagaaagcggtcaagcaaaaggtggtaagattaactaggatcctaatgaagcatcaataaaaagcgaccttataaggattgagtaaagtccacaaaatctggtgacccaactcacgtgggtgttcagggaagacagcaagacaaaggtaactaggttttaagtttaggtggctaagtgataacattcatcaaaccagggagcaaggagaagtctgggcttgttgattttgaagcattagcttggcatccttttagagattaacaaataaatacagacatgaatgggagtcttctaatagacattaggcctgcatcagaatcaacatgtccaaacctgagcaaacatctattggatgtccaactgggtgttggaaatgcaaatcttggtctcaacagagaggtcagaaatagctatctgattcatgtgagtagaaatgatactgaaagttgtaaaggtgtgactttagttaagaagagaacattgtgtagctcacaaaaaagaataagggcaggtccttgggggcaggagtcagcaagggagatggagaagtaaaaatagaattcgaagaactcaggaagaaagtaatcaagtcaagaaaataatagattgtatatactggaatctaagcaccaattaaaatgcaaacacaaaacatgctgttaattactttctgtaaatcactttctacctgagcaggccccagagtgggacaaagatagggaaacttcatgtaaacagtggttgtttgacagaaagaccaatgtctgggggtgggtagggtttaagaagcaatagacgcagcaaaagaggtgttccctgcaatgtgagatctcatacaattgaggggaagatgggagtggggagatgcttttggtgctcacatcacatccctggacccacttaattaggcagttgagactctgagtgagccaatgttagttatcagcaatgacaaataatcaaaataatcaatgatccgctgtttctttctgtctggaccctgagcaagttgcatcaactctctgaatctcggtttcctcccatcaaaaagaggtttaattacaggattcatagcggtgaggattaaataagatgatgcatctgacacaactgggggttaattaatgttagttcccttccgcttttgctcctcttcatggttttgtaccaggcacgtccaaccaatgagtattcctaatgtgtcagtggaatgcagtgtttccatgttagaagaaatctcaggcccctgacaaaggacaattttatctcacccgaagctggttccataaatactttgttgcataaacgaatgaataatcactgaatcagtcaatcaatcctgttcatttagctcccccatccaggacctacactcttgaaccacct

SEQ ID NO: 1880564 - DNA, 4001 bp, Homo sapiens
gatgaaaaggtaggagtgagagaaacccagaggagtgtgaattgcacacagacagacaggcatgctgacctttgagacagcatccaattcaatatttcttacctcatgggctcatgtgagatggaaaggtaaacacaacttctgatgcacaacagtgagcaggcattgtgttgaagaaatacctcctccatgtcctcttgtgaaacggagggcccagtcagtggccagctctcaagccttcttagtccatgatggtcaatgtgccccatgaggggtctacttctatttttcacctgtgtattattcccaggaccgctgtaacaaattgccacaaactgggtggtttaaaatagcagaaatgtattctctcatagttctagaggctagaagtccaaaatgaagatgttggcagagccatgctgtctctgaaacttcaagggaagatcccttcttgcctcttccaactgctggtggctcttggtgttccttggcttgtggcaacagaactcaatctctgtctctgtctttaagtgaccttcctttctgtgtgtcttcatctgtcttcccataagggcaccagccattggatttaaggcccaactgaatccagtatgactatatattaactaattacacttatttctaaataagctcacactctgaggttatgggatgacataagttttgtggggatatttttcaacctagtacaacctataagaataaagaaccataatttatagacacctgtgctaatctctagaagtatctgggaagcatgcttagtgcctaaccatttttaaaatgtggataaagatgcttctaaggatcatattccattcctcaaccagagggagacagcttcacgtgtgcaaaactaccggcctcttaggaccaaaggcttccctatacatatgtgaccaaacccacattcttcaagggcctttcttcatatgacttttctctgaaggtactttttccagaggacgttattagtcttcctttagtcccataaatttgagtagacttttataaatttagaacttctcaaggtccccaaaatccatgctcccaggatttctaggtaggaagggcaggaataaagcagtgaagaatcatgaaatcacaaacatttgaaggaaattgaggcactgggcagccaaccctttatgtaagatagtaccttaaatttctttgttagctccgttaagcaggaatggccaagtatgaaaccagaattttatgtagtagatgatttctgaaggatagaagaatatattatgagggaggtaggagggcccaaaacaaatctcacctgttttatcagttagcctcaagctattcctgaagctcacagtgacctctttccatcatctcaattcttatgcaccaaacaatcaacataggtgttgtgtttagcctctgtgttgtatttggccaatatcttctctcttgaacttgttaaaccttccaagagtggaggaatgtgagggagtagagtataagtgaagacattttctgttctctgggcccaaggaggacagggggcctctcatgcccagcacagtggctagggaaaagcaggaacagcattctctagggcaggtgacatggatttgaacattagagcaaaactcctttagctttaccatctcctgctggtccctctgtagacctttttcaccaatatgtggtctttcctatcagttaaaatgctttagttgtgattaataaaagaaccccccaaaatgacctataaaacgaggggtttattacctcatacaacaagaattgtagagtctagaagtttccaagattagttaatttagcagcttaataatatgaagggccctggtgcttttggtcttccttctctgacttggctatgttcctgttgtggtcttgagatggctgaggctgatgcagacatgaagaccagggccacaatcaggggtgggccatcagtgctctcctatagggccccaggttcagcaggtcctgcttgggtgctaatgctctgtggtcactgtattgaaattcttagtaattctatttagaatgtgtgctttgtaagtgaagtatgatggaacaaagaagcatgtaccaagggttcagagccccaactcatgggcagtccttcctgacctccttgctgagacaagttctaggccacttgctcccagccactgcccaacagctgctgcccacctctgcctccagcagaggttggagtataagtgcaggggatcggggtcagaataatgtgtgctgtacatgctgagttgcaggacgaggctctaggtgtctgtgagggtaccccaaacccaaagcacaaataaaaaccaccatgacaagtcaagaaggagagatcattgataaaaggaaaatgtttgattctgcttcttgaataaggatcttcacattttaagttttcacttgggcctgcaagttatgtggctaaccctagttcagaaatccagcatagaaaacagattttaccttgaaaggattttctctgtctagaaaagtcttcttcagatgcttcgaggagatcttagttccacatagctcagagttagagcacacgtccatgcctgagacaatgactggccagcaattaagactactctgattgatacagatcaatagaggttcacttttgggtcaaagatggtctccatccctgaactcatggtagctcccagtattagaacaaagttggggttcagcaagtaaggaaaaatcagggtagaatagtgggaggaggaggatttaggtagaaaattagcagtgtctgtcacactgttttctctataatttatctcccttttcattccattatatcagctagagaagctataaggattctcagaaatgacctaaccaatgctcttccagttcttttgcagtggaaacttttcttcaaatgaaatcacacagagaacctcaaaatcagaaggcactaagaaaacgaaagggtagctactttggttgaaacagatgagtgttgcttgggtcctaacaaattaggaaaccattaccctaaagtaatagtctaccaaaccaatataattatgtcaacttaaatgttgttcttgaaaaatctttccatgctactaacattcttttttaagacctcaaaaatgtcctaaaaatagatgtttgtcagacacatgggcacttcagtttattttcttactcaaatgcaacattttttctttttcagggcatataagataaactaacccatcaggaagagatactataacaattaatgtttttctagtttaattcttgtttttacctaggcctgagcatcccaccaagccttctgatgtttggcctgtgtacttaatttccaaaccaccagaatcacattaaaattcctaagcatttgtgattggatgacttgattgactagcagaatgtaactgggcaagaaactgagttggaagttgattttgttttcttttcacaccaaactctcagctactgggcagacagatcatgcatctttctttacccattgtcccagaagttttttatgccaaccattcagttccagtcgctccagtgcactcccagaggtacaaatgccaccagctgagaatgtcagaagaggaaatccaagcctgattgtactcttgagctttacagaaaacatttagcaacttggaaagacctcaagaaaatgtgtcctaacccttccacattccatccactgctttaccatggtacaaatacatacactgcaaaaccttgcccctgcaaatacacactgtaatccacaaaactgtgcccttgtgcacacacagtcagaaacagagaatttcctctgcataggaattctgaaaacaaagaccagagtctgaggttttcagcacaaggactccaccaggattagcacagatgcctgggaaagaaaggagctcagtctggcaaaacactccccacaaacttaactgagcatcactagtggaaggagaggaatacacccaaga

SEQ ID NO: 1880565 - DNA, 4001 bp, Homo sapiens
tgttagccaggatgctctcaatcttctgacctcatgatccacccgcctcggcctcccaaagtgctaggattacaggcgtgagccaccgtgcccggccatttttgtgtttgtttgtttgtttgtttgtttgttttttaataaggcctgtcgactcatacctaaccaatttacattttaaccagctgaatattctctgaattctctcacaatagaagagcaaaaaagtatcattaataatctaagttgaatttttggtagtgtttttgaacacatttttaaatgtctattagccctttgaacacctatgaattgcctatgaatttatatttcttgcatattctttggcgcttttgtctttctcttttttatttctttgtatattagagatattaaccctattttctctcagtctgtctcgtgcaaaattttttttttatatttaggcaaatcttccaaatatgagaaaatagcagtctgagaatcagagcatgaactcggaaaccagactgcctgtgctcaaacctgactctgcccatttagttctgtggctttgggcaagctacttagtagtcactctgtgcctcagtttcttatctgtaaaatgaatatttaaaaagtatccccctcacctcgcagtgttgttgtgggggttaaatgagttaatagataaaagcaagcattaggaatgtatatactctgcttttgtttatatatatttgcagctcatgcctgtgaccccaacattttgggaagctggggtagaaggatcacttgagcacaggagcttgagaccagcctgggcaacatagtgagatcctgtctccaaaaacaaacaaaaagaaggcctttgcctcctttttgaaaaagatataaatattcctatattttatgttatataataaagtttttcctttttatttagcacattttggtctttatattacggtaaaatgtgtttaggtactctgtgtaaagtaggaatctagcttcatttctaataaatgtgaaacttgttgctctgacatcatttagtaaataactcatccacccatcgctggtttgacctgccctgccattctcctgtaattctgtggatgttccttctacaaagagtatcttcttttttttttttttgagacggagttttgctcttgttgcccaggctggagtgcaatggcagaatcttggctcactgcaacctccgcctcccgggttcaaggattctcctgcctcagcctcccgaggagctgggattacaggcacacgccaccaagcccggctgattttttgtatttttaatagagacggggattcaccatgttggtcaggctggtatggaactctcgacctcaggtgatctgcccacctcgacctcccaaagtgctgggattacaggcgtgacccaccaggcccagcccaagagtaccttttaaatacaagagagaggccaactcggtggctcacgcctgtaatcccaacacttgggaaggccgaggtgcgtggaccacctgaggtcgggagtttgagaccagcctggccaacatggtgaaaccccgtctctagtaaaaatacaaaaaaatctgccaggtgtggtggtgcgtgcctttaatcccagctactcgggaggctgaggcaggagaatcgcttgagcccgggaggcggaggttgcggtgagccgagatcgcgccacagcactccagcctgggcaacagagtgagtgagactccatctcaaaaataaataaataaatacaatagacaaaatttcctgtaggatagattggaggaccaaaggaaaaaatacaaacgtctctcaccctgttccatgcggcaatgaaaccacagactcttcagcttgagaatcgacctctgaattctgggaatcttgttcatgaattcttatattctcctatgagaatgaagagtctttgaattgtcagccaaatcaaaggagagtaacatctttgttcttttgcctccttccccgcaacaggaaatgtcatgaccttgaagtttctaagtgatgcttcagtgacagctggaggtttccaaatcaaatatgttgcaatggatcctgtatccaaatccagtcaaggaaaaaatacaagtactacttctactggaaataaaaactttttagctggaagatttagccacttataaaaaaaaaaaaaaggatgatcaaaacacacagtgtttatgttggaatcttttggaactcctttgatctcactgttattattaacatttatttattatttttctaaatgtgaaagcaatacataatttagggaaaattggaaaatataggaaactttaaacgagaaaatgaaacctctcataatcccactgcatagaaataacaagcgttaacattttcatatttttttctttcagtcatttttctatttgtggtatatgtatatatgtacctatatgtatttgcatttgaaattttggaatcctgctctatgtacagttttgtattatactttttaaatcttgaactttataaacattttctgaaatcattgattattctacaaaaacatgattttaaacagctgtaaaatattctatgatatgaatgttttatgcattatttaagcctgtctctattgttggaatttcaggtcattttcataaatattgttgcaataaatatccttgaacacacatatttgtgcacctctctaattatttaagacaaggacctggaaatagaattactgaatcaaaggttaattaaaataaaattttctgttttgataggcaaaaatgaggcctcactgtagtttgaatttgcatttctttattcatgagattgatggttatataattttttgttaattttttttgtgaattatttttccatgcctttttttcactatttttaaaaactgatataatcttctctattgatttgttagaaattattatatatgtccatgtttgtcatatatgctgtaatttaatttttagtttatattttgtcttttactttaatggttctttaaaatatatcaaatgttaaaatttatttgcaattatacttgattttgctgaggtctcttttctcatatttatgtttaggactgtcaaaagacaaaatgacaacaaatttagtttaaagatcttaattggcttttatttgcaattctagaatcaggcacctcatttttaaaatagaatgagtgttctgatgagctgagcagaggacgttggttttattgatataaaagggctgaggagagcagaaacagaaaacaaaaagcagactggttgtttcaaagttacttttcttataaaggttaaagcagaggcaacttccttatcatgccagctaaaactggtctgtttgagggtttggctattatctctctgtggctcttggtttcttggaaggtcagataaacaactaatttcgggttggtggtgtgaaactttagcatgagtgactccattttggtttggtctctttggcctggtgcagaagctaagtccaaaccaatgacctcctataacttttatttaagagaataaaaattcccattataagatatgacatgtattcatctatattttatttttgttttgtcacttcacctttttagggagaaaaaaacacagttgttactcggtaatgagggatgttgggactcagacgataccctaaagtatgacactttgggatactgagtactttgagctaaaggagactggaaggcctcagaagcaagatctctgtgaccttctccttccatcttccctcttgccccaagtcttcctcttccaaagcaagtcataaaaaccagaattcaccgggcgcagtggctcactcctgtaatcccatcactttggaaggccgaggcagaggatctcttgagctcaggagttcaaaaccaggctgggcaacatagcaagacctcatctctatgaaaaaaattttaaattaaaaaattaaaaattatctgggcatagtgccacatgtctgtagtccca

SEQ ID NO: 1880566 - DNA, 4001 bp, Homo sapiens
catgagtatccaatggaaaaactattatgtaaagagatgatcaaccacactgatttttatgtggatgcaaattaaaacatgaggcaccactttatatacatcactttgacaaaaactagaaatatcaccaaatgtttgtgagattatggagaaataggaatcttgtgcatcgtggcaggcatgaagagcaacagagcccttttagtctggcagtgtgaactgtggtatggaatgtgcatcgcctaagacacagcaatctttctcctcagtatatgtccagagaaatatgtgcagagataccaaaggagttgtgtgtcattatgtttatcacagcattatttgtgatagaaggaagttggaagcaatttaggtgcactttgctagggaaataaagtagaataaatgtgtactatggaatactatgatcagagcaaaatgacacataggaaaataggcataaatcaagaaaacatagtgaagaataagaaaatcaaaaaatgaatgagattaaaatacgctatcacttatataaatataaagcatacaaatataaaacaatattttatatttttcagattccatatatatacatatatatgtgtaatctgaaaaaatacatatatccaaatgcagttgagtggtcaggggtggcttgaaaataacaagaagataaaaggtgaacaaagagaaaagaggatagcataccatgaacagaggaatttgattgattttgttttctgcagataattttttaacttctcaataaaataaaataaaagtaatgtaaaactctacttagttcatttgcaaatttctgcctgtcataaaccttgtgcccatcaacaatgcataatttcctaatggttgatcatttctgtatataattacttttctgttaagaactcttgggcttgcaaaatagaccccaaatagccaattcaatcctaagcaaaaagaacaaagctggaggcatcacgttaccctacctcaaactatactacagggctacagtaatcaaaatagcatggtaccagtacaaaaacagacacacagaccaatggaacagaatagagaacccagaaataagactgtatacctgccactatctaatctttgacaaatctgacaaaaacaagcaatggataaatttattgaatggggaaaagattttccattcaataaataatgctgggataaccggctagccatatgccaaagtttaaaactggaccccttccttacacattatacaaaaatttactcaagatggattaaaggcttaattacaaaacccaaaactataaaaacccagaagacaacctagacaatatcattcaggacataggcatgggcaaagatttcatgacaaagacaccaaaagcaattgcaacaaaagcaaaaattgacaaatgggatctaattaaagagcttctgcacatcaaaagaaacaatcaacagactaaacagacaactacagaatgggagaaaaatttttgcaacctatgcatcctacaaagggctaatgttcagcatctacaaggaactttaacaatttccaagaaaaaacaaccccattaaaaactggttgaggaggagccaagatggccgaataggaacagctccagtctacagctcccagcgtgagcgacgcagaagacgggtgatttctgcatttccatctgaggtaccgggttcatctcactaggcagtgccagacagtgggcgcaggtcagtgggtgcgcgcaccatgtgcaagccgaagcagggcgaggcattgcctcacttgggaagcgcaagtggtcagggagttccctttccgagtcaaagaaaggggtaaaggacgcacctggaaaatcgggtcactcccacccgaatactgcgcttttccgaccggcttaaaaaacggcgcaccacgagattataagccgcacctggctcggagggtcctactcacagggagtctcgctgattgctagcacagcagtctgagatcaaactgcaaggcggcagcgaggctgggggaggggcgcccgccgttgcccaggcttgcttaggtaaacaaagcagccgggaagctcgaactgggtggagcccaccacagctcacggaggcctgcctgcctctgtaggctccacctctgggggcagggcacagacaaacaaaaagacagcagtaacctctgcagacttaaatgtccctgtctgacagctttgaagagagcagtggttctcccagcacgcagctggagatctgagaacgggcagactgcctcctcaagtgggtccctgacccctgacccccgagcagcctaactgggaggcaccccccagcaggggcacactgacacctcacacggcagggtattccaacagacctgcagctgagggtcctgtctgttagaaggaaaactaacaaacagaaaggacatccgcaccaaaaacccatctgtacatcaccatcatcaaagaccaaaagtagataaaaccacaaagatggggaaaaaacagaacagaaaaactggaaactctaaaacgcagagcacctctcctcctccaaaggaacgcagttcctcaccagcaacggaacaaagccggatggagaatgactttgatgagctgagagaagaaggcttcagacgatcaaattactctgagctacgggaggacattcaaaccaaaggcaaagaacttgaaaactttgaaaaaaatttagaagaatgtataactagaataaccaatacagagaagtgcttaaaggagctgatggagctgaaaaccaaggctcgagatctacgtgaagaatgcagaagcctcaggagctgatgcgatcaactggaagaaagggtatcagcaatggaagatgaaatgaatgaaatgaagcgagaagggaagtttagagaaaaaagaataaaaagaaatgagcaaagcctccaagaaatatgggactatgtgaaaagaccaaatctacgtctgattggtgtacctgaaagtgatggggagaatggaaccaagttggaaaacactctgcaggatattatccaggagaacttcccctatctagcaaggcaggccaacgttcagattcaggaaatacagagaacgccacaaagatactcctcgagaagagcaactccaagacacattgtcagattcaccaaagttgaaatgaaggaaaaaatgttaagggcagccagagagaaaggtcgggttaccctcaaagggaagcccatcagactaacagtgaatgtctcggcagaaaccctacaagccagaagagagtgggggccaatattcaacattcttaaagaaaagaattttcaacccagaatttcatatccagccaaactaagcttcataagtgaaggagaaataaaatactttacagacaagcaaatgctgagagattttgtcaccagcaggcctgccctaaaagagctcctgaaggaagcgctaaacatggaaaggaacaaccggtaccagccactgcaaaatcatgccaaaatgtaaagaccatcaagactaggaagaaactgcatcaactaacgtgcaaaataaccagctaacatcataatgacaggatcaaattcacacataacaatattaactttaaatgtaaatggactaaatgctccaattaaaagacacagactggcaaattggataaagagtcaagacccatcagtgtgctgtattcaggaaacccatctcacgtgcagagacacacataggctcaaaataaaaggatggaggaagatctaccaagcaaatggaaaacaaaaaaaggcaggggttgcaatcctagtctctgataaaacagactttaaaccaacaaagatcaaaagagacaaagaaggccattacataatggtaaagggatcaattccacaagaagagctaactatcctgaatatatatgcacccaatacaggagcacccagattcataaagcaagtgcttagtgacctacaaagagacttagactcccacacattaataatggga

SEQ ID NO: 1880567 - DNA, 4001 bp, Homo sapiens
ggcctccttggaaagcgtaatctgccattactggttcaccctgtaaaatgtgtttcttactgtactttgtggtcaaaaaagtttgaaaaatctctgctccttattgtgtatgttgtgaataactataattattgcatcatgctgttttgatgaacatttgtttctaatttttcttaattgcaaaatcaatgctgcattgagcctccctgtgtttctgtatgcacatggagcagtttcctggatgtccatgcttaaaactccaagccctttccctagggcttgctgaggggaagatggcctgtgtggttgacagtttttttctaatattaaatatgtgttactgtataagaaattcattgtcaatataattgatttctattttgtactaaaatgatactgcaatttcttactttactagaaattatttgtaaatatagcttggttgttttcccatttttggattataaatgattctgttgccacactatattttttgctagcctgattgctaccttaggagtttcacggaaagcgaatagatggttcaaaggggaccaaaaacactttaaagattcctggtacatattgccaatcaataggatgctatttcagctagactgtggagatgaaacaaaaccttttgaaaccccattagtgtggttatactaagtcctcctgaatattattagagaaaatttaaagtagcacaaggtaagcaattatcagaagaataactcccagttagttcataagtcagtttctgaaccacttggcacaccagtgggtgcatacaaccctgtatacagttcatgcagggaggcaggggggtctgtagcatcacccatcctaacacatacatctcaggagttattgtgaattagcaacagttcattggccatggatgtcctgtgggacatgctgtggggaagcccatcctgcaggggtgcctgtagctagtgccagtcatggtttatgacagcagaataactcatatacaatacctggctttgaggtagtgccttcctcctcagtaaaatcttgcaaaatttgactctttcttgcttacagcatctgttcagttcagttcagcactcagtgtgtgccagcccctgtgctggaaatatagttgtagactgttttctgggttcattcctgcggaagctggtctagaagacagagaaagatgggtgagcaaatgcttagaacgcaataggatagtaatgataaagagacatgcaaactaatgctgaatggtttcatcaccctgtgaataagaagttataatagaataagcttcttatggtaagtataatggtggtggagggacagaattttcccagaggagccaatgtttaaactgaatcgtgaaagataaagtatttactgatcagacaaaagaatgaaggtgattacaggcagagacaattttccaacaaatgtactttgtaaattaattgggaaatgacctggcacttatgaggaacccccacctgttccttggagaaaaaggagcagaaaggtagaccagaactccagggccgagaccttccatctatgtagaaatacgagtaagtgaccacagagtaaactatctagagttctcactccagagtgtggaatcatgatttctcagcataaaatttgcttctttctctgaagttcttcctccaagagcacttttgttagatctcttgactgattctaccatgttttggctattgctggcaggactctgaccctatgtactgggggaaaacaggcccatacacactgtccttagagaagtcaggcctaaaactgcttattaaacacgagatcctgaccttctctaacacacatcttggaacagtttttcctgatttccagagagtcaccaaagccctttctctttccaaagccttatataagccagcttcagcaggctcaggtggtcagtgggagaggctagactgcagcatgctgggtgccatctctctggctccaggagccattggacagctagggggttgtccttccccactgaataaattacatctggggcccattattttccataattattgtaatatgacttaataaaactaaatgctttatttgcgttgctgcttgacagcaagtttccttaacaacacaacaccattgtatccctacggaaacagctgcacgaggcaacagagcgatgacacatacttggaattttctcgctcttgcagtcctgtttcccaatgactctcctgtgaaagggctaaaagtgctctgctgtaacaggacggcgggcacccccacctgctctctgtactctccagcaaatactagaacggcccattgtagtaaaaactaggagcaactctctactgaagaccttctaggtggcacctattgtgcgaagcaatttctctttgatatttcagatcctttcttcaactctgagcagtgggcttcatcttgaaaatgagagatgagaaaccgtgtcagaaactgtaagaaaaattgcacaagatgacattgttaggaagaggtggctggatttgtctcactccaaaatctgaagtctcaggacttgatacctgcaggagggaagaagccaactcaggccagggctgagagtaggtggagaatatggagtgtatctctgtatttgcctcttccctactctcctcccctccctgggtgctgaaagaatctcaccataacattccctgatttctttgggggatctagagtgttatcagtgggctctttacttaatttttactttcatgtctagatctctgttcatgctcttcttatactttacaacaaatctctccttttttgtcttgaactcttatctccagaatagtgatgacactggttctaggactttcccctgctctatgtttttggtaagcagcctaggataaattaactctggtccctggggctctgtatgatgttgaactgtctaccagggtggattcttttctgtctcacctctaagaataaattcagatgatgacaggtaagataattccactattaccaacacaggtggaagggctaccaccccactgcttaaacatggttgtcaacccgtgggactaaggaggcctttgcaagtcacaaaggcattccattcatggaagcaggtccattctcctcatatccacctaaatgtaggcaaagaaaacaaagttccttgccccaaaatgcttgcacatcccgatggcttgatcatacgtgtgattccgatgttataaaatattaagcaaaaaaatttaaatgttttattaacaatccattcctatcactatgaaaaccacccttaattgagcattgttctggaactactgtgtttttcccagcattgcttttaagctgaaaaagccctgcaagtttgtcttatatagagggcaatgtgaactattacagttaccctcgaacacctttgacttcctgcctgcctgcctgtctgcctacctgcctccctttcttactaattaaggctttatagccagagcaggttctgaagttacagttagcaagaaagttttcattcaatataaaagaaaggtatgaactactactactaatataacatggtaggaactgtcagatctcttagaagctgtggaaagtcaaagaagcaccatccatcccttcctgaatagatgtggttcagggaacgtgactttaaaggaggtagcatgtgatgggcaccaggatgagcagaaagccttgaatgccattccagtttatctctacaaagcagagggatctttacatatttgaaatattaaaaagatttggcctttccaatatcaagaatgacacagattttgtaatgttcctacaaatatcctagacattaaaaagtgagaagaattatgagtgcatttgataacctagattaaatagcaaaattccttgaaaaacacaagtaatcatacatgacaaagaatagaaaactctaagagctccatatttcctaaagaaactgaatttatacttcaaatcttcca

SEQ ID NO: 1880568 - DNA, 4001 bp, Homo sapiens
tcaaatgatccacccacctaggcctcccaaagtgctgggattacaggcgtgagccaccatgcccggccaataattgctaatttttctatatcataaacaatgttatgtgaacatctctgtggacaaatatttgcatacatttataattacttcctccagataaatttctaaaaggggaattttagggtcaaaaaggatttttttatgagttttgatacgtagactaaagtgccttccaaaatggaagtacatgagaatgtctgtttatcctaatcttcaccaacactaaatgttaacaggtttttaatggtctcgaatttgatgtttgaaaaaataattgtttttacttttagttattttgcttacttgaaaaattttaaatttcatatattgtttgccatttataatattgctttatagtgtacttattcctatacaacacccattttttctgttggggtgtttgtattttttttattttttataaagaaaggtgtttatgtaaaattgccatagtaacactatgccatacattttacaaggatctttctaagctaaactttatcatattttgttattgactttttcacttttaaattgtcaatttctcaagtgttttcattaacatttctacctttacttgtagaaaatcttcctcatggccgggcgcggtggctcatgcctgtgatcccagcactttgggaagctggggtgggtggatcacgaggtcaggagttcgagaccagcctggccagcatggtgaaaccccgtctctaataaaaaatacaaaaattagccaggcatggtggcacatgcctatagtctcagctacttaggaggctgaggcaggagaatcacttgaacccaggaggcggaggcctgggcgacagagtgagactccatctctgaagaaaaaaaggaaaatcttcctcacaaaaggttagataaatattcacttttattattttttattgacttctttatttttttattcagacaggatcttgctctatcgcccaggctgcagtgcagtgggacgatcatggctcactggagcctcaacctcttgggctcaagtgatcctccagcctcagccttcagaggagctgggactacaggcacgcatgaccacctgctaaaatattcacttttgttttctcctacatatttgatgatttttttttgttttcattttatgcatttagtgctttaatatgtctgcaatttattttggtttatcatgtgaggagaggattggattcttgtttttcagcttgtccctgcaagtttattgaataatatagttttttcctactgattttaagatttttgaatttagctgaaaggttttatcttctagagacctctcttgagattaatttccactccactgatttctctatttttctacctttatcacaatatttaaataatacagtcttatatctagtattgcaagtccttcagtagttttcctttccaaaattttctttgtcattcttgactattcgttcatattattctgaattacattattaagttaaaaaaagattcacttaagaacatatgttttgctgtgaaaaaatactcaagatatattaagtgaagaaagcaaattgtacaacaatatatatattagccttcttaaaattaaaaaagtcagaaaaagcatagaagtgtgtgtgcaggcccatgtgtatgtgaggctgttccttattgatacatataaacattctggaagattggccaaaaaaagtattaacaatggttagctttggttaatgggaatggacattgtggagaagaggaaattttgctctttactataaagaaacttcttaggtagtttggattttctactatgaacaagcattagtcataaaattttggtaaatgtctttgaaaaaaatatttgaaaaagattattaaaaagctacttacacacaaaaggacaaatactgcataattccactcatctgaggtacctagagtagtcagattcatagaggcatcaagtagaatggtggttgccaggagctgagggaaggggacaatgggggttgttgttaaaggtgtacaggggagtctcagttttgcaagatgcaaacagtctggagatggatggtggtgatagttgcacaacaatgtgaatgtacctaatgctactgaactgtacacttaaaaatgtttaaaacaatatgttttatttaccacaattgttttttttgacgcagagtctcgctctgtcacccaggctggagtgcagtggcgcaatctcggctcactgcaacctctgcctcctgggttcaagcgattctcctgcctcagcctcctgagtagctgggattacatgcacacgccaccatgcccggctgatttttttatttttagtagagacggggtttcaccatgttggtcaggctcgtctctaactcctgacctcgtgatctgcccgcctcgacctcccaaagtgctgggattacaagcgtgagccaccttgcctggccctaccacaatttttttaaagctatttacaatgatttacccctggggagttggattgaggagttaggatgtaggccaaggacaatatttttcatttaacaccttctgcatggcctgaatttttcaggagaagcccatattattttcataataaaaaaattttaggactctctctagacctattctgattcagaggctgcccaattaaaagaaatttaatgtcatagctaattttaaaaatttattggaaatcctacgctgaattacattaaatttataaatgatgggacagctttaaaatatttactcacatagaaagttttcaaaaattttaatgatcctttgaaaattttgtaatttcttcatatgggtcctacacaagttctgtagtttattagtgtatccctgggttttttatatctgtatctctatctacagattgatagatatatataatattatatcaattgcctaattgctattttttgtaaaattaatttgtctcattgaagacttttttgtaattattttttcctctaaataactgaaggaaactgttgattttcataattttctttactttaatcttaaaaataatcctaaagtaattggtccattcaagttggtcagttcaagttcaagctaaaattattggtttgtgtagaaatactctaatttagccaatgtaactgttttttatttatgtgattttttttgaatcatgtaaacatggcttaagaaaatatctattataaagaatactctataatataaatgcctgcagagtataatacctgtcactctctgaaaaggaatgcaaaggagtaatgaaggaaaaataattattagtacgataggatttccatgaataatttatgagaacctagacaaggagtaaacaatagatatcacccattttgagtcctatagactttttccatatttgcagaagatattgcttgtatttttttcatttctaaaaggaaagtgttttgcttttatttctgactatatattatcattgtagaaagcattcaatactatagacaaaaagtattttcttatatgaagatcaaccataaacctatcatccagataaaactaccataaatagtattttgcctattcatcaagaattaattacattaacatatatttcacatatttataaaagtgatcacactgtacatacagttttatagcctcctttttttctcttaatatataatcactgctgtcttttaatgtccatacagatcttcataattcttaatggctattgttgaaacgtacattttattttatggatgttccataatttatttgatcaatcccctgttgattaacatttaggtagtttcaactttttttactttgaatattgtaatacatcttttcacatttgacaagattattccttaagaaatgtaaatgctcaatgagtctgcataattttaagactttcgtgttaaaattaaatattttttcttaaaatt

SEQ ID NO: 1880569 - DNA, 4001 bp, Homo sapiens
ccataactgggtgtctcaaacaacaaacatttattcctacagttctggaggctgaaattccaagatcatggtgctagcagggtcaggttttagtgagggatctcttactggtttacagacagccacatttggctgtgtcctcagatggtggaaagaggatgagctagctctctgacctcttcttataagggtactaaccccattaatgagtgttccttgctccagacctaatgatatgccagaggctccacctccaaatgccatcccactgtggattagatttgaacatatgaatctgtgggagacacgaacattcagtccacagcaatagtcctagaaataccctcagcaacagccagaagcacccccagacatgtgagtgagcaagcattcagatgattccagccccagcctttgagtcttctgcatatggctcctggcctcacacaaaaaagctgccctccctgtgccctgtccaaagaatccatgaacataataaaaggttgttttgcacctctagatttggggtcatttgttactcagccaagtaactagaaatgcatgacttagagacaggacttatgaaggatatgcagaccagtcacacctgccttgtctctgacatggcagcatctcccagaagcatgtcttctaataccatctgagtcctccccagtgttgctccaagtctctggactacaaccaccacaacaccctagcaacagaccccaaaactctccctctgcagccttctgctgcctgaagcagctgctgccttagacaccttttccagtatcgaaccttcatggtcctccacatgaggctgtgcagctccatgaggaccacagagaccactcactcaataccacaagcaacccttcaaatacagtcatcaccaatgagacttgtccccaacttcagatttggggttacccttccagcaaccatacccattaaattgggaatttatgtatcatttacatcagggtttctatgaaaatgagtctgaggctcaaacttcatagttttgaaactcaaccttttcattggttcagaaccacaatccaagctgtgatcgcatacgctccattagacttaaataactgttgggattcaatgactctgtcctttctgcctgcttatctgagtgcctttggaagccatatctcttggaatttagcacactcaacccatagcaaattaatatgtcatagcatagaattttgtacttctaaaagaagtacaaaaatgaaaactaactagaaggttagacattttttaggttttacaaattatgaaaccatgaccactaaaagaaactcatccattatacaaaatgatgttatgagttattttgaaaaatatcggaatgttctcaaagtaaatggtgttttttaccatagtaaatttattccatgcaacaacttactgaattatttgctttgctcttgttagttcccaaattcagctgttcctaagtgaagatgcctttttctctaagttttcctttcagtcatacattagtgcctgtaccatttcaaagccatgtaaacattaacttacataatatgtagtttttaagaaccaaaatgttctcaaattttgaaaatatttcttacatttctctttggtatccaattgccaaacaaacttaaattcaaatttctatcaaacttgttttctgtatccaaaccactctaattaaacacaccaagcataataaaaaataaaataaaaaattaaaataaaatagcattgcatccttaaaggattatgttgaattattaaaaaaaaaaaaaacaaatctgcagtgttgttttttctgttttttttttctcttttctttttcctgaatcatgtccaaattaaaccaagcatgaccataaagaaaggttatcaaaatactcacagttcaggctccctacaggaccgttcatactgctatagtattacaaagtagtaataaaagtgagttatgaggaaatgtgaattcctagcaagaaaatctaaaaacaggatgttagagaacaatggaaagccaccctgcctagtagtgtatgtacagttagagaaattggccaaccaaattctattataaaataaagagaaacagtatcatttttaaagcactttggaatatttttacagtattttgctccaagtagacactcaattatacatttgctaaataaaataatacagattatctcattgttttactcctcaacaaccttgcaaaagggataatactataactattactcaggagaagttctggagttctacagctaccattgtggccagtgcttttccaatattacacatctgacactgcattcactctttctttcattcattcattcattcattcattcattcattcattcatgcatccattcatgaactcttcaaagccaaacttgtgattagtgtattcaaggagaacaggagaaagcaatgcagtgggggaacagagacatgtaaccacagcactgcattgcacaatagtggtgtcatagagataaactgctctagggtcagacaaggctccctggagcagctgacactcagctgaatctttaaagtggagactaacaatgttgtttcaatccattttgtctaaatcagcacttctcaaactacacatgaaggaacgctaatatgaggcttaataacaataaatattctgtggatgacagagtatccctattagcagcagttgctctggagtttgatctagttcttcattcattgcaaatgattcaggttggcccattgtttcaccgaggagcctgctgggtttgaccattcagaattagcctgtcatgatctggctcatgcatgcagtaagaccccataggtggccagataactgaatattctgaattttaagactaagggacaagactctggagcagaggggacactgtaagacattgcatcacaccacaagtctcacccttgttgcagctaataccttgggtggcttttcttaattgtttaaacagaacttaaacattctttagatggatttgagggtgtgataaagaaagaatttattttaaaaacaaactggaagtgataataagctggattgctctatatttaagtaagaagccaaacataacttatcaaagggccttttgaagttgtacaaggcaaagtcttctctgcttcagggtgagaccaagtagcgcatattatggaaagccactcagctcccacagtttctgggagaacagagaaaagagcccatgggttgcccgtttaaagtgaataatctaagtactgaaatgttgaaagctgaaatcagaattagattagttagaaaaaaagttaaagtgagaaagagcctctccaggaatctcccattgtacacagcaagtggccaggcctccgtaacaaccctgagaagagcacaccactttgtgaattagaaatttggcagtaacctacgtaggcctaccatttccaatgtgtttcatgtcgtttttatagaagtctcaagttggtgtttgtaatttctacaaaaattttccctcggaatgagatttgtgttgatgggaattgtttgtgggagttctaaggtttgcttatggttgccacatttctcaatggttggggcaagatggtacaagttcagagtggaaggggtgccctctccaacatgacagagcgcatctcagggcctgagctaacatctaaagagactttgatattgagtggcatagaatgttctttattttaggtgatgcgtcagatgtgcagaaatctccctggaagttgtgcagtgtgattgtgcaaacactgaggctcctgcagcaagaagtctgaacaacaagaaatggtaataattgctgagacttcgctctgcactggaccttcctgtaacacattgcctagatcatcaaagaagtgggactctctgaagaaaggaaaaatttcagccagttatgacatttggctctactgtgtttgtacaaataccaactcaatgttta

SEQ ID NO: 1880570 - DNA, 4001 bp, Homo sapiens
tgacgtgatcagccaaatggtccactgcggatagaagcgaaagactgtaagacaggtcaggaacacagaactattggtcgtcccttccaagtgcggcattggtcttggcttctgatccaggttgaacctagatttaaagaaaaatttaaccatattggtttgttaattaggaatctcagatacagccattgttgtccactgaggtcctcagcaacagaaaacattgaagaaagaggcggagagtgaagagaaagagagaaaggaggagaaggagaaagaggcagagagaaaaggaaaggaaggaagcaaagaagaaaagaggaagcgaggaaggaaggaagaaaggaaggagaaagaaaagaaagaagaaagagaaaggagagaaggaagggagggagggaggaagaaaaagagagagaaagaatgaataaagggagggaaagagagagagacgaaaagaggggcaagtcactcttcatctctgtgtgtatatagatacatctttgccctcgtagaatttactgcctcaggaaattttcaataaaatgttaagattcaaatggtagataaatgaggcaaatatgaaaggtccctttatacacgggagaaaattcaataaatttaaaaacaaaaaattttcttggccaataatctaataaataatagatttaaaaccatcttgtgatactaggcatagatagaaaaatttgcatgcacacgtgtatgtgcacgtgaacacacagagacccccccactctgatattggtgagactgggctgaatttagcatgcaccagctcctgagagcactttccagtccaatagcataacaagaaaccagagccttctttgattgttgttgctcttttcctgtgaccaggtgatcccatcatttggaattttacctaacgagaaatttaacagaagcaaaagtctattcaagcacatttcttgtatctaaaataatacaaattccccatcaataattggttaattactgtatgtaaaaaatgctagatttttcaacaaccaagaaaatgttggtacatttaaagactacatggaactgctgggcatagtggctcatgcctgtaattccagtcctttgggaggctggggcaggtggatcacttgaggccaggagttcaagaccagcctggccatcatggcaaaaccccatctctattaaaaatacaaacaacaaacaaacaaacaaacaaaaccgcatgtggtggctggcgcctgtagtcccagctactcaggaggctgaggcacaaaaatctcttgaacccggcaggtgtaggttacagtgagccgagactgcatcactgcactccagcgtgggcaacagagcaagactctgcttcaaaaaaaaaaagaaaaagaaaaagaaagacttttaaaatgcccaatcatatatgttttattgatacctaatgcacttatgaaattgcctagctactgcaaaatacataagcttttaaacatacctgctgtagaaaagagttcttatgatatagaacatgccttgaggttaattttgaaatttgaaagagcataatttgcatattatagcccgaagaaaataacagaattctctacctcacactctttccttcctcctgctcctactcatacacccttctttcaccaccgcatctcccctcccaataaaatctaagccatgtgacttttttcaacatctgcttcctttcttttctttcacagaaagcacgcatgaataatcagaccgcactgctgctgttaattgtaaaaatcattagtaaacttccaggtgctgtttactatataagcattgtaattttctatcctaaaatcagcaactcccccacatcattgtctgccccagggcatgagcactgtgcagctttgaggttgtcaaaggcagttgcagccccatttactgggactgaaagagatcgatccacacctgcagcgtttgaggcaataattcctgatattaaccagacctcatgaggagagggcccttttgccagcctcctcatgattcaacactctccaatccatgtggaatcattgaatatgctgtgattggctgatacccaccacgtccattcttcccctttctgccatcactccacctattgtccaaagattctggaaagaaacctgtagagaagagaaagccagtttagatgccatttgtctctaacttgtaagcccggcatgcctgaatttttgcaattgcaaataaagtgcagaggaagaacaaactcaagaaacctccagggcccaaactgcaagatgcaggaagaatcctggagattcttcctggagattaactgagagaagagatcatagcacagagaggaagtaacttgcccaatgccatacaaacactgcctaacgctttggttacacaaaacagattacaacttccatctgtttccttgaaggcacctgtggttttcctcaagaaattcaagataaaagaaaacaaagcttgagtttacattttcccaggtactacaatggcatccctgggtacacctgctgttctttctctggggctcccaattcctgctctgctcctccaggcaggattctacacagctttccagtaacactgcaggagtgtccctcaggtggtctgggtacacctttgcctataacctgctgcactgtatattcttacagccatagccactattttcctgcactgtgtcatctgtttgcctgctcctatttcagtggtattcgaagtgcctctgataaaagtgcttttccttctttttctttttatatttttggcctagttcaatacctcggtgaatgaataaaattcattaagagagcatttataatatctaatgtttgaatgaatgttggagatacaaagttcttagagaccatctaacccaacttcaaaattaatttctgcatcacaggtgcaagaatgttcagtgactctgcgaactatgtttgcactttggcatcaattccacctcctggagtcttctctaccactttgtctcagagacaaagcctaggacggcatttcttagaatcccttccccataggcttccatgaaaaggaaggaggccatgttaggaggccacgttctccagcagctgtggcgggaagaagcacaggtgactcatagaccagtgtggggaggaagcagatgggatggtctcagcagctcccaggcaagctcctccacagctcctgctgtagtgttgcaagctgaaaactttagcaataacttcactgtcctttgttccctggcttttccaaaattttgctaggttttatttccttgcattaaaatcttcccatgacgaaagagtcatctttttaatgcatggtgctgggtcagttagatacacagagttgaggtggaggataaatcctgacccctccctcataaaaacaaaatccggacagttcagatctacatgtgaaaagtaaaacaataatgttttaaagaaaacatacaaaagcatcttcataaccttggggtaggcagaccttatacaagacacaaaaaattgctagtcataacacacaaaatgataaatagaactccaataaatttagaaatttagtattctctgcatatcaaaagacaccattaggaaaagtcaagccacagaataagaaaggatatttgcacaacacatatctgagaagactacccagaatatataaaaatttacacaaatcaataaaaaagacagacgtctcgaagtaggtacctcaaaaagaatatctaagtggatgaaagcatgttaaaaacttctcaaattaagtaactattagataaatgcaaattaaaaccacgatatacacaagagaaagtctataatttaaatgacagacagacaaagtattgtgtttggagcaactggaactcacctacttttaagagtaagttggtacaactatgcttgtatgtcattggaaaacactggaaaactgaaattatctactcaaactgaacatccatccctcctaca

SEQ ID NO: 1880571 - DNA, 4001 bp, Homo sapiens
actgtggacacacacttcaagtgcatcacctcagcagcactggtcctgagaactctggggagatggcaggcagtcctctggcttccagggtctactcatacgctaagctcaagattgctggagctctgaaggggctctgtgccacactgcgggctccttccactgtttcgggcatagcactgaaccccgaagaaagttccaggcctagttctggaacctctagcacatccctgaatttctcagagcttcagtttcttccactgctctgccaagggaagggagtcacctcgtcaccaaggcatcgtccaggtctgacactccatgactgtgattccatttggtttctttaaatcccatttttacttcttgctttagcactaaagcaaactccaggcactaaactcaggagatgggcccatctcttttgccccaagtcctaacactccagaaaaggcatctggagcagtctgttccttctgatgcaaaataaatccactgacactcatcctccctgggcacccaggcccagagcccagagaacaggcggctgcctagaggcatcaaggccaccagcctctttccccctccactgccctttaagtccttccctgggcttggctgaggaggcagcagggaaaagaggcacaactgcaggagaaaggaggagggcgggtggacgtggccagacccaggaggctgcagggagctgggactcagcacagcagcctgggaactccactttcagcctcggctaaaaccccatgcccagagttcctcaaaaagcccctcaagtccctcaaaggccccaaaacatgctgggtgctgaagacaatggcctgcaagcttcacatgagaaactgagaccctctgtccccactcttccagcaagttgaggccattttctaggaatggtgaagtcaaagaagctgctcttttcacattactcagaaacacgcactacccccaatcacagatgccagccatgcacaggggcccgttctgaaggcaggggcaggtgcaccagcccaggagcccagagaaactacagccagcgctgcctcggcttagggaacctgcggccggcttcctgggtacagccatcgtaggaaagagggcctttcctcagccagcatccctgccccttcctccaccaccttccctctgtgggactgctcccaggcagacctggggcctcagccagcatgggcaggaactcccagaggacacgggaaggactcctgaggtgcggactggaggtatgggcgccttgcagcacagggcctaagaggagagaagcagctcagcctccccaggtggaaggaggcacccctttccttccaggacagcaacctgttggtttgtcccaggcctggtcaggtggggcgaggctgctcctggcgaactagggactcctctgcccaagccccttctcaggggaggagaccggcatcctacacacccatgtccaccatccatgaacatttactgatctctcagtaagtcccagaccctgtgctagggtccctgcgatcacgagctcatagaccagataagcgcagagaaagttgtaattaaactacccaatgcagaacaatgaccagcccaggtcaggatacagacccagggccatggcttaagcagcagagggcctggggcgtgggcgggggtgcaggggagggaaaggtccagagagagggtgtgaccctgcaggtccggcatagccaggcatgagggcactccaggtgggaatgtgccgccccaaccccgggcaccccccggggaatccggcgcccggtgacacaggccgccctctttgagggcctggattgaggaagttggggtcagagctccagactggagtccctcttgctgaattccccttccagacatcagaggcaaagaggaaccctcattcagagaccacctgcaccagcgcttccgggctgggtcagaaaaacaggtcgtcctcgccgcccgcgccggcgcctgcagcaggttcctcttctgggagccagcacgcagccagagctccagggaggggggtgcaccccgggggtgggacccacggggcggggccaggcgacacctcgcccactgccgtgactatgcccagccccagccaaagcccgcccactgccgcagcatgccacgccccctcccggcccgcctcgcagggtcatgttcaaggtcctgcccaccgctcctcccacaatccagcctcagggagggcctccaggctcaccttcccagcctcattccgcacagcttgctactctccacacgcaccgcctcccgtctccaggcataccagccgacctgttggtcgcctcttttcaagtccccctcattgcttaagacctttcatcattcctaggcctgtgtataatctttctctcttttacaccccccgcccctaccctggcaatcagggcacacatcgaatcctgccggctactttaacagcttcaggcagacccccatggtttcctcccggcgaggcactttgaagtcctgaagaaataagtgtgaggtggtatgagaggggctcctcggtgacttccacaggcctccatatcaggccttcccctgcagaattccatggacctctcgggggtccaggactccttcacagcagggaggccccgaacaggaacctcgggccctgcctcgggatcagcgggatcagcgttcctccggggctgactggagaactttcctttatctgcaggacccgctggggtctcccgggcctaggcttccctcggaactgcatctcgaagggcagctcagctcgcactccgcgcacctactgtgtgctctctaagctggacaccaggaaagctctgcgactctgctgtgaactctggggtcagtgagaccccggggtcaaaagctggctctgccgctcaccatggctgtgaccctgagaaagttgtctaacttccctgagcttcggtttcctaagctgcaaaatgggaacagcaatcgttgtctgtcttgcagccttgttacaatggccgaaggaaagagcatggcacggaatgggttctcagttagaggctacagaatacccagctcctcctgcaggtgaagagcaccagctctgagccaaatgacctgagctcacacacgggctctgccagacactggttgcataaccttgaacaagtttcctcatctttctgtgcctcggttttctcatctgtagaatgggcataacatggtgcagtgtttctacttgggagggataaaaatggtctggaagttgatagtggtgacggctgcacaaccctatgaatataattcacatcgccaggttctgatatgaattataaaatataaattataaaaatgataagctttatatatttttccacaatttttaaaaatatgccaagaagcaatggattgtacactttcaatgggtaaattgtatagtacgttaatttctctcactataactgtttttagaaaatgttaagaatggagataataataatgttacctacctctaagggtcattagaggagaatgaatgagttcacacagtgcttagaagagcttacaatagtgaccagcacaggataaacccttaactggtgttgactgtcatatcaaatatacctcatatgtcacttcgtttcatctctgaaacaactctacgggttaaaatgtatttttccttattttatgggcaagaaaattgacaatcagaaaagttaagtcactttttttttttttttttttgagacggagtctcactctgtcgcccaggctggagtgcagtggcgcgatctcagctcactgcaagctccgcttcccgggttcacaccattctcctgcctcagcctcctgagtagctgggactacaggcacccccctccaccacgcccggctaattttgtttttgtagttttagtagagacgggatttcaccgtgttagccaggatggtctcgatctcctgacctcgtgatccacccgcctaaatgctgggattac

SEQ ID NO: 1880572 - DNA, 4001 bp, Homo sapiens
agaagaaaggtaatgcctttaccaaaagtatgacagtgaggagaaattttttaggaagatgtgatgaattgttcagatctgggtccagtgcaattgagataactagtgggacgttagttgcaaatatttgggaaattcaagtctggagcctggaagaaaattcaagagtatatttagaaatatagatgtcttcaacatattgataatacacaagaacataagaggaagagaaaaggtgaaaataaataaagattcatgagatgaaaaacaaaacattactttctcataatgtgtattattctatccgaatcatataatagtcacagtttcaggatgaatttctgccatcttaattgatttctcaaagccgttatctcaaagacgttagtatcattgttttacagtttatgaaacggatgctcaaagaggttagacgtttgacccaaagcgtacaatctgaaagcagagatattggaacacttgtgcttggctttagactgtaaatctcatctttaatagtttatagttaactgaaataagtataaatataaaagctttgtatttgaaatattaaagaaaatatgtatatatatgaatgtatatatatatatgtaaatatgtatatatattatatccaagagtaatgttcaggaactctatattttaattaaataatttaaacatctctactgttctctaaattccttcaaattttgaatcatcaaaataagttcattcagattttataaagtaaagggatgagtggattgatgtgagaattatcaggcaaatatgtaatcaaattcccatgtactcagtcttacgatgtagcatctgtgaatagctgcagtttccaaattaaaccagccaattgtttcattaatgttactaaaaatttaaagtttaaaagctcctagttggacaaatggtgaattaatttaaattttaaatcaagagcatcactttgcttttgtattgtaccattctaaaaatcccaaagggttaaaaacatgattatacacctatgttcaagattaatttgtttataaggacagctgtgccttctgatttgcttatttgcatcctaagtttgtgtgtttacaaaatttgactgttcaacctgcagatgccgtttttaatgttttgcttcaaaacttttaaccccttgagtttctattttattccatgtcatttatatatatacatatgcatatatgtgcacatatgcatgtattttataacctaacatatatatgtatgcataatatatataaactatatatagaatatgtatatacataagctatagtatatacaattcagttggtaggtggtctgttccttaaaataaaactgtatttttctctaccttttccttggagatggcctttccttagtatagtctatagaaggctgttataagccggttgcaatagcagtatgtgggcaagaggactgtaaattcagtgaatattattagtttatgaatattcattaaatttgtttgtatgcagcaactcaactttgtaaatggttgcagccaaaaaaagctctaattagaggaattaattagtatttggaaaggtatacagggataagtgggcattttgaagaggtattttttcctcctgttgagaaaaataccttctagggagcttgcaatacaatttgtgtgcatatcaggtagaaataaactggagcgtttccagttttaaggccgcaagagagcggaggtctgttgttcaagctagcacaagatactttgtagatcacagaataccttggtcttttcttgttggaattcaccatgttttaaaagatgttgttactcaccaaccttcaaatgccacatttaaccctactataaagttaaaccaagttaaacaagaataatctgacaacggaaattattttccatgtcagagtggtgcttctttgcctctgttacctccataatatccctgccaccagcaaccaaaaagaagcagctgttctgaatatgtacaaacaaaagaagctgttactatagcaaccatagaaccctgtggaaaagctctccctttaacactagccaacctctcctcttcacccctccttcctttcctttcctgcgccagcacagactgcccttggacagaaatgatacttggcgattcgacatggggaaccagagtaaacactacagcctgcattcacactttccaagagctggaagacttgctcctggctaaatcctatgaaaaggctgcagaacctgacaacacttatgaagctctttgttccttgtttcccaaaccttccttcatcctcctttaaaaaaatcctactggcctctctcattcatgacttgatgaagtaatgatatctcttttacctctccgttgtcagtttttctctatcctatatccatgttcatgatccaaatgtggcattgcttaattaagtctgtggattttgctgattccagagttggtgttgaattggatggaagatagggcacttttgacttcagaggtaaatggatgatgctagatgatcgatgctgttgggttttttccctccatgtggtaaaacataaaggcacaatttataaaaaaaaacccagcttcagaaaatctgtccaaaacgattacaatttgaggcctttctccaaagttgtgttttgattaatcaataacatctttcacttacttttttatgtcctttgatagtcagccttcaatttactaattgcttgtactgccaaattagtctttaagtcaatcatttaggaacttaaatttgttttaagtcagtaatttaaaacgtgggacatattttgttgtagatactatctactaactactctgctaacccaaaacatggctgactatcttgctaacacaaatcaatttatttcatatttctcttaaatattttctttgcttgtgatgaaattgtttaatttcaaaagcatcacaggcagattaaaatgttgtaggatactatttgagtttttcaatttacagcataggactttataaatagccttgtgattcaacaataacttgaatgatgctttctaactggggctaaccctggtaaaatttgttcatattaatttaaaatcctgaattaaaaactaagacatgggtaattgtcctattggttattaaaagtgttttaatactttcattaaaaagactatgaagtattcacccatgaatatacaggtcagtgggatatgataaaactgagaaaacggcccacttatttatgcagttatagtatataataaaaacagccttctgtatctgtggggaaaaggtgagttaattattaatgatgtgggtaccattttagcagaatctgggggaaaaaacggatgtatactttaaaatttacatcataattaattccaaatagatgagttaaatataaacaatgaaactccaatagcagtaaaactatgggagaaagatgatgagagcactgaaaaacctctttccacctctcaagttcaggaaaaatatgtgtgattatatttggtgttgataaggatgtgaggaccaagctttcatttattgtttgtggaaatgtaaattggtaaaatttctatgaagggaaattccgatataactttaaaattttcaaatgtatatactgcttatttttttatttttttaaatgtgccatactctttaactgagtaaattcacttctagaaaggtgtcctacatgtacaattaaacatactaggaatgacaagagtatgtacatggttattcattgcagcaaaatattagaaataccatttatgcccatgaatatgatatgggttaaataaattattttacattcatattatgggaaaatatgctgccattatgagtgagagattgagacagagagaaaggatgctcttcataaactctttataaacttatatggaataatctcaaagataaattgttaaatttttttaaagccagaaaagaacaatgtacagagcattctactct

SEQ ID NO: 1880573 - DNA, 4001 bp, Homo sapiens
ctgagggtaatggctaatatttgtttcttgagctttagactttttctagtgtgtttggattttttacataagttataattataaatatcctgacgtagattctttccttcacaaaagcagagaacagctaagatcacccagtgagtaagagacagaggctgagttactacacagtgtgagggtgatagcaagagttggaaaaaaaaaagatggatttttttttaaacttccttgaaaatagtggtaggatacacaatattgaaggaggagaacaaagttagaggaccgacactatctgactgcaggagttactataaagttgcagcaaccaagacagtgtggcattggcaaaacaataaacgaagagctgggcgcggtggctcacgcctgtaatcccagcactttgggaggccaagacgggtggatcacttgaggtcaggagttcgagaccagcctggccaacatggtgaaaccctgtctctactaaaaatacaaaaattagcttggcctggtggtacacacctgtaatcccagctactcaggaggctgaggcaggagaactgcttgaacccaggatgtggaggttgcagggagccgagattgcaccactgcactccagcctgggtgacacagcgagactccatctcaaaaaaaaagaaaaaaaaaaaaggataaacaaagagatcaatgaaacagaatagagatctcagaaacagacccatataaatatagtcaattgatgtttgaccaaaaaaacaaaggcaatacaatggggaaaagaaaatcttttcaaaaaatggtactgggacgagacatttatattcaaaaaaaaggaatgaagacatagatctcatacccttcacaaaaaaattaactctaaatagatcacagacctaaatgtaaaacacaaaatggtaagactcttagaaaataacataggagaaaatctagataaccttggctttggtagtgactttttgttttggtttggttttttattattattatttttttgagacaaggtctctgtcacccgggctggagtgcagtggcgcaaccacagctcactgcagccttgacctcccaggctcaagtaatcctcccaccttagcttcctgtgtagctggaactacaggcacatgccactatgcctggctaatttttctgaaattatctgtagagatacagtctctctatattgccaggctgtcttgaactcctgggctcaagtcatcctcccgccttggccttccaaagtgctgggattacaagtgtgagtcactgcacccagccaggttatgacttttttgacatgacaccaaaggcatgatctatgaaagaaaacactgataagctagacttcattaaaattagaaacttctgttctgtaaaaaatacttatgataatataaagaaaagccacacactgggagaaaatatttgccaaagatgtatttgatatggggctattatccaaaacataaataaaactcttaaaactcaacagtaaggaaacaaacaaccaattaaaaatgggccaagacattaagagagagttcaccgcaaaagacatacaggtggcaaataagcatacgaaagatgccccacgacgtatgtcatcaggaaaatgcaaattaaatcaacaatgagataccacctacacaccctttagaacagccaaaatccggaacactgatgtaaggtacctggaagtgcttcggtcaaggaatagtctgaggcgggtatccaggcctgcacgagtcagcaagtttggcacgcaggcgcacacctccacttgttatataaactgtttgtgtaagttcatacttgacttggagccacagttgtctgtaaaaggtataactgccctgttaacactgcgcaccagacacatggctctggggctcggctcgcctgaaatggcttgtcatggtaggcgcgcaggcgcccagagaaagagcgagcgagtcagagctgtccgtctgagccaggacacagctcagctcactcactcccagagagagaaagagttaagctgctcaccctgaaggcaagggagagccggccacgcagctgtgtgtgggagccgccagactaagcagccgagacagggcggacagtgtgagagaaagctgttgataagagctgctgctgaataaagtcatctttcaactgcctacagccccccgagtgttctttctgctcatccagccactcccttcggactcaacataacatgtggtgtagtcatgaacctgacaactgacaacatcacatgctggcaaggatgtggagcaaaaggaactctcattcattgctaataggaatgcaaagcagtacggccactttaaggatagattggcaatttcttacaaaactaaacatgctgttaccatacgatgtagtaatcatactctttggttttaacccaaagaagtcaaaaatgtatgtccacacaaaaacctgcacatgggtgtttatagcagctttattcaaaattgccaaaacttagaagcaaccaagatttccttcagtaggagaacggataaatgaaactgtggtacttttagtcaatggaatattactcagcactgaaaagaaatgagctatcaagccatgaaaatacatggaggaaacttaaatgcatatcactaagtgaaagaagccaatttgaaaaggctacatactgtatgattccaactatatgacaacatggaaaaggcaaaacgatggaaatggtagaaagatcagtagttgctaggggttagggtggagggaggtatgaataggcagagcacagaagattcttaggccagtgaaaatactctgtatgatggtttaatggaagatacatgccattataaatttgtccaaactaacagaaggtacaacaccaagaataaaccctaatgtaaactatggactttgggtgataatgatgtgtcaatgtgggttatcaattgtgacaaatgtaccactctggtggaagggacgttgataagagggtggctatgtatgtggggggcagggaggatgtgagatatttctgtatcttctggttaatttttctgtggactaaaactacttataaaaataatgtcagccaggcgcagtggctcacgtctgtaatcccagcactttgggaggccgaggagggcggatctcgaggtcaggagattgagaccatcctggctaatgcggtgaaaccccatctctattaaaaatacataagtttttaggcatggtggcaggtgcctgtagtcccagctacttgggaggctgaggcaggagaatggcgtgaacccaggaggcggggcttgcagtgagccgagatcatgccactgcactccagtctgggtgacagagcgagactccgtctcaaataataataatgtctatttttttaagtttctttaaaaagaaatacgcaaaggacaaagcaggggcccctgaagtttcatcacttagagcagtggtctccaaactactgtgatcacacagaccattaggaaataagtttgcacaccttccttcaatgcatgtatactgtatttatttataatttttaaaaaataattgtagaatcatggggctacctttttttatacagagagtacagttgctagacagataaggactgctatatttctcttattcaaagggatgttttttctcttctcaaataaaaactgacatgagtcgggctagttaagcaatttcatcttttctccggttacagatctgatttcataagacacagtgatcacctcttctctgacaggcattgaagagaacacactaataagtcgagccactctgcagaacgccacggcccacgttttgcttgctttttgtttccatctagacttcttttgtgttaaatgcccctcacactttttctgcccacttgctccaagcatcctagatgttttaaatggaatatttggtgccccaaacctagattacaatctgaagagtagaaacagatctctgtatgaagc

SEQ ID NO: 1880574 - DNA, 4001 bp, Homo sapiens
gcaaaaaccgcagttacttttgcaccaacctagtacctgtctgtcaggtgtaaagaatcatctaaagggcatgcacgtggatactaaaacgtacaaacaagcacacagctgtgtctgattcctttacccttgtaaaagttccaataagtgaatacaatctattacttaattcttagtttatagactgtcattagacatactgttgtccagttctcatgtcagagctgttataggcttttacaaaaaatgcctctgaagacagggcaagcttaaacctgccaccaattagaaagatctgtgtcacaggtgcgcttttaaaagaatggcaatcttaaaggtcaagttaaaaacacaaatttaaaaaaacgatcctggacgtcgagggtcggactctagggggggcaagctgcaggccccactctgcgagtttctgaccgcattccgcggaggccccaatcctccccgcggatcctggcaaggcaggtaacctcccttcccccgcacctgtccggttcaggcgcaccagccttcccgaagcgcagcctagcggtgggaatgggaacacctcgtctgggagctttctttcggttcagcttccccagccggaccccaaagacccgaagccctgggggaaggaaattccaacttgctcccggcccacccccgccccgttcctctctccggctcgctgcttccctcgctccaatgccgccgagctggtccccacttatgtgcggccgtgctgcagaggcggcggcgagctcccggactccgggcagggaaatggggcagggtgagtgagagagcgggctccagcgaggcccccagcgcccagccagcgcccgcaccccgcccgcgggacaggggaggtgctgagtcggccctgcccgcgctgggctgagcctcgcaggggttgccgcttctccattcaagtcctggcttgagagccgagcggcaagagcgcgggccggggaagggaagagtaggagaggaagccgcgagggagaacaggcgagctactgtctcctttggaaaagaacgtaggagccttgggtgggaaaagagagatcagccctcccaacttctcttcgggaaaagttttcctagggcgttttgtttgtgcaaactcggccggaggagcctgggagtgcgctgccggcgtggcagcggtgcccgtgcgcccggccccgctcctcctccttttccagccccggcggctcctctccctccgagaggcgccaaatggctacccagtaaaccccacggggcgggggctgcagcgccaccgcctcctccgccgtgctctgggcgcccgctagaccttgtagagacggcggcggcgcccgcgggctgggagccggggcccgcaggtggaagcgcacccgggaggcgggccggccggggctggagcggctcgggcgggctcttgacgctcagccagcttcgctccggcctcgggaaggcgcgcgtcccgccctgacccgccggcctctcccaccccagcagtgacgcgccgcctgggagctggagcccgcgcagcgccccgcagggcgatggacggccgaaccccgcgcccgcaggacgccccagccaggtaagcccagagcgccgcgccgcctctcaccggggagggcgaggccggcgaggacagcgaggcctcggccgtttcacctggctggcaactcgctgccctgccggcggcctgactcactgactgtcctccacgcggccggggaggctgcttcctcccggccttctcggaggccgcccgggcggagggctcgggtcgtttttggttgccttcctaccggggctgccctgggttgctacaggccagctgaatgccaggaattgggtgaggagtccgggagcaaaaattgtaacaaagggacccttgtttgggctctgggggagcggtggacgatacctgtaagtgagctcctggggagggagggcaaaagtttccttggtcatgggctgaggcccaggcaggtgagcaatgtcaaggtgactgtagggagtgggctttctgcaggcgggtggagggcgacaggagggtgtgccagctgtcagcccgcatgacagttccgggagcgagcggggtgcgcgcctctgattgggggtgtgtgtgcctgtggccaattgctggttccaaaacccagcgcaaatcagattgcaaacaactctacttttctttttatcctcacatgtttgagaagagaggaagggggctgtcacatggtgagttaatattaaatgaggcatgtcttcctgccagatatgctaatagttaccttgttaagcgtttgagtaaacagtaatgagaacaggtagttctgcaagagatgaagaaaacctgaaaataaccttggtcttagtaaatagttcaggagtaacctggatgctagttgagtttctcaagtaggaaactcgtttgatgtagtacaagatttttccccccagcataagtgttcctccaacatagtttattttcttagttaatctgaatgcagaaatgccctaatgagaatacgagcattccagaaatagaaacgttaaggaaaaatcgacgttgtcactaatgaatgagacttgtacagttttcctgatttaagagtgtagaagtcatttttccctggaacatgacaggcgtttccttagaagcaagtcacagcatgtttattcatcagagaccatgcgaacattggcagctgtctagaggaaacatggaaaagtctcaaagcaacatgactaatctaaaagatatttagtataatttttacatagaggaaacatgtagtgtattaattatttcattttgctcaaattaactttctcctttctgcaaatattactcccactgttgactttcatttcttttctttccccaggtttttcattgcttaaatattttcatatatcctgacatatattctcacattaggatgagtaaagaaatatatcggtagaaagatattgagcatacaagcaaggttcctaagtggagctgcaaaattatgtgaattgacgatgagacagctgtcaggataccgaaatgtattcagggattgcaaaatgagatagaattaaattggatttggaaatggattaggttaaggtactttaaaaaacaaaaaagaaagaaaaacatacctgctttcacaaaatacacccatgggtgttcagaagtcactggggacttttaagtaaaataggtgaggtcagatggctctgtgttgaagaaacagaagaacactttttgctggcaagcataactgtagtaagaaccttcagactttactcttgatattttattttaatgtagagacaaggtcttgctatgttgcctagttgatccgaaaccccaggcttcaagcaatcctctcaccttggcttcccaaagtgttgggtttaccagtatgagccagtgcgcccagccacttttgagaatttaaaggttaaactgataagttctttgcttaaaaagaaagtacaaaagagccttatctaatttgtcaagcatttgtaaaggacttttgccgtccccttttcaaatttaagtagggaaaatctgtcaacaccttatctaaaataacacagtagttctatcattttgccttacattattctactcagagaagttatcattacctgaaaaatatcaacatgaaaaaattacctctctacttcatttgtcttatttcacttgtctaacttgtcctttggcatattccgaatgcctgtcatataagatttgttgaatatttaatattcagtattgcttctcttctctctcaaaaacccaaattataaaaggtttaaactgggggaaaaatatctagataagggtatttgggaagtggcaggcagaaatcttaatatgttataattgttaggttttggagataaatttcttgctataaaactgactaattatatcataactcattactttaatagacaatgaagcctagtttagtctttatccttggatattactg

SEQ ID NO: 1880575 - DNA, 4001 bp, Homo sapiens
ttttttgcctgagatctgaatctcaggcaaaaactatgtattgtatttctatgtattgtatgtagattgaatgaattttttacttcttagtttattattagggtgtcttgaaaaacacccctggagtatacaaatgtagatacagacatatgttagatatctgaccttattttaactgcagtttgcataaggcatgaaaaactaagggtagataatgaagttatttttaaatgtaaaagttttaaacatatggctgaaatatgttgttttagttaaccccaacctactaaaaattggcttattgagaaatcaaatgaaatatttttgtaattataattacaccaaatcaaattatttctagaaaagaaatttataaaacaatactttctaggtttgggatttctatgtaaaaaccaatttctttcttggctgctaaaaaatagttatgtgagatcacaacagtaagaataacattttacctagttatttttattattattggcagtaacattcttttgtaaagtaggtggcaagaacactacaaaacgaactgaaacacttcacaaattgtcgtgcccagatggtttatgtccccagaatagtaatagctctttacaaggagatggcaagcattttggcagaagtctttttggtttctcttcagtatggatattaaactactttatagacagaattgaagatatataatttttctccacatcagattatatattataaggtggtgaagatatataaatgttgcacaactatattgaactttggagttacagataaattatataaagtcatctgctcagttagtaactagaaataatccagtttagcaatacataaaacataacggaagtaaaacataaattgacggtggaggtatagttcagcaggattaaaacctgcatcatatgattctaaacttgaatattacaatcatctttttaaattttggagtctcccatttttcaaaattttgaagtctccatttttgccagaatgctttatttactgtatttgttttgggtctgtccaagtaatataaattccttggagagacctagatcaattagagtagataaatactattttaacacagctacttatattttcatatattttatttagctttaaaagaatatttcataactattaggacctggcagacactggtttgggagttagaaaataaaagttctgatttaagtcccaccattaataagctgcgtaacctgggacaaatgacatatttattttgaaagtaggaagcacataagttctaaacaaagaaattgcccatttttctttgattcagtttgttttctattaaatgagaggaatagactaatctctgttttttaaatctttgccatttattggttttgatttacttatctttgtctaattctcttaaaataacttactcaacctttcagaagtccagaggtcaaggtaaactaggtcttgtctgcctgaaagcctgtattatagactaacactgttccacatcaacaacaaaatactatcacattaagtactatatatattcttgtctgtgaataaaccataagagctgcactttatattcagttcactaatcaattggttagtaatttttttccctgtaaatcacttctagggtcagataaggcaaaaaaataatagcaattattctaatagatcataacaatagcattggaaactgggaggagaaaatgagagaattgtctcaccaggttgtagggagagacgggggagtgaggagggggaatttcttttaggctttaaaaacaacatagaatttaaggacattattgaaccaaaaaatctcaagacattaccttagttatggtatttcttgcataaatacacaatggcatcagagtgtgaagttgtggatgctgggtgtctctcggggatgggaaacactaaatttcattcatctttctcaggttctgaacaaagaaaaaatattcagaggactaagacagatatcacctttttatctcacagaagtttgtggagagtatagctttgtgtgaaagcccaaaagcccgttaaccaaacagatctaaccacagaggcccaagcagtcacacagagctgccctccaaaggaagaaactacataatgatttacttataaaaggccagtttcttcgggtacaaagcatttataaggttgcctttacagttaagacttctgtgtgaaatgccacagggaaaatgaaatacttcattgtgagctatcgtacatatttgtttgactggagaaaagcagatgcccaagggagtttaactgtaaggcttcatgggttaggattactttaaataaagctcctccatctgcactttgagggtcaccaaagccatatggtttaccactcccagtcacctcaagtataaacatcttttggctgtgataaatgcctcctcaagtccagaacgtaatacatgtgtcctcttctacgggaaacagagatatataatgcccagaagcaaaaacctcatctagtactagaacatttatgataagtaatgaattagtaaagtcttagaaatgacactgaatattatcagtattaactttctgatcttgtaaagtctcccgagaaggtaatctgttaattataatgctacagatttacctccctctttttctttcagttagatattaccagatgatattatatctttatttattatttgtatattctaacaaatttttccttataattcttttgtccacgttatttgatattggtcatgttattgctattactttactatttctttccactcaaaatttccacttcattttcttacaatcttttttttcccccatgatctctcacttccatttcatgttcttttggattatttttttcctgtcttctttaggattgcttatctaattgaattccacttttaatgtatttttcttgtcttccaaagaatcattcttcttccagttttctattgcccactactctacttatttccaatattttttaaaattccttcagatttgaagtttgctaacatgcactttgttactttttcttcctagctatggtttcttagttctcttcttaattttattttgtccaaatgcataaccataatcatcttgaaaaggcctctctctttgaagtcttctcttgttaggaaagtttcattgtcttacctcttttgaaaggagcaaggtctcctctatgtaaccaaatatttaaatgctggtttttatgaaaagagaaagctgtaagccaaaactgcagattctatgaggttactaccccgtatctagtgacatgtattttcataaattaggacaattaagtcttctgttataaatttttagaataaagaggtgaaatctcctttgtaagtgtaaatggaaaattcatgatttatttctgtattttaatagaataagtacagatttcaaatgtaatttagaacaatttttcatattactaaaaaatattaatattgaatgacatctgacagttttttaggtatttcataattaaccttatgagatttttaatgagttttattcttataattaatataacataatttatttttaggtagcatttgaatagaagatctacttagagttaaaaaaatactttttctagtatcagtatgatttcattataatatgggttatattgcttacatatgaatataattcctgtatctaactaatttataattatatataatacgtttgaactgatcatatttgtcagtgtagaattcatgtcttctactttcttggttgtttatttctccagtaaatgatagctagtgaccagggagattttctttagagagcttttctcaaatgcagtatttctggagaataggaaggcttttagtaactgtttctgtccattcacacaacttcatggacaataacatcaagtgtggcactctgaaagacggtgattgtcgtaatgatcacatatgttaaaatatacc

SEQ ID NO: 1880576 - DNA, 4001 bp, Homo sapiens
gattcccagctactcaggaggctgaggcaggagaattgcttgaaactgggaggcagaggttgcagtgagccagtattgcgccactgcactccagcctgggcaacagagcaagcctcttgactcaaataataataataataatgataagggtgactgcttaagtctgcaatcactatatacctttataagccttttcatgtaagttagcaaagaagaaaaaagatacttccttcatcagacatgtttttggttttggtttagaaaacttggtcagtggatttatacagaactctgtgaaataagtagattcttagaacattagaaggaaagaagaacctgagctttcagccagtccaaccaccccattttcagaaaggtagtctggaacccagagagacagagtgatgtccaaactttcataatgagcggggcagagcggcgggggggtggtaagggggcccaaggaatcctaagaaaatgggagttggtcccagaacttaggtgagatgactaagctcttagaagcatgtccagtgtagtatctaatgtttttattcactcttttagcaccacacatagaagtctcatctctggccaggcacagtggctcacgcctgtcatcccagcactttgggaggccgaggtgggtggatcacttgaggtcaggagtttgagatcagcctagccaacatggcgaaaccccatctctactaaaaatgcaaaaattagctgggcacggtggtacatgcccgtaatcccagctactcaggaggccgaggcatgagaatcgcttgagcctgggaggcagaggttgcagtgagacgagatcacgtcactgcactccagcctgggcaacagagtgagactctcagaaaaaaaaaataaaaaagaaatctcatctccacatgagggtgattcctaagtgcgtggcatcacgtattttttttacaaagatctgttgcttgtttccgaagaaaagaaaatagtaatggagaggatgaagtttactgaaaatacattgaaagacaataaagtcatgcattttaagtaaggccaggtttagtcaccaccacctgagcttctggaatccagctgagtggttgggtttcacaactccagccttgctgtccacagttctgctgcccagggcctctgcgggtcttcctgcagccgcagagcagagctccggggaaggagcaggcctccttccctccttctatttcccctgctgggctctccaggcaagggctcaccttcccagcatgcgggcaggagtttgggctttggggtgggctggcgggagaggaaggtatgtgggcgatagcagtgtgagtggcttgtatgtgcaacagtcagagccctcctggctccctgagccaagaactggcctctacgttccagttaatgtttctatctgaccacccccaggctgctaggggaaccctacctgccaagacatccaggccctctgcctggaggctgcatactgggcagtgctgggaacgactggttgataggtgtgccgggaagctgggcgattctggcagtgcaggacacttccggagtgtgaggaaaattgcgtcattggaacaaagtgattcctcacagagaggcacaaagtccgcatcaccacagaatcaaagatgtctcattcagcgctggagctataacgttctctgatgggttttgatggttaatctcatcaagaattaagcttgttaagggtggagctaacccccctctccctccctctagtccggggaacacggtgcccggtgggcgctcaaggactatgtaaagataaagttgataggggcgtaccacccccacatcccttcacataggaagaagactcacttctgcttacggctagcgtttgctctgtttctgtggaagtcgtgcctgctccaggaagagctggatcatccattcattcatttatgcatgcattcattaaacaggtattcactgactgtgcctcagacctggttttgggtaccaaggaagtttttcaaaacctcacagggctttgtagctataaagatatgtaaggatccttgggttatctgaagcccagagaagggagataacttgtccaagagcacacagcaagttgggggcagcgctgggccagtgctctgagctcctccaaccccgcccccacccacccaaggctagatctagatctacccactcctctccttaactcttcatcggctgtactcccaccctaaggagtcgaaatccccaccctagggagagacatatcctgtctggattgtccaaaagggaatgaaaggtaaaaatgaaaaaaaaaaaaaaaagtgtccccaattcaagtgcagtgcctccctggtgcgggcattccagcgtggcctggagtgagtggcagtccacctccagaggcgtcccctgggcgctcctagggactcgaatttcccacgcggctttttgctttatgtattcactgtttagacgttttcggtcaaagcattttgggacttccgtaactctcagagcgcgccagggagccgcccttaaagatacctagttactgatgagttccatccggtaaagcagagggtagtgggcggcttggagactcaggatccgggtcccctcacgctcctggctgagtccctggcttcacaggggaaactacctccgcaggccaggacccatctagttacaggatacctcgatgttacaaagacgaggcttccagcgcgggggcgtggaggcggctgccagccctgcccgcagcgtgctggcgacccccgggacgccccttccctcccgcgcctctgctccctagctggtgggagcagagcggcaccgggatcacttccaggtcccttgcaccggaggaatgggcggcagcagggtccggagtcggcccggcggggcccacgtggccagcacatcggtcctccgctcgcgatttcccttttccgctctcgggcacgaggtactgaacgccaggtggaagcacagctgtgcagctacaggctctgccgttcagctgccgcgggccggggccggggcctgcggcgtcgtgcgcgtgcgcggaccagttccaggcgggcgagaccgccgcagggcggggcggggcgaggcggccgcagggcggggagggcggggagaggcggccgcagggcggggagggcggggcgcgaagccgggggcgggggccacgcgtggggcaggcggtgctcggctcggctgacgtcggcccgccggcgccccaccagctccgcgcgggcccgggttggccaccgccgggcccccgcccctcccccggcggtgtcccggccggaaccgatcgtggctggtttgagctggtgcgtctccatggcgacccgccggtgctataagtagggagcggcgtgccgtggggctttgtcagtccctcctgtagccgccgccgccgccgcccgccgcccctctgccagcagctccggcgccacctcgggccggcgtctccggcgggcgggagccaggcgctgacgggcgcggcgggggcggccgagcgctcctgcggctgcgactcaggctccggcgtctgcgcttccccatggggctggcctgcggcgcctgggcgctctgaggtgagggactccccggccgcggaggaagggagggagcgagggcgggagccggggcgggctgcgggccccgggccccgggcacgtgtgcggcgcgcctcgccggcctgcggagacacgtggtcgccgagcgggccacgaccttgaggcgccgcttcctcccggcccggggttctcccgcggctggataagggtgatccgggcgcctcgttctgcccccgtcttcacagctcggggctggaggggcctaggggagacccacccggagaccctgcggccccgcgccggcctctttcccaacccttcggcggccgcgcgctggccggggagccgttggggaggccctggcggccgcgcagcaggtgcaggggcgcagagcccgggctcgccttggta

SEQ ID NO: 1880577 - DNA, 4001 bp, Homo sapiens
atgggcctgcatcttttgttggaagttggatgttgttggtagaaatgttaagtccacatcttaggtgtacggagtttgtataaaatatgaactctaatgtgtagaatttgcaggtcgctgaagtgtcacagtctgctgaaatgggtctggaatcaataaggtacacatcaaactcaattgtatttaattttcattgctacctagaggaaagccttgcatggccctacaagcatgaaattaaacatgaaagcccatctgaagtgtagaagcgatacttaaaatgacctgtaaatagagcaaaacatggcagcccggcccatcgcaatattatcattcatttctctttccatagtggaggtgacagcccccctaagaaaatcagaagagacacgagcacattgcagatctaaaggagagctaagtgttttcggttacacaccagcagggcttccctctctgcagagccctggagtctcttccaagtagaaaatcacactctgtccttcagcctgagagtgaagagagaaggcaagtaaaacaaggacctcctgaacttggccaacaccccactcctgctgcctcccaccccacccagctccgttccttggccagtgagataatggaaggttcagcccttgcagctgacgtggggtggggagcagacgcccactctgggcacttccagccgacactgacctttcagtcatggaaacattccccagactgacactaatcgggggcacatctggcgtttggactgcatccagatgggggtttgtgttagtcgagtcagcatgataacccgctggggagggagggagggaggggagaggacacagcagctgagagcaatccccatccttggctgcgtgagggagaggtggtcatgctgcggccagtgagtcatagactagagaccacctaattcctgtccacccctgctctccctgctccctccaacagaggacaaactggatccacccagagagccaactcgccagagttccacaactggtcagcagcagactacaatctcagtgtcccggctcccattctatcgcactgcccactttctacactctctcaaagtgtagtgtgttatttcaggataaaatatgtgccaaggtgatgaaaagaatccagctgtttcttctctttcacttcctgtgatttgtaaaagcataagacgattttccaagacagtgacaaaccaccatcgctcacacccattccacccaccccaattctttcatcgtagcttcttttctggatttggaagaagagaccgccctttgtgactggttcatggactttgtcagaaatcaacacaatgtcttattctcccatccctagaacaagcgactgcaattgggaataagacttcatagtatagaagttccagccatacaggtcaggaatgacaaagtgtcttggccagctctcagcctctgcctttacaaagtctgacacctgttgcagtcacgaattgcactgctaaagaggtaatcaagcaaaccaaagccaggataaaagggattatgtctccactcacccacacagaaggctgtctccaactgcagaaggaagttctttccatggccgctggagcaccctccccacttgtgggcaccatggttcaagtctgccccagtgatcctctcctgtataaacctccaggtacagattatggaaatcaggaatctcatccagctgctcaaataacaaagaggttagcagtatcttctagtatgaataattgtaactgcagagatctgttcagcctttatcctttcttaaaaacctaaagagaaacaaggaagcaacccaggtaaaagcaagacaatggtcaatggtcagcttcccaaggcaggtttcagcttccacattaactaatcagcttgcagagcttgcagcaccttctacatccagcctccatacaaaggacaactatcatccaccaaccaatttagtcctcttctggaagaatcagaaagaaaaaatgtcttcactccacttctcctaccctcctcaagatcacctccctccccaaagccctcgcttctgtggtcctctctaagaaatatgctttatccactccgacgggcacaacagtagtaactgagacaggagaatgaccctcttccttgctttagggaagttatcagttccaccctccttgggaagctctgtgatctctgagaagaagctcacagacaccatcactctacctaagccagttagggtctctgctcgtgccagccccttttttccccaccaatgagttggtacaaagccatttcatgttccatgccaaaccagtaattcgcaatactcatcaaaatctgcctccgtccactgactcagcactcctgctttcctagcatagccaacctccctaacaccctgacatcccggccttcagtttcactatttacatcacatgagagatttgggtttcgaaagccaattccctctgaagagagtatgcagatgattcatcttctctgaaaaaactacccatttttgccttgatatccatgccaaaaatctcctgagatggggctcagagaggacagagtgggggagtcctgttacaataggagaccactgtctcagtttccaaatgaaaaagatgacacactgttcttgggacactgctttgccagggtgtcctgcagaaaccaaggaagcttccatctcagagccactgtggacacagccttggatcaccgtggagcctcagaccacactgactcctccctgtctccgcgtctaaccccctctcacactgagagatctgacccaccacagacatcccctctggcctcctgagtggtttcttcagcacagcttccagagccaaattaaacgttcactctatgtctatagacaaaaagggttttgactaaactctgtgttttagagagggagttaaatgctgttaactttttaggggtgggcgagagggatgacaaataacaacttgtctgaatgttttacatttctccccactgcctcaagaaggttcacaacgaggtcatccatgataaggagtaagacctcccagccggactgtccctcggcccccagaggacactccacagagatatgctaactggacttggagactggctcacactccagagaaaagcatggagcacgagcgcacagagcagggccaaggtcccagggacagaatgtctaggagggagattggggtgagggtaatctgatgcaattactgtggcagctcaacattcaagggagggggaagaaagaaacagtccctgtcaagtaagttgtgcagcagagatggtaagctccaaaatttgaaactttggctgctggaaagttttagggggcagagataagaagacataagagactttgagggtttactacacactagacgctctatgcatttatttatttattatctcttatttattactttgtataactcttataataatcttatgaaaacggaaaccctcatatacccattttacagatgagaaaagtgacaattttgagagcatagctaagaatagctagtaagtaaaggagctgggacctaaaccaaaccctatctcaccagagtacacactctttttttttttccagtgtaattttttttaatttttattttactttaagttctgggatacatgtgcagaaggtatggtttgttacataggtatatgtgtgccatagtggattgctgcacctatcaacccgtcatctaggtttaagccccacatgcattagctatttgtcctgatgctctccctcccctccccacaccagacaggccttggtgtgtgatgttcccctccctgtgtccatgtgttctcactgttcagctcccacttatgagtgagaacgtgtggtatttggttttctgttcctgtgttagtttgctgaggatgatggcttccagcttcatccatgtccctgcaaaggacacgatctcattccttcttagggctgcatagtattcc

SEQ ID NO: 1880578 - DNA, 4001 bp, Homo sapiens
agaaagagttctgaggaaaaaaatgacttctgtgggaaattccaggttgaagcgtcatgggttgaatcgtgccccctccgaaagctttgttgagattctaacccccagtgttaccactagagggtcgtgacggcaagctgtccaggttcttggctttttgaacgaagaattggacaaaacgcccagcaaagcaaagaaagaatgaaacaacaagagaacgaaaggagggatttattgaaaatgaaagtacactccacagtgtgagagtggactgagcagcagctcaagagcccagatctggaatcttctagggtccaaatactctctacacgtttcccattggccacttggtgatcatattatgtaaatgaagtgctggcccacaattggttgctttctgcaaccaatcagaagctgaaatgaagttaccaagatcacgctcctgtgcaaacatctgattggctgcaaaaagcaaccaatcagaggctaagatgaagttgcaaagttgcatttctatgcaaaggaagactcagcggcccggcaatcagtctgactggttgcggaaaaccaatttcccatctgtggtgcagaaaaggtgggggttttgcacagggagtagcctctggtccttttgttacttagtcctggaaagttaggtgtttcctttcaattcagttctaggaagtcggcttgaaacggccttaggttccccgcctccaaaccctattctcctgcctcaccagcacctcagaaggtgaccttcactggaaacaggtttgctgaagatgtgattagttaaaataagatgtcctgctgcactagggtgtgcccttaatccagtgtgactgtgtccttaggagagagacacacagagacacatgaggacagaagcaagcctgaggtgccacggatgccacagacgtcacagacgccatggactgtcagccaccagcagctggaggagcaggaaggaccctccctaggcctccagatggggcacggccctgccgattcctggatctcagacttccggcctccagaactgtgagagaatcgatgtctgttgctcaagccccagcgtggtgctttcttacagcagccccaggacactgggacactgggacactcacacacacaacgtccataaccattttacttttcagagacttgaacaagctaacctgcaagaagttccaagaaggaggaggcaatcacccccttgtctccatttattttaccacaaacctttttcctcaaaaaaactcagtgtgccatgaaacgtactttgagaagtgggggtctttggcatgcatctgtggtaccccaggaaggtgacatagaaggaggggccaggcagggaccacagagtctgggtgcccctccagagagggtgtctcaccaagccacaggccaacaccaggccccgcagagacccctgctcgtgctcagtgaatgagtgggcaccccgactaacaggaatttcatcctattgacagacaaccgaccctctgcctctggaccagtgtaggggttcaccccaaagggaggccccaccagacatttgctcgcctccctggcctcaactcccaggcctccccagccccttgcccaccccaggcttccgtgacaccaagctgccacatgccttgccttctctgctctgggccttctcacacattgttcctgctgtctagaatgaccccctactctcactccaattccaccttttgtctgctgactggatcgccactcattcatgaaggccaagttcagggactatggacgcccctctcaggccacacctccccaccctctgccagcaccttccacagtgagggccctgacagctcctccaccctggtgtccaggcagcttctcgcagtgaagagaagatgaacttcaacatggcggtagcagttcacgctgaccttctcccttggccttgggcaacttgctttgcctcttcaaatttctgttttctcatcgataaacattatctatgagccagatgtttgtgaaaataaaatagcgtattactgataggtgctggacatctagtcggtgtaaataaaattgcgttgttatactgttggtaacataggatttgtccgggggcagctggaccgggagctccttgaggacagaggcggtgggtgtgccgctcctctctgcagccgagcccccagtcctcccagagtgaatgtttgctgactgcacgagggagccatccccttggaggctcagcagggtgtgggctgtgttgtcagcccttcctcctcctgttcacagccttcccttaatgactcaggagcactcccggcagcatcccctcttacaacacactgccttgctccagggttggcgatgggatcgttccccccagttcctagagcctaacagcacctagagcactgtgattctgcgtctgattctgagtcgtggggacatgagcatcaggggtctcccccaagcactccatttaacattcacccccacgctggcaccatcagccgagcagatagcatttcctgtctcagaacgttcttgtcatttgtttaagcaagttgaaaactgctgcaccagatcccactgaaaggaagtactcagaagtcaggtgggttgggaagtcggggaagaaggtccctccctttacatgtcgtaattttttctgttttctaaatttatttatactggatgttctaacatgctgataaaagccatctacaaaaacatgcattcattaaacagatattgggtaccttctattcaccaagctctgtaatggggtaatggagtcaaaattaaaattaaaaattcctacccttaataaatatattgattaaggtacacattaaatggctagaacaaaaaacgcccctacagacaatgacccaaacactataagagtttgtttttctcttttgtaacagtcccaaggtgacttccactccacaagggcattccaggaatcagcttccttctatcttttttttcttgctgaggtataacttacatgcaataggcacataaatcttaaaagaatagctcaatcaatttttatgtgtgtatacacctgtgtaaccaccacccaagtcaaagtacagaacttttccagcactcaggctaggcatggtgagtcacgtctataatcccagcaccttgggagacccaggtaagagaatcacttgaggtcaggaattcaagaatggcccgggaaatctagtgagaccctgtccctataaaacatagaaaaaattagctgggcatggtggctttcacctatagtcccagctactgtggaggctgaggcaggagaatcacttgagcccacgatgttgaggctgcagtgagctatgattgtgctactgcactccagtctaggctacagaagaagaccttgtctcaaaaaaaaaaaaaaagaaaagaaaagaaaagaaaaagaatgcttccaacattcaagttcctcctgtcttattgctttgtaataccctatggtgttatcttcattccacaacaaaaactcactcattttatcacctctacatttcaacccacaggaaagagagagaaaaaggaggaaggcatgtaatttcctaatttaaaaaacaaacggtgatctggaagttgcagagattgcttctgtcacactctattagctaattcttagtcttatgactatacgagctataagcatagctggggaaaattgcctctagttgggcaaccacataagccaaataaattcttgagtttttattacaaagaggaagtaggtgttatttccattttatagatgaagaatctgaagatcggagagatgaagtggtttgctttagctgaactgaattatacaccaaagtttgtctgatcccagagttagtttcctaacacttgtctttaaattaacagaaaggccaggcatggtggctcacacctgtaatcccagcactttgggaggccgagacaggcagatcacctgaagtcaggagttcaaaaccagc

SEQ ID NO: 1880579 - DNA, 4001 bp, Homo sapiens
agagcagcagctttcataatactctccctggatctcatcacaaattatcctgcacaaaacagtcagtgtgatctttctgaatccctaaactgatcaagtcatgccctactcataattattctgtgtcttcccagtgcttacagggtgcactaaaactctgtaacacacaaggtcatgaaggatctgcccctttctatgtaataccattctctcctccaaactccctgcacattctagaaaaattgaacaagtgatgcttcccctgacttccccaggaggactcagaggccccttccttcatgcttttatgtcagcgttgtgccttttacagaactttataataatggggagagagggagcatgtcaagccatcctggaattatttgtttctacgtctgtctccccactcaaactgtaaattccttgagagcagagaatgtatctttactgcttcatatccccaatacctagcacagttcctagaacatggcaggaactcagtaaatatccattccttttgaagaaccacgaattctttagaggaagtgatactcttaaaattatgcacctcatggccgggtgtggtggctcatgcctataatctcagcactttgggaggccgaggtgggtggatcacttgaggtcaggagtttgagaccagcctggccaacatggtgaaaccctgtctttactaaaaatgcaaaaattagccgggcatggtagtgggcacctgtaatcccagctacttgggaggctgaggcaggagatcactggaatctgggaggtggatgttgcagtgagctgagattgcaccactgcactccagcctgagcgatggaatgagaccctgtctcaaaaaaaaaaaaaaaagaaagaaagaaaaaaattatgcacctcatataatggacctagatagaagttggatgttagaactcatgatctttggacagtctctccaaacgacaaacataatgataaggaagagaataaggggtggcaaaagtggtcagatacaccttcctctctcaatatacacacagtatcccagaacacaactgaacatttttttttcctttgagatagtgtcttgctctgttgcccaggctggattgcagtggcgcgatctcggctcattgcaatctcaacctcccagggtgaagcaatcctcttccctcagcctcccaagtagctgggattacaggcacgtgcacacccagctaattttctgtatgtttagtagagactgggttttgccatgttgcccaggctgatctccaacttgtgggctcaagtgatctgcccgcctcgacctcccaaaaaccgaaattttaactgtaagaagaaacatgataggattgttaaattgatagctacgtggttagctgtggattcttttttgattgccttaaatacatgaaaagaatgtcagaatgaatccttcatggcaatctcagtggttattcctctccaaaagcttctgcccattccttttcatctctgccttcccttatttctcaccaccagctcctttatcacgtggtttagaattccacagaaagattgaagagaagccacttctgaactctggattataagaaacatcaccatttgaaggctgccttagggaactatgcagagatgatgggtaaaaatcgagatgtggaaaagttcaaggcctgtgaatgcaactttacttcctcactgtaaaataaaattaggttaaaatcaaggtgttggcagggggaaaaaagattaggggcacgtctcacagatgttaattttggccacgtaccttaatgtcttaatacattaatatgatacatacattaatagcttaatagcttcacactaatagatcttactaaagaaaaatgatttaggatggtagtaagcagaagaaatgattggataaatttgaatttgaaggatttttgcctttagatgtttccgtggaagatattttctgtaaaggtgatgccttaggtttatacttttccaaacacaggatattgctaggccacatatataaagaaaaggccaaaaacatattaagaaggaaggaagggagaaaagaaaaaagggaggaaggaagaaggaaggcaggaaggaagggaaggcagggagggaggaaggcaggaaggaaggaagttagttatattcagaatgttcattgtgatggatgagaatggaatgctcatgaagtgctcagctgggctgaagtcacaggtccgcaggtatcaagagcagtggtgactcctgtgagtaaaaagactaacagggctccaaacaagataggattcagagttgagactcctacttgaagccagtaaatgaggtggttcatttaggctgataaaaagcgtctgggaaaaagaatggggtaggggagaggttatgtgatcctgtgctctaactgtagcaatttcttccacatattctccatcgtctggggtgatgctgaccatcacccaggactatgacttttagccaccttctggctgaggatggtagaaggatatataagcagccaggcctgtggctgccacagtcataggctcttccatatgcccaataagaccatgggacagcagcacaaaatgccattctacaacctggctctgggctagagacccagagagccaagcagacataaccataacattactagaataggagggtgggcaaaggggaagtgagagggagagagaaaacaaaatcctcttcctcctcaccctttcagtgagcctgccaactgaaatttcagaacacctgaataaacctaaagctgaggaagacaacccaccaaaacaacaaatgaagcataaattcgtttgaaatgaaactaaattcatggaatagtctgaaggattaatgtagataactactaactgtaagaaggaaaacaatttgggataaaatacgtaaaaactaactctaatcatacagttggggcagggacagcatccagtgtgtgatttaggcatgcacaagttgtttttctttgtttggttttttgttgttgtttttgagatggagtctcgctccgtcgcccaggctagagtgcagtggcatgatctcggctcactgcaacctccgcctcccaggttcaagcgatcctcttgcctcagcctcctgagtagctggggttgcaggtgcatgccacaacacctggctgatttttgtatttttagtagagacggggtttcaccgtgttggccagactggtctcgaactcctgacctcaggtgacccgccctccttggtctcccaaaatgctgagattacaggtgtgagccaccgtgcccggcctaggcacgcataggtttttgtactcagaaaggggatagaactacaggaaaattgacagttaagcaaacatgttaaactaatttgtagttaagcaaatatgttaaaactatagaaaaacaatgtctagtttctaaaccaaaagaagaaagggtctacagaaaatttaatcaatctaacagaagacaggaaatgaggaaaaaaagcattggaggaaaaggttggtaaaaagagatttctatctatatgaccatgcttttgaattatcaggcagtcagtttttcccaagatttccagtacataagcagtggtgtactggtaaatgtttaaactggctggttgcggataggggtgggagtggggctgattttcagtgtttactcgttttcatggtgtaaatattcccaccatagccaatttcaagctatcaatctgatatcaaccagctcacagaattcctgaaaatgttaacagtaatgtctagtaagcttatgcatgctggttctaggatactattgtttactcgtttgggatagacaggatttcctcatagtcttcctactgcatataacttttgacaataaaataaaaagattcaacaatgagataccactacatacctattggaatgaccaaaatctggaacactgacaataccaaatgctgccaaggatgtggagcaaaaggaactctcc

SEQ ID NO: 1880580 - DNA, 4001 bp, Homo sapiens
ttatttgcataaaatatgagctaagattagatatgttacgctacaatatatttttctaagtttctaacagtttacttagcttatctttaatgcctcattacaaatctcatcaagactaatttattggatgtcttgatggatttgtttttgtaaatatgctggattgtaaaaacattggtagatttcagttatttccaattgtgtataatattttaatattcaaaattcacatccttgcagtaacctggtcatgtaggaatcttccctcttatgcagatgatgatatggaaattaatgggtcttggtggaaggaccaaggttgatttttttttatctttatcactccttttttcttctttcttacttcctgcagctgatttaagcatccataccttgatacctgtaggacataatacagacagtagcctttggaatatgttgtgtatagagcaaacctaatttagtgagaagttttagttcatgaactcacttatgatagataattcattcaaatggccgttccatggagagagtttagtctactatttagttgggtttagactgataaatgaactttgccccaccaaacttctcccactttaaaccccagatcacacctgtgatgtagatgtttgcctttgagaaaatgggaaactatggtctggtgggtgcctccactctatctgagaaggaacatgaggacatgcagcacctcacacagactatcctcacaggtctcaggtgtctgccaaggctagccaaagaagcaagtgtgcaaaacaagaacttcctggaaactgcaatcttttttgacaaatattacatggcaaagctaaataaatttaagtcctgaataaatccaattgtcattgactatgggaatactagttttggagagatggcatttatgatacctttactaaacattatgaaaacctttaaacttcaaatccaaactatgaccttcaagcaacatcctacttccttaataatatgtttaaatgtcagttaaatcattctgatggtgaatctttagaaaactctattgtaataatcaaatagtcaagtaatcctatccaggacaagaaaaaaggatgacaaagagaaagaagggaggggtaagggacagcaacaaaggcaggaaagagaacagataaaagaatgagggtaggagttaattgctatgaatcctgcatgtttgtacatctaagtctttgtgcaaaaggctagaatgtcctgatgaacgtagggtgtgaccatttgaaacaagatcattaaaatgatcactcaccccaaaataacaccttgtgaagagccatataaatcaccagctgcagtgctgccaaatatctctgtctttgcattgctcttatggaaccattttaaattaacaatcccaaaaggtgaagatcatgtctttatttagccagcagatgttggataaacagttagttgtcccagttttgtgagaagtgctgtggagacaaaatgtatgtattcaaatcccttttcttgaaaagatcatagggtagttaggaaactgacaattaactaacagtttaaatccagcttcacatagtatcagagaggaatgggtatatgagcaaagagagagtcgaccaaactagctaacaaaggtttcaggagggtcttggagatacaggtgtcattaagagaaacctgtgcaccatgttacgggttaagaatattaaccaaagagcctccaataactcttgacattagtcagaaattaaattggaaaggacacagactagaggttgagagacgagtgaggaggttgagaggcagttcaggagaattgtttctgggaaagaataactaaggacccaggccatgttagaaacagtgggtgtaggatgcaaagaaattattaaagaaacactgaggagattgaatgaataaaacattaatgtctgtatccttagcaacttacacagtgcctataataggtaggtgctctgaaaatattaagcgaaagaacaaacaaaccatgtaatacatatgttagtattaacattgtggttgtcatttctacgaggctatctccaaatcatgagagtgcaggcctgatctatattatcacatgccagatgacatcataatgacccaccttcccaactctgattgtaacccattagtcatcccatgctcagtcatgactggtaggtacaaatatttttattgtggattccaagacttttatcacagcaaatactttgcatttaattatttaggtcaaaagaaaatattttccatttaaaataagatcatagatcattagcaggcaatgtgtttacactgacagtcattcaaaactttttatctaatccccgagaaaagggtttggtaactgtgggccattaaaaaaaaaaatctgaggcctggtgcagtggcacacatctgtaatcctaccactttgggaggatgaggtgggagcatcactcgagtttaggagttcgagacctgcctgggaaacttagtgagacccccatctctacaaaaaaatagaaaacaatgatcctggtgtggtggtccatgactgtagtcccatacactcagaagcctgaggcagaaggattgcttgagttcaggagcttgaggctacactgaaccacaatcacaccactttactccagcctggataacagagtgagaacttgtctctaacaagatgaaaataaaaaatcggggtccatcacttactagctacatgatcctgagcaacttattcaaatctctctgtacctcaattccatcatcttacaaaacaggcataattatacttatttggcagtgcttaggagaaaatgaaattggttcttatatataaagtgcttagcaagtgtctaaagggagtaggtgttcaagaaattaaaatgctatttcattcaaagtcaccaactagcagggatgacaaagcaattagtggagccatcttcctctcagttttcaagtcaattttcctattggaaccaggaaacctcttaaacttgctcacctaccaggaaaacgtaatggtggttgataaagcattctttggaggaaccaaggtttttagcaacctcagtaattatggtttcctttgctgctgacactttccttgaaaaacagagaacttccaggatcaataaaacattctggacaaaatgtaatcttccaatcatgaagaatgagttcaacgaatgccacatttttcatccttccattcagtcattcaatgattgtttattgagcatctatctggtatcaggcactgttctagctgttttgcataggtaattgaggcacatgccctgccctcaaattattcacaacctaataagaaacactaaaacataagcagatggttatgttacagaggggatagaaatttgtacaagaaattgtagaaatacaaaggaccctatgatctattctaatagtgcgttcatgaacagttcaatccatgggttatatttgagcaactagtgctcaaatgaataataagaggggtaagtgactgataataactctaaggttaagagatgactttgatgtctttaatatttgtcactttttgtttatgtcatgccaccctctctcaaacttacataattatatggttctatacagaataacaccctatagattgttactcattctcatccttaggcaggagtaatggcaacaagaggtccaggtcccattcctagacttttgcatctgaaccatccacttgttcccttacacacacactgtacacatgcactaataacctgggctttacaagctcctttgatccaacgtttaaagaacaattcatgactcattcctaagtgaaatttttatgtctctctatggagtagatgggtgcagattcttgaacaagatagacatcagatggaggatgggagtactttttgtgctgcattatgatgtgggaggcagaagagaaaattcttttttcactcatgagatgagctgagcatttaagaaaaaaa

SEQ ID NO: 1880581 - DNA, 4001 bp, Homo sapiens
tttgtccctctctcctgcaactctgtgtagtaggactctgttttcccctaactcagctttttattatgtatttatcaatttattatgtatagatcaattcagttcttcagtaccttacagctcttctctctcttactctaatctgcacaactgagccccaggagggacttgacaaaccatgagaaagtctttagaagtatgggaaatcgtgttggggaagggaggaagaatatgaacgctatgtatatttacatgttttggttacatgtccagacaaccaatttgcaaatgaataaagtgacgcctaaataaattaggtgatttgacactcttgagtcatacggagttgggcctagaactcagtgttacttcatttgaaataacccttattatggttccctagcaggccatcctatagcctgccatatatggtcgttttgcacccctagacgacagaacgctagggagagtaaggaaggctgagtttttgcttctactaggttcgatgaccttgggcaggttgtcctctctaaggctctgtgtttttcttcataagaagggttagacaagatgaacttttgggtcatgtccagcactaaaattccttgcttctgatctgtcccgggccctgcggctgtggcagtggtggtatcgagctagtcaagaagcttcgcccctatttgtcccccaccctattgggggagagggagaacctctccctcttggttgcttctttagtgtccttgtaggacccacgtggtggtcatctcccgtcacgggggtccagtcttggctctgcgggcttcccaggggccacatagggagaggatccttcatgcatcagagtatcgcaggccagagtctatgccttatccccacctgtttggaaccagcttccaaaccgtggtccccagccttcagcaggcctaccgcgcaggcgcaaccaccagcctggcgcgaggcggacaaacgccgaggccgaggcaaggtgagagggcggggctggcaagaccccgcctccgtggcgtcacgtgggaggcggagtcggaagtgtgacggcgtgcgcggggcggggctactgctgcgcgcgggcgcgggggcggggcggggcgcggcgcggcgcggcgctcgcggctgctgcctgggagggaggccgggcaggcggctgagcggcgcggctctcaacgtgacggggaagtggttcgggcggccgcggcttactaccccagggcgaacggacggacgacggaggcgggagccggtagccgagccgggcgacctagagaacgagcgggtcaggctcagcgtcggccactctgtcggtccgctgaatgaagtgcccgcccctctaagcccggagcccggcgctttccccgcaagatggacggtttcgccggcagtctcggtgagtacggctggggagtcctgcgtcttctgcgaagggtaggaacttttttccttccgcacacagcccaggccctgccctcccgcctgcccctcggggtggcagcggctccactgcacatgttcccttcgaggctgccgcccctccgcggactccggtggactgagggcccctcccccatgtccaactctcctctgtgtcagaccctcctttcctcccggagcccctttcagtgcggggccctcgttcccccaaagtgggaaccccttccttctcaggccccccgatagctggcacacccctccccgtacactcacggctccctccacttaccccccttcagagttgggacatttcttcaaatccaggctcctcttcagggtacaaccttccaccacctttccacatacacgcctctctttcagggtggggatcgccttcacccgaacagaggctcctttttaggggagggaccctcattccctcttcaggaagggggcatcccccgcccccaagtcttcactttagatttgaaggcgactttccagtatccttcagagtagtaggcaacttccttttcaatccctccacttctctgagcattttgcagtggtggagagacctagaagcatcggagcatcatttgcttaatgcaggaaaggaagaggtgcatctgtgttgggggaccctctttaagagtgaaagcagaagtgttttctggttctgcatacatgctggggagaagtgattctgcccaatgaatcaataggaaagggggcctctatcagggaaggaaaggattctccatttttggaagatgttgtctttgtggaatggagaaagggaagaggttattaaataggctgaagtgccttttcagtgttcctttcaccagatgaaggtaatcttctggctaggaaaatcaaaactccaggctagtattcgctgccctagaagctgaatctggaattactattcttcgaggccattgaaatctagtaaaagattaagttcaactgttagaatggtgagagaaacagtttcagctttggctgataacgcagttgtgtgatacctactgctggaactgtattttgagttttttatgtgcaggtagcttgtattcagacgcctttcttttacatttcttgataataagtctctacttggttaatgttcactgatcagtgagcagtctggccataggccgtactatatccagataatatcgagatgagatggatttttaaaatctaaagtaaaaaagtaagtcaaagagcaatgggcctattatagatattaaatagtaaaacctataattttggccttccctttttcttgggcagaaaaaattgtcgttatattgctttcagagtggaaatcctaaaataggaggcaactgagtgttgtgttactctttcctcctcaaaggcacctgttgtccattatctaacctttgatgtcttgtaattccttacttaggttgggctctttttagagagacatccatttttccctggttcttttttagctccatgcgttggtttattcacagtaagtgttggaccgaaaaacttgtcctatatgtccgctgaagggctgatcttatactaaagtaaaaattgagtgtcttcttaggggatgttgtggagagctgtgctatctttatactgtattgggtcctcatcctgtaggagtggtgagatcactttaacttctttcgtgttggctctaaagatttctggagggcttgttaaagcttcatcttctgtaagtgtttaggaggagtctttctcaccagttggggcacttaatgtttattttcaaacattgattatgctttgtaatagctttcttctttcttaaccagtttatgaggcaagtgatacaaaagaccgagagatgaagatgaattgcagttggggctcacacttttcataaagagcgtcattgttgaccctaatgttggatttaaaaaattcatttgatgccatgctttgggtggtatgtgatgagactttcctttagatatggtgttaatcaggagcagaggagatatgcctatcagaggaacctgcatctgcagagagggaaggaaatggttcctggcagtatttctggagctgttcttgatgaagatacttctcagtgggagctctgtgctttctctttctgtcccccttgcaagagtaaaactaggccccatcttaattgaaaccttaaaggggtgggggaggagtagtgctggtatattttactggtagtctttaagcggagctttgctcagctcttgccaaattgcttgtttctgttctctgcagttaattagcctagagcttagagttacattgatctttattttaccatcaggagagccatgaatataaaggcaagcacttctactctagtaggtgtttaaaaactttttttttttttaaacaagaagtcaaaacgtgaagttcttctggggttacaactattgaaagcatttattctcaaggaagtatgtgtgtatttccttttacatattagatagattcttgaaaaatggtgaaaaaactacatttttataagcagaaaaattgagtactttata

SEQ ID NO: 1880582 - DNA, 4001 bp, Homo sapiens
taatagctctccttatatttgtctattgtgtaagtgcatgattatgctaaaaaaattaaaaattcaaataaggaaaaccaaaataaaaacaaagaaaaagaagcaatctaaaattaccccttagctcaccactcgtcaatgttttattgtatatccttccaacgtttttcataaatcaatgctttattatttatttatttatttttttgagacggagtttcactattgcccaggctggagtgcaatggtgcaatctcggctcactgcaacctccgcctcccgggttcaagcaactatcctgccttagcctcctgagtagctgggattacaggcatgtgccaccacgcctggctaattttgtatttttcagtagagatgaggtttctccatattggtcaggctggtctcgaattccctacctcaggtgatctgcctgcctcggcctccgaaagtactgggattacaggcatgagccactgcgcccagcccaatcaatgatttaaaaatcagattattttatatacatctcagctttgtattattctgttcgttatgctatctgcttatttctatgtcattagatgctcttctacatcatttttaaaggctcaattgtgttttgttttctggatgtttcacaatgtatttaacccatgccccatttttggacatttaggttgcttccggtttttcaggcttagaagtcacagtgaaggacaactttgtggctaaatctttgaatgaccacctatgtatattccctggaataagtcccagaaatagactccctgaaagaaaggacactagggttcgtttccatccctgggcagatcccgaggaaggctgggttgttctggaggtcttggcgctgggccctgcactccaagcttcagggcctcccagacccttagtgcacgttccactacactaaatcaccccgcccctcctctccccactctgccccaggctttggactcacccaggagaatgaattacacctcccagccggacgtgaggccatttgtcttgtgctctggaatcctgattagataaaatctgaacagagcacatttacttatttagtgtatttctgggtgggtgggtcctagcccttggggatcaccttctccagatcagggtgaagagtttacagaagggaggagcaggtcacatatccagagcaaccagctcaggcattcaccctgcggggtcacaggaaccccaccgtccccagctcaggcccactccactccagctccaatctccccagtcctgcctccccgcctccagctcaggaagctttaggcgttggttgctcatcatatggctgaggctggcagaaagaaggactaggtgcccagtgatgtggccacatcgcacctctggcgggaagtggactctctccgaccccccttgggggctctggtggcctctgcgggacctcgggttgtctgagcacacgcaccctcgccctctctgggacctgatgcctcgatttaggctcagaccctgtaaatgccccttgagagccctcaaggatccagggttctcttgtcctcaaagaagcagaacatacctgctcaccagcctgcagcttgtcctgtgtgtcccgtctcctcaagtacggagaggccagggcttcctgaatctcatcagatccgaatctccccagatctcatcagggcctcttcccaggagacaccaactctcaaggtctggagacacacctggaacctgtattttcccaaatggtcctcctggctcttcccacagaactgtcttcttgtccctggtctccactgatggggaacaaggcatgtgaccccctgggtcgggcaggcccaaggcaggcgaggcagtgagaagcaggcgaggggatagggctgcttgctcaggtaacttgggttcaggaggtttggcagccgagctgcctctcctggcagcggggcttggccaagggcaatgtgcagccacacaaagccatcctcacaaagccaccctcacagcctctctggccgagagtccctgggcgctcacttgccgggatgcacaggcacgcctctggccaggccgggctgcgggggtttgtggcctggagaatcaaagagccgccctcagctcggagaacacttcctctagaaggctctggtaacagcacaccgggtctgaggagaaagagcctctgtgggccacggtgggtctttgcccacagaggctcacacaccacccctcctgttccaacaccaccccctgcccggccccagttctcctaccagcccaggggactcaggtgggccagaccttttcacactgcccctcccacacacaccacagcaagagggtgagcctccctctttctctgccggggtctctggggcctcccacgacgggggtgggtggtgccataagccctgggtgcctgtgggcggtggtcccacggatgccctgctcagttccagacatagttgttatttggacttttcacatcaaagtaattaattaaatatgcaatagaatacattctcttcctcagtcagtggcaaccccatcccttcattcactgaggccgaaaccttggatagccgtcctggagtttttcagacccatgtccaaaccactggagcatcttgtcagcaggattccaacttcttccagagcccacccgcctctcaccacctctctgtcatttcccacctggatgattacaacagtccctgtcgaggccctggccccaccacgccaccagtggggagaatgcttcctctagaaggctctggtggatttgggtgatgagggggagaggggtagtcccgggccaagccacaccagtgaccccacgtgtgttcagaaccctcctgtctacatttgatttcatcttggctactcttgtcaagacatgcagtttgttagtcttgagcaagtaagagtccttatttgtatgccctcacatgttatcacaaatcccccagattctttttcagatctcatgccctaatttggggtttatgaaatctaccatgctgatagggattcctgtctgtcatggggactttgagccatgactcagaacaagacacttatcaatctggggcctctccgaagatgctgagaccagggccagtctcagctgcaacgccctgcttggaagccactatgggatgattctgcaacagatatcatgatgcaacagatgcccatgaatgacatgggaaagctgggccccatcgcccagggggacactcctgctgtgctctgtcagcaggagggagcctcctaggaacttcatcaggacccattctttctctttttcttttctttttttttttttttttttgtgagacggagtctcactctgtcacccaggctggagtgcagtggctcaatcttggcttactgcaacgtccgcctcctgggttcaagcgattcttttgactcagcctcctgagtagctgggattacaggcatgcactgccatgcctggctaatttttgtatttttagtagagacaaggtttcaccatgtcggccaggctggtctcaaactcctgacttcaagttgtcctcccaccttggcctcccaaagtgctgggattacaggcgtgaaccactgcgcttggccaggacccatctttgtgtgggatccctggctcagtgctaggacagaaacaggttttccttggactctgtggtgtgtgcttgagtgtatgtgggtgagtgtgtgtgtgataacgcaccctgccctgcctttccctccccactcctccaacctggaggtgacagtcacagggcccagcccctccctgccaccttcctgccccagccccatctccattcaggggcaagtcctgctgtggtgcttagagtgcagctctttcaggctttcctttcgcttagccttgatttccaggccaccatgatcagactgggctcccaggcagcatcggagcatccccaaatccagggctgggaggagccaggccatcttgtccaagtaaggacttg

SEQ ID NO: 1880583 - DNA, 4001 bp, Homo sapiens
caactccaagttggcaaggacagttccctcatgctagctgcatctgtattagtccattttcataatgctatgaagaaatacctgagactgagtaatttataaagaaaaagaggtttaatggactcacagttccacatggctggggtggcctcacaatcatggcggaaggtgaaggaggagcagaggcaggtcttacatggtggcaggcaagagagcctgtgcagggaaattcctgtttataaaaccatcagaatctcttgggacttattcactatcacaagaacagcatgggaaaacccgcccccatgtctcaattacctcccactgggcccctcccagacacctggggattatgggaactacaattcaagatgagatttgggtggggacacagccaaaccatatcagcatctttctgggtgtcacaactgcctatggagcagtttggtggaacaagcaggccttggtaacacaggatatttcagagaccatggatgatgatgtagccacccaccttcccaggccacagaaatggaaaagccagacacgctgaaaatgaactcagtccttcctatcagcaagtaatatgatcaaatggaagaaaaatgtattaaataatggattataatgaatgtgagcaaattaaactacaaaacataaggctggaaagacaaccttctttttaacagaaatgtaccaaaaggggaaatgttataactttctatgagaattgatcaataatttggcaatcacaaagttaatgaagtgtttctatttctttttgaatgactacataatttgagaaattaacaggttgaaatgccccctcccaacttcccaggaggcaggtctggaaccagttcccccatgccctgtgcccctagtcaatatggacatttatttctcacagttctggaggctggaagtctggggtcaaggttgtggccaatcctgtgtctggcaaggctgcttcctggtttgcagacaccatcttcctccctgtccttagcagagaggaagggtggtgagtagagagagaagaggctggttctggtgtttcttcttacaagggcactaatcccctcatggggctccaccccatgacctaatcacgtcccaaaggtcccatctccaaacaccatcccactggggtttaggatttcaacgtaaggatttggggggacgcaaaccttcagcccacagcagtgcccttggtcctaccccttcctctcctagacttcctccataggagttcggcaggcactcctggtcttcctttatcttcttgcagaaagatggcccggcaggtctgtgacaacattcacacccacaaggtcaaccaggaagaaactgaacctgatgcaaatagagacagagtcgcacctgtgagaaacaaactcacccgtccaaacacaaagactggacgcagagacccggagaacagcaaaacggagattttcaatgacagtcttgcaagactgggtgtctggctggcatgcagccacccccagcagagtttcaacaagcaatttatcccctagtgcgcaggtccctcccccagttcctcattgactgagtaaatggggttacgatcttcctggacatcacctattggtcgttggattaagatttcaagtctgttctttaggatctttctgctgcattttattgcagcccaccatgcattgcaactgtctcaggactcttcaaacatttgactatggccctggtggctgcacgtagctgataagaaagggtataattatttatgttgcaagctagcctaaactaaattctttggtggggtgaggagagggtagttgagggggctcctactgataggcacgtggccgctgggtgaaagggaaagcaggaaggagggcagggtggtgactcagtacatttctgcttctttatttctctatttccacatagcctgcttaaacctatatgaaggcacttagaactgaaaatggaccaccacatataggttattttctacacacctacctgtcagcgaccgatcttgctcagacgcatccttaaccagcatgaccagtcagagcttcagccacacagcagcctagggagcttcttcatgccaacattccttacctctgtttattaatctacctacttacctgtagaagttcatccgtcttaaggacttaggaaaaatgtcttgagattttggtcatgctcatccttatgttttgaggaaaggggtgctcagaatgagttgatgtggcttcgtctgacacaagctgtcataaaccccatgccccgtcatcaaccccacaccccgtcatcaaccccacaccctgtcattgaccccacgctctgtcataaaccccacgcctcatcatcaacgccacactccgtcattaatcccacaccccatcataaaccccatgccccatcatcagccccacaccccatcatcagccccacaccccatcatcagccccaagctccgtcataaaccccacgccccttcatcaaccccacaccccatcatcaaccccacaccccatcatcgaccccacacatgccccgtcatcaaccccacaccccgtcatcaactccacaccccatcatcaaccccatactccgtcatcaaccccacaccacgtcatcaaccccacaccccgtcatcaaccccaggccccgtcatcaaccccatgccccatcatcaaccccacaccccatcatcaaccctacgccccatcatcaaccccataccccgtcatcaaccacacaccccgtcatcaaccccaaaccccatcaacagccccacgccccgtcatcaaccccatgccccgtcatcatccccacaccccatcatcaaccccacgccccgtcatcaaccccacactcggtcacccgtcatcatccccacactccatcatcaaccccacgccccgtcatcaaccccacactccgtcacctgtcatcatcaccacactccatcatcatccccacacttcattacccatcatcatccccacactccatcacccgtcatcaatcccacactccatacccatcatcatccccacactccatcacccatcacatccccacactgtatcacccgtcatcaaccccacactccatatccatcatcatccccacactccatacccatcatcatccccacactccatcatcaaccccacgccccgtcatcaaccccagactccgtcacctgtcatcatcaccacactccatcatcatccccgcacttcatcacccaacatcatccccacactccatcacccatcatcaaccccacactccatcacccatcatcaaccccacactccatcatcatccccacactccatcacccatcatcatccccacactccatcatccgtcatcaatcccacattccatcatcatccccacactccatcacccatcacatccccacactcctctatcacccgtcatcaaccccacactccatacccatcatcatccccacactccatacccatcatcatccccacactccatcatcaaccccacgccccgtcgtcaaccccacactccatcacccgtcatcatccccacactccatcatcatccccacactccatcacccatcatcatccccacactccatcaccatccccacactccatcaccatccccacactccatcacccatcatcatccccacactccatcacccgtcatcatccccacactccatcatcatccccacactccatcacccatcatcatccccacactccatcaccatccccacactccatcaccatccccacactccatcacccatcatcatccccacactccatcacccgtcatcatccccacactccatcacccatcatcatccccacactccatcacccatcatcatccccacactccatcacccgtcatcatccccacactccatcacccatcatcatccccacactccatcacccgtcgtcaaccccacactccgtcacctgtcaccaacc

SEQ ID NO: 1880584 - DNA, 4001 bp, Homo sapiens
aaaaaatcaatctcatgaaaatagggagtagactggtagttgccagaggacagaagggtatggaagtagcagaaagaagagaaattgattaatgtgtataaacatatagttgacaaaagaaataagacctagtgtgagacagatcagtagggtaagtttacaatattcttttgtgcttttcaaaatagttagaataatttgaatgtttctagcacaaaggacatataattaaagtgatgagatcccaaccacactgattagatctttataaagtatgaatctatattatcacatgtaactgaaataataaatatctattatgcatcaataaaatacatttttttcttagacagagtctcactctgttgcccaggctaaagtgcagtggtgtgatttcagctcactgcaacctccacctcccaggttcaagtgattctcctgcctcagcctctggagcagctgggattacatgcacctgccaccacgcccagcaaattttgtatttttagtagagatggggtttcatcatgttggccaggctgttctcgaactcctgacctcaagtgatctgcccacctcaccctcccaaagtgctgagattacaggcatgagtcactgtgtccagcctaaagtaatttcttttaaaaaagttaatgacttacccaaagttgtgaagttattgagggacagaactctaacaactcagcaattctgatttcagttaacctaactgttccatgatgttgcctctgagactgaattatgtgctagttagtttggatttcatacatttttaacttctatatataatttcaattttatagtaataatgttaaaagaacactttgagacaaatttagcagagtttatttgagcaaaaaaatgattcatgaattgggcagcacttggaaccagtcaaggttcagagaggtctacccagcaacttctttaggtagtatctacagacagaaaaaggaaggcacatacagaaacagcctgattggttatagtttggtatttgccttattagaacatgtctgagcagtttgcgacttgttattggctgatatgattggccaaaacttggctgtttaaaaaacatactcttagttacatttcagtctgtttacatatagcttatggtgcagtatgtatgaaggtttctttaggccaaatttaatttaatttaacaagccttaaaaagaaagaaaaggcaaacactcttcttattcacaattgttgtgcaggctagattggacggtggaaaactattggtcttagctttgggcttcatcttactcttccataaaatgaaactgttcaagctgctaacattattttcacctcccaaatttaatgatgacatatacttacctctgttttatttttagtgtattcacttttactttgtttgttaccaaaactccctagttttcctaagtgtttttctttaatttgaatatataaaataatacagctacaagtggatcagtataagaattggaggaggagaaaatcaaacacagatatgattgaaaaaaactatcaatgctgtaaaactttctaaatacttatgtgatcaatactgtactctggagtagttgggagtacaagtgattataggtaacagtaattcagtacttaccatacccctaatactgctctgtactttaaatattaacttatttagtcttcttaacaattttctgaggtgttagtctgatattacagctgaagtatacagagaagttaaataactttttccaactgaatagccagtgaatagtagtattaatgagaggtgacaacctgctagcagcactcactcgctcttggcgtctcctcggcctcggtgtccactctggcagtgcttgaggagcccttcagcccgccgctgcactgtgggagcctgtctctgggctggccaaggccggagccggctccctctgcttgcggggaggtgtggagggagaggcgcgggcgggaaccgcggctgcggttggcgctggcgggcccgcgcgagttccaggtgggcgcgggctccgcccgccccgcacttggagcggcgggtcggcaccgctggcccgaggcagtgaggggcttagcacccgagccagcagctgcggagagtgcaccgggtcccccagcactgccagcctgcccctgcggcgctcgaattctcacggggcctcagccgcctcccgcgcggcagggctcgggacctgcagcccgtcatgccatgcgcgagccctcccctctcccggtggactcgtgcccagcccgagcctcctcgaagggcgccgccccctgctccacggcgcccggtcccatccactgcccaaaggctgaggagtgcgggcgcgtggcgcgggactggtgggcagctccgctgcagtctcggcgggccgggaaccgctaggtgaagccagctgggctcctgagtcaggtggggacttggagaacttttatgtctagctaaaggtttgtaaatgcaccagtcagcactctgtgtctagctgaaggtttgtaaacgcaccagtcagcaccctgtgtcttgctcaaggtttgtaaaggtaccaatcagtgctctgtgtctagctaatctggtggggacttgaagaacttttgtgtctagctaaaggattgtaaatttaccagtcagcactctgtgtctagctcaaggtttgtaaacacaccaatcagcatcctgtcaaaacggaccaatcagctctctgtaaaacagcccaattagctctctgtaaagcagaccaatcagtaggatgtgggtggggccggataagggaataaatgcaggccacctgagctagcaggggcactctactggggtcctcttccactctgtggaaggtttgttcttttgctgtttgcaataaatcttgttgctgctcactctttgggtctgcgtgcgtttatgaactgtaacactcaccgcgagggtccgcggctttattcttgaagtcagcaagaccaagaacccaccaattccggacacattaaggtctgaacgaaaatgacgtatttctggagacgaagatgttaactgctacattatattatctagctttatagtgctcatcatctggtagagaacattaaacaaaaatgcactataactagtaatacaaggactatgcaagtgtaataagtcttatagagcaggggtccccaatctgaggactgcaaatcagtgctacacagcaggatggggtatacagcaggacggggtacacagcaggaggtgagctgcggggcaggaaagggagcgttaccccaagctccacctccttgtcagatcagcgaggcattagattctcatacgaatgcaaaccccattataaactgtgcatgtgaaggatctaggctgtatgctccttagataagaatctgatgatctgagatggaatagtttcaacccgaaaccatctcccctacccctgtccatggaaaatttatcttctgtgaattgtcttccaccaaactggtccctggtgccaaaatgattggggaccactgctatagagcactacgtgtttaatggaaactattggttatacaatgcctattatgtgtcaggaagttttaatatgtctgtaaggcatttagtttctttagtaaataaggaaaatgaggcttagggaaattacttccccaagtcacaaaagtagctagcgtaataggagctccacctcagatgcagaagagggtattcttgccactacactgtgatatttttatacccatccagttatggtgatccttaaagacttcatgaaatttgaaatgaactcagaagaaggagattttctcaggtgaagaaagagctcaaaacaaagtaggggaaagcattaccagaagaaggaatatttgtcccactgagcggaataaaggctccttgaaggggaggtagaagataaggcttgaaaagacgatgaggtgaagggtcatggatatcagactcaaaagtttgtagctagtaaaag

SEQ ID NO: 1880585 - DNA, 4001 bp, Homo sapiens
aagattctaaaggcacaaatcaaagaggaatcttagtttccagtaggaatagcttctcagtcagtcgcctttcttcaatcttctggtttcatgaaagaggtgatgtcataatttatgatgttaagctgactagtgaaatgtcattgtagaagtgatgttttaattgatgatgttaggctggttagcaagaaagtatcaaatgtcacttttctgacataaactggcagttacaattatataatatcaattattctttggaaaactgcattagatcagttagagctgaaccaatttagtttaagcaggttcatattttttttttcttagctgctcatccagtcctaattattaggtgtaaaatacactttggacatagtttagactttgataatgtcctctttggaaaggtaataggtgtcttacatggcctttgtgttccaaaagaggtacaagcaaagtctgtaatgaccttcctgaaaggaggctgcaccttgaattgctttagcaaatcatcctcctcccaaattacaactcttggaattattttaattgttaattgcaattgttaattccttcacattgtgaaggaatagtttttaaaaagtcatagcttattttggttttctatgcatgtcagctgctaagttaatttaaatttaaccataaaatactaagcacacttgcctctgcccgttcctttgctttactagtaaaaagaaaaaaaaaagaagtgaagaaacattttctcagattctttctcctttactaggacatcattttgaaaatgtgatgagttagttagaaggatataggaactcacaactcaaaaactgaatgataaaattaatattaataacaaataccatgatatcaatagctactatttgttgcaattgctatatccaggcactgtgctaatcctgtagatgcagtcccttatttattcctcacaacaaatctgtgaactagatatggttggtatcatttttcataggagaaaaaaggaggcttacaagtactttggcatgaatcagaaaataaacattttataaatgttaagtattttcaggagtattagtatcatttggtgggaggtaatcatggcgaaatacatcaatggagggagtcacctttctcaacctctgtcatcattatacccaaggtgaagcatggcagctgagtcccagtgtgaaggttcagtgctagcagaaagaagagcaaggagaagttggtgaagctggggcaaagtgaggatatgtgtgcgtgcaggtgtgtatgtttgtacataaatttgcatgtgcatgtttgtgtgcatgtatgtatgcacaggtgtgtgcaaatgtagacttgtatgtacacgtttgtgcacatgtacgtacatgtgtgtgcacctatgtttggggagtgggaaccaggatggggaggaagtatagagtagtgccaatacaggagtgatatcagcctccttgaacatatctagtgcaacctgacaatctggtacagatttaaaaacaggccatcgctctagaggagagtccaggaggtgccatgttgagcttggcattaactgtccaatttctggattttgggctggtccagcagggtagacttatgggagaggggtcagaaggactaaggcaggaggtaggctctgagggggtggtgtatacttaccacatggcacagctgtatttcaaaaactgaatagcagatacggtcctaccattcaaagctgaggacataaactcatagattattggccttctcttgtccctcccatatctcctatttccagttctatccacacttactccaaagtgagctgccttctttccactgctatagaagggatttcctccaaaacattgagctcatagctttttttcaaacacttcaattctagaggactgctttccttcttacaggtattatgcctttttgtgggtgtgtgtgtgtgtgaaaactagaaaaaattcaaacctggggctgaatgagtccattggaatcacagaggaatgtgaagttttaagacaatatcagacattctagaacttgggtgaaaggttttcacattccctctcaggctctgtcaagccacataacaaaaataaattgatcaataaatgtgtcaaatgagaaaacatcacattcttgtccttggcagcattgtatggcttcatgatacttcttcatggcagattattgtatgtgcctcggtccaagtctcttccctttgttctcttctccttctctaccttggtttcaccttgttttaggagcaaagccaacctatttcatttggaatctgatgaaaagacagaaatggttcctgggattttgaactttcctctcttactccaacctacaagagaggcaactccggaggacgtaggacaaataacaactaacacttgtctagtgctttgtgattttgcaaagtgcttttatggataaactcactgtttcttacaacagctttgtaacatcatgattattgtttcccctgacagaaaacaaaatgtctcaaataagttaagcaaacagcttataggttttctgagataccatgatgtctccaatgtaatgtgggattttttaacctatcttcactctggttattaggagaaatcctcagcacccatgccaggactctaaaatcctgtaggcttgaacgtttccttgttttaaataatgaccacgactctcttgctcactcactcactccagttctaatggggacttgaagtcagtgggttaatgctttttcctctttccctttttctatcccaggaaataaatacctttttgagatatgttttattgaacaaatgctgattgagcatctattatgtgccaaacactgtcctgtggcttggaatatgattgttagccaaatcatgcctttctagagtttgcattctcatggagtgaggcctaaaaaaattttaataatgaattgtggcactaggtgttctatgacagttcttttcattagaaacaagtcactaggtttagctcacaaacaaggagagaggattacactgggcatgtgtaccagtagttggtggtctttggaagccattttaaagagatttctataaaaggatctgagcatgtctctcagaggcccaaaatatcctcccccaacaataacattcttaataaataaaatctacaagccaacttctgccttcatatgatgattttctgtgcctcataccttcaagttctatctcttaatttctactatgaaacaagaaactaaagacttgaggtgttacccttttgagggttaatttcctctccacaagggttttccacatctgaaaatctttttattagataactcttaagcatcatatctgatcttctaagccacacctatatcctgtggcagccactgttgcaaccaacagttctgtgtaggctccagtgagtttccagtaggtacggttttgcttcaggcccaaaatgcacacctcttgcctccggcaggtgtggagtttctttactgatgtcactgcattgagaactatagaaacttagtgttcaagaatatgcatcctgaaagtgagagtgcttaataccaggttagaagaaatgttcaccaatggggactggaagtcaatgggtaaatgcttcttcatttgacttttcctgcctcaggaacattttgcaaagcatttcattctgcttctcagatgagctcacaggactgagcaactggtcacccatggtgatatacttgcatgggctctccctcctcccttgttttattctggttccctggaactacatttccagataaattactcacacatggcctttttcttacactttgcttcttatggaatctaggtgaaaacagcctttaaggtttaatgcttcaaaaaagagtgaaatcaatgcatttctgatgatgagattctgtgctatatacaatacacctaagcttcagtagttacaatggcattttatgaggtatgtgacttacatgatgt

SEQ ID NO: 1880586 - DNA, 4001 bp, Homo sapiens
catcaatcaaacacatttaagaaatacattggtttggtccagaaagacctgggactgatagaaagggaatgttcagtttaagataaagattgtggagaccaaagttctctgtaagtcttacagtggctgcccttagagacaatggatgacaaatgtttcctattcagatcttagttaatctctttaggattgggagggtctggaagaaaaagatctagctatgttaatacagattctttacagatgcatatcccacccctccaaggacagctttgcagggccatttcaagatatggcaaagaaacatgttttggggtaaaatattttgattttcttccttgtcttgtaatgttatgccagagtcaggttggaaagtaagtcaccatatatagggttaagtaaaacccatctaataagaatttatgatttgtagggcatgactccccaaatcctgtagataggaatcttgggcaagataaaaaaatcagagtttagtcctccgacctctgccaatttctcaagatatcttttgctagtctaaaagctaataacaaaaagaacaacaggatgagcattttatacaagtaaatgtattccatttaaaagatttttctttattgtgaaattctgccattctacctttttaatgctaaaaagttctgtttcgtgaaatgatggtgatagtagacggcatttatttgcttgacaactttgtatgatctcagattttctgtgtgttttacttttactgacccttcaaatctaagtgtgtgtaaacccttttaaagtgcgttactacatcatttagtatgtgtttcgtagaaagcaacctgggagttaactgccaggagcacgcaagtttcagaaagcaagacatactcatctctattcaacaattaatcagttctgattgggtttcaagtaaggcttagtaccaacgcttagggaggggcgtgcaaaaacgagaaaggtagtgtttgaccttaccggtttaaggtttatcctgtgcattatacagttaagaaacaacgcaggagagtgccagggaaccgagaggggcttgacagttgctgcaggagagtcttgacttggaaccagacgaacgtggaaagttagaggaggggaaaacccctactaggataaggcagacaggaatcaaggcttggagcgcatctggggccccggccgccctgcccaggtggaggaagagccggctcgaggtgcagcaagggggctgggaaggaagggctggctaaagcgccacgtggatgtgagtgccaaagagactaggagagcgtggaagtgagtcccgaagagactgagttcaggacgtgaagagaaagaggccgagaaaaacgacccaccagcgatccttcttgaggtcgacaccgagcaggggtggagtcggatacgccccgcggacaccatgcacccaatcagcgacgagctgtcgcggatcgcgggacacgccccctgatccaaaggcccgagaagctcttgcacaggacagcctctggaaccccgcgccattagcgcctgcgccgtctctaggccccgccccctcacccctccggtcctggagctcccacagctaacatggcggcgccctgtgtgtcctacggcggagcagtttcgtaccggcttcttctctggggtaggggtagcctcgcccggaagcaaggcctctggaaaaccgcggcccctgagttgcaaacaaatgtcagatcccaggtaaggcctgggaagactggaagcggcttacctctgccgcgcgaggatgtggagccagcgcggacaccttcccccagcgtctcgcgtgccttcaggcagggactctaggatcttaggtatttagtggaggtctgaggttgggggggaggaggtgggtattggcgtgcagtagccgctctagaggttgttacttgtttttttgcggggtgcagcgaggggaacttacctgaaggtagaagtggagcgacctcctccttcatttggctgctgagctaagtaagggtcggtgcctaggtctgtgttgggtccagtcctaccctgccctgctgtctagggaggaggagggccgcgccagagaagaatgatgggaattggattcctgcaggtgcctggaagacaatggagaaagtcacgttgtgtagaggacagtgactttttgaaagtgccttcaatatgcgcaatttctggcttcttaattttcccgaatccccctctatggaaagatgcaggccagaacttgtacgtttcgtttaatccagggagaagtggggagtcaacagctggatggctgatgatgccagtttactgacatgcgatctcagagcaggaaaaagatttgagagggaagaaacgagtttagtatgggattatgtttttaggcatctgggatttccagtaggtctacggatagtcaagtgtatagctcaggaggagaactgatttcgaaatgccctgttaccttgtaaatggtaactgaggccttgtaaacaaattaaattacctagggagagtgtactgaggagtaggcagagggacagggccctgaaggacaaataagaaataagaggcctcaagagattgagaatgagggaccaaagaagcaggagagaaaccagccagtgtggtgtcatggaaaacaggtgaatgtttcaaggagggagagtgataacaagtaccaattattgcaggaaagtcaaataccatactttaaaaactatatttaaaaaaaaaaacatctttttgtatgttctttcctttatattttaatctagatcaaccagtccattctatctattcatgtggacatttgttttttttttttttcttactggaaaatgtgctagaaatttttattttttcatgcatctctttgagtatatctttgctacatacgcatgattatgagagggactatatcatacagagtatttttattgttgacatttaatgtatgtattgggggatggctaactttctgtccctcctggtatctattcttctatgttttttccatgttcttataatcatgcataaacatacatgcacaggtgtactttacaaaaaatggtaccatatttgattgcattttactttctgcttttctcttgtacatatgcagtatattgtaaagtagaaatccttcagggtcccctattatgtttttaaaagcatttttaactgctgcatactattccatgataagaatatatcaaagttaatgtaacaattgatggacatttgctttgtttctactttctttgcactaataaagtttcagtaaacatctggtctagttcttaagtactggtttagtaaaatggatgaagaatgatttctcctgttactttaattttcatctccttgaccattcttgaaacaacctctttcccccatatggcaaatgtttactgagcactttacctgagccaggcactgtgaagtaaacaatttaaagtcaaacaattacaagatagtatccacccttagcactcttaagggatggtcctgaaatggctgaatccccagattcctgaatactactacagcatatattttaccacattaagtacagctcagatataactgaaacacttagctgacccccctttagattcttatgattgcatacatatacctaaagacattgataaagcttttttttttatcgtggtgcagagcttatctgtcttaaacattaacattttttcacttctgcctccaacattaatagatagatttctcttggtagcccatgttttataaaataataaaaattttaatcacttaatgagtgacaaaacactatacctggtcttttgtttgttccacttttaatttccttaattacaaaatctcttcagaggttacagaaaacttgaagggtgtgggagaatagaataataataaagtgcatttcatgcagagtatttttgcattttgtttatatatgtaaatgtatactaggtggtgatataaacagtaaatattac

SEQ ID NO: 1880587 - DNA, 4001 bp, Homo sapiens
gcatggtggtgtgcgcctgtaatcccagctacttggaaggctgaaacaggagaatcacttgaacccaggaagcagaggttgcagtgagccgagattgtgccattgcactccagcctgggtgacagagtgagactctgtctcaaaaaaagaaaactaatgcacacttttttaaaattaggtgaaccatatgaaattgccaatattgactgttgtgacctacagaaataattacttcatttgactcaatctaacattatttgaggatgatcaagctaatattatttgctgatgggttcttaaagacttgacattttaggaagacgcaaaaaaataaaggtttataaattttactcatccccatgttctttactccccaaaatgcacacaccaaaaaaagtatatatgttgacaatttctcagttctgtgacagagaaaatgtcctctactgcctaacctgttgtttctaactgctgctattaccaattgtgaagatattacagttcgtgtcttttctccaatgtgatcttaaaatgtttgagatcagaaaccatatttttgtttccagcacaatgtttgttacattaataaattttcaggtttaccagtgttggcactttgaaatgcagagttagtgattcagttatgcagagtaacattggagaacttgcattagcataaccactagagagaaaagacgtttttcagtgcagaccctagattgagactttaaaaccctttattttcaaactaaaagaagaggtaaggagcactgaaagtccccatgtgcaaaaacaggactcagagatgatgaccgaggtgaaaattgaacaggtcatccttctaaaacagcccatgagggcatcttgagaacaaaggacaaagcaatcttcattgttataaactcttaattatccaagaggccagcaattgtgttttttttttaacagagcttaaaatacatatatttttatttaccttttacgtatgtggtcaaaagacacaaaaggttaattcagtacaaggtgcaatgtttgatcccatggaaagagttctgaggcagagtcgagaccaaacagctcctcctagttgtcattgagggcatgacacttaatatcaaatattaaggaaatttgtttctgaagtgtaactctgagatggaataagaaaactagccatatatcctgatcattgttgcctcaaggtctgtgtatcaactttgttccattcatacagataataagtggctgtggttaattgatgaataattgccaggtcactagaacccatccacttgggaactccccaggactgtgctttcaaattaatacagtccgttctttgggaaattttgttcagtgtttttcttctaaactttagaatcagccaaataattttaccaataaaattttagtaatatacagtactatttacagagtaatgcacagaatctcttttcagaactaacaaaggaatactagcagtaaaaaagatcctgcaaggatcttttttaaaaatctgcttagaaaatagatatgatttaacaccttaatttgtaaaaatttatttcaaatggtctccttcaatagcccattttaaatgttcttggttcttttctattattgcaagcagaggcatgctgtgtactcttagtattgtctattaactaatacaaaagaaaaaattggtgaaaaggttttcatcattgcatgattctgttgctcttatagaatacaagtattagaattggaagagatcttggaaggcatgcagtacaatacaagcatgagtgactccccttcaaatactatccccaagtaattttatgttttttgtttaactatggcagcccatttcaatcttagatagctcttaccgttaggaagttcatctttatagtgaaataaaatcctacctccctgtaatttttatctttagtcatgaaagtcaaactgtacttaagatgtggttattttgttcttaccttgctagttatagtttaattaccagtctttaagcactgtgaaaattctaacattctcattctatcaaactacattctacattgtacagcaatttgtatctccatagaaacaattccaacacatagaattgtaattcccaaatggcataattgtaaacattttctcagataacttcaaagccatttctgaaatttcttctaaaacattcacatgaactcagattgtgaaaatgagttatacctcctttgaaatcaagtcgttttttaattcctccaaatataaatgttaaaaactaaaatgtcaaaataagcaatggtagtattaacacagttaatactgaaggtaaatgttaaacacatgctactttctttgcaaagagcatctgcaaatttaaaaccaagagtggtctcattacagacaagtctacttgaaaagttacattaaattgttttacacgacatatcttggcattttatacttttttaattttcaaaagtttatttatagagaacacagctattagtgacgatgattctaggtttagagggaacacattttcccatttcctggtgattttccgtaagcacagtcttggtgctcctctgggccaattttcccattttgtttctcctctggagaagtgaagtgacgcactggctttgtaaatttggggaaaatatccagaccagcctgatcaactctgctctccttttctctcctgggtagggaggctgctcactgcgatctctgctgctcctctgtttgtccgtgcagttggctttactggaacagcaatgtgccctgtgtgggccactcctggccagcagggactgcagaggatagatgagactccctaactctgggtacactaggcaggcctccttcactctcttcccgagccacttccttcaccttagcccccatcagttagttctctatgtggaattcaggcaggaaagagatgagttgtttaatgagcgctcctctcacccctagggaccctcaaaatgggaaatcataaagtaaaggagcaaagatattttaattacttaaacagaggagagaaacaaagcttttattcttgctggtggtaaggtatgagctcttcatctcttctcttagaaacaaaagcaaatttaggatataaatctatattccttgcgaagatgtgtgctccaatattctgggtatatgcaaaatgtgcacatgaatgtttaggaagtgcacatatatcattattttatatttgggcatttttaggtgaggttaaaaaattataatggacaaaagcttttttacagttatgtaatttttgaacccaaggaataagaattaatctaattcaacatatttgttttataaatagggaaactgaggcacaaagatttaagtataatcaagttcacacagatatatactgacagaacaggaactggaatgtcaattatataaaaattataattgataaatatcataccacccaaagccatcagtgccactgtcaagcatctttgcaatatactaatgatgtgaatagaccagatataattttatccagcttttacaatgagagtaattaagtcattaaattatacaaatacataccctttctacaatcataaggcaaatcaataataaattaataaataacctaatttctatcagtgcttactatgccaccagatttcacatattcaacttttaacagtaattgtacacagagatgtgttacaaaatgggctaattttcaaccccaaagaatttttctcttagaaccaacaaggcaacttaaactagattgtactactacagattcttgatcatactcctgggtagctaaaaatcaaaatagttattgcaagaattatgtacattatgtgtaacaattaactttctaagacagttcctttttattgtccatattaatgacatttcagaacttgagttttaggcagtcttcggtcagcaatttcatcttaccataaactgagcaagcttttcacaacatactcattttt

SEQ ID NO: 1880588 - DNA, 4001 bp, Homo sapiens
agaccacagagctctccagagctccagagtttaaagggtgagcagaggaagaagaaccgacagaggagatgggaaaaaataataaggtagaaaaataaccggggaaaataggtccaagatctgggtgcagtcgctttgatgaaaagaacagacaacaacatcaaatgctaaagggaaccatgataatgaggtctgagaagaattaattagatttcatatttaaagataacaggtgactgtgataacaataatttcaggagaaagcttgtgataaaagccaatgggaactcaagtgaaatataagtctaagtagggaagcactagtcacagttgcattgaggctgggagataaactagaaggttgtggggaatccaggcaataaattaagaaaacttgggctaaggcagcggcagtgatggtgagagagcatggatagcaaagttttgaggtacatatgtgaagtatttggtgactgagtagactgtagggcatagggctgaacacagccaagaagtgagacgtgttgaaggtgtcctggagaattctatctagcctgcgagactgagggacagatgagtcatcaaatagtcttagaatacatgagatggaacaattcgggggaaaacatatgatttccattttggacatgggatgtgtgagatggctaacatgtgatagtctattagaaatatctaggaaactcttggacttatgaagcttaaacttagaagaatggagatgaaaacacagatttgtaatttatctacatatggaaagataaagttacacaaataaaatagtatatatggctttccacacagggaagggactgtcctacaaagactgaagaatccaggcatgaaacatgatggcaaaggaccttaatgtaactgtatttggagggaggacctttaaggggtaattaaggttaaatgcagccatgagggtgggatcctgagccaatagaattagtctcttataagaaacaccggagatataacagagacaattacccaattctttaccaaagagattcttctgttcttacatgggtaaaggcctgaaagacttctgtgttcttttaaactagggtggaaagacttgcaagaaaagtagaaaaagcctgccttgaaaattctcctacagttcccaaatctgtagctataaatgaactgcaagatagggcagacttcattctgtaaacaagaaatagttctcagacaaaaaagacttgcatttggctctaaaatgaacatttatggggcttgataaattacctttttttctccctactccaagatatctggctttctctgcttttacacgttgcctctgattagggctttacattaaatgtattttttttttttttttttttgagacggagtctcgctctgtccccaggctggagtgcagtggcgccatctcggctcacggcaagctccgcctccagggttcatgccattctcctgcctcagcctcccgagtagctgggactacaggcgcctgccaccgggcccagctaatcttttgtattttcagtacagacgggatttcaccgtgttagccaggaaggtctcaatctcctgacctcgtgatccacccgcctcggcctcccaaagtgctgcaattacaggcatgaaccaccgcacccggcccattaaatgtcttttataccccacctcacccatgctacctttcttcagctgctttttatgaagatagcttggaatgtgattttgtgcttctcttccttcaaaggaagaaatgtagatttgtttagcctgtttgaagcagacactagatacatactgatgggcttgtattcatctcctcgagctaccaaaatgaaataccatagacttaaacaacagaaattaattttctcacagttctggaggctaggagtccatgatcaaggtctggcagggttggtctctggtaagggctgcctttctggtttgtagactatggccttcttgctgagacctcacatggcctttcctctgtggctctcagagcagagagagaaggagagggagatgggaagaggggaggggaggggagggggggggagaggaagtctcctctggtgtttcttataagagactaattctattggctcgggatcccaccctcatggctgcatttaaccttaactacctcttaaaggtcctacctccaaatacagttacattaagggttaaagcttcaacatattaattttgggtgaacacagttcagccaaggtgagcaagagctcatcttgctgagataattcaagaggcagaagaacccagcaccaaatggctgtgggtcttgagtacctgtttaagtttttaagaggattatggagagtctcctaagaacttaaaaggctgctcgttgactttattcttttttttttgatattttagacagttggtctttgtaaacactttaaagttacgacaataccccattttttaaagttaatgtgaataaacatttattatttaccaacataaataattaatttgtactgtaactttatgcagggctgactgtctcttaatcacagtgaaccctcaacaataacatggaacatctgtaaggagtatttacattgaaagaatgcaagaacatcagcttaaactataagatcattgaaaactgagcatgtcagaggacaaagaactttttgaaaaggctctttgagcttatggctactcccagggaagagtcctgcaaaccgtataagcactccctggacaccctgtctggtgggaaggtggaggccattggaccctagtgggaggctcaaataagagggctgataatggccacagctgtaaccctggccttgacccttgaattctgtcccaatgcacctcttcagcatttgtgattaaccccaagaagaggaggaaagcacaaaaagctgaaagatagaaacaattaaaggagtgctggaagagtctgaaagcacatggctctctcatttgtgctttaacaataaagaataaagccagtgggaagagaattctctcctcaccttcacgcagcagctgtgggagcagacccggtgagattataccagcatggctgaggtcatgagagaaaaatgggaatgtagctgcagccactagcatcaggcagtggcggaggtcaggagtaatgagaagagaggagaggaaagccccaggaagcagctaagggaattctgaagaggtctttgagagtgcttgggagagatcccaggaacccttggagaagaactgaaatgatcggagtcatcaacatttcccccagtgggctatatgcctgagagtgctacagttacggcacagtgtgttcaagcttcttccttagagtggtaagggcagggttctaaggtgtgcagttgcttgtagatttttagaaggtctgactgcaatgttggtgctagttctagtgcacgaatctcaaggaggcaggccacatccatttaactgtctgtctactgtacctaaaaagcacaccacataggcacaacagtacaatcactgaagagaatctttttatagcctgagctaatcaatggtggccaggttgcaactcttgaagaccatagaagcagagaatgatgtgattcaacagctggagcatgaaagatcttgctattcatatgaatgcaatggtctcctgtacacacacacacacacacacacacacacacacacacagagagagagagagaagtgtgcacaaaggtaaaggttcattcttccttacttaactgcatctccctcctacccattccccagcccccaacacacacacaagctctgatttagagcatctgttcattcaagcttaacttttattttcactttaaccttagttcacttggatgtagatgttgggataaggagagatccttatatatattggggaatggtgaaggaaggagcaggttgagtaactgtatgatgtgccccagtcccaacacctcactgccccccttcccatcccagcagaa

SEQ ID NO: 1880589 - DNA, 4001 bp, Homo sapiens
aaagaggccatgtaggcagttgtagagtgagaggagacaggaatctctgcctctctgccacttggcaataggaacatctcccaagttttttcaattttttttttttttttttttgagacggagtctcactctgtcgcccaggctggagtccagtggtgctatcttggctcactgcaagctccgcttgggttcacgccattctcctgcctcagcctcccgagtagctgggactacaggcgccggccaccacgcccggctaattgtcttttgtatttacttagtagagtgggtttcacatgttagccaggatggtctagatatcctgacttcgtgataagcccgcctcagcctcccaaagtgctgggattacaggcgtgagccaccgcgcccggccagctttctcttttccttttttttttttgagacggagtctcgctctgcgctctgtcgcacaggctggagtgcagtggcgccatctcagctcactgcaacctccgcctcccgggtgcaagcaattctctgcctcagcctcccaagtggctgggattacacgcgcccgctaccacgcccggctaatttttgtattttctactagagacgaggtttcaccatcttggccaagctggtcttgaactcgtgacctcgtgatccacccgcctgggcctcccaaagtgctgggattacaggcgtgagccaccgcgcccggcctcaattcttaacctagctatcaattgcagtgttaaagaaaaacgcctcagtcctaatgcacttggtcaagaaaacactgcactactgcaaaatgatcaaagcagcattaaactgtggactgctggataagtgcggagctctagagatgatgaaggggagagcatctctgctcagtaaaagctttcatgggcagcgactgaaagaatgaggcccagaggaatttctaggaactttccaagagaggaaattcaaacccgagaactcccaagaggtgtctcccacacccctgttctctgaccctgccatggccaccctcccccgtcacaggtctctgcgtgccatgcacctagagtccacttcgtcgcgactctccaacacctattttctccaggagctgcttcggacccgtttgttttttttgtttcgttttgttttgtttttctgacagcgacagcccttgggcaacgctaatcattccaagcaaattctgtcatgccaagacctcccttaacagcacgcgcccacttgtttccaactctcctgcgaattgggcttcgggagcctccgaaaccaaggctcggagatgtggagcgcacaggggaagggtcgagctgggacccacacccggctcttcctcccacaccgcctgttgagcccaaggctcaatttcaacacaaagctctccttccctcaattccttcaacgacgggtaaccttcaacgaacacctaccggaccagaacagagtgtacgagcggcgcgggaaggtggcacaaaggcatggcccagaggagtggcaggaagactcagccggggccctccactccccagcctgcccggcctgggcagagccgccgggccgcccgagtcctggggctcgcggaggaacggagatggcctccgcaggggctcgcggaagcccccagggcgtcggaccgtctcacgcgcgcgtcccgcgccactcacctgtgggacccatagcgtcgcccgcttcagaggtggaagccgccattccgccaccgcgccaaaacgtcgtcatcaagctgcgcgcagagccacgccccgcggccgggcgggaaaagcgcttctacctctttgggccgttacctcaaaaggtacgtgcgcaaagcgaagaaggccggccggccggccagggaggggaaatggcgaggcaggagtgcggggggagggagtggtccttagctgaatgcgcctgcgttgtggcggcctctggcgccccaaggtagggctcacgcactttctccctagcaaggaatgcgcgtgcgcgtaagcagggttgttgattagtgccccccaccccccccgaagagcgacccctagtggtgcaccggtgcggaccagaaaattgcacgctttcttgaaacaggtattgactgagcgcccaatgtatgcctggcactgggctgggtgctgccacctaagcgagcacgaccaatgcaagtctatcagggacgccctgaccgccaagcagctggcccctgcagtccgccatgccactcccgacgcctagcgcgccgctcagcacaccgtgagcgcccactaactgttgggctccaatgacgccgaggaggcggccccgtccccgcgctcccgccgctcccgccagggcagcccgggaggccagacgctggcgctgcagggagagggcggtgggcgcatccgctagggggcgcggcggggcggggcgcacctttcggcgggcctcgcggatggcggcgcagggcgtagggcctgggccggggtcggcggcgcccccggggctggaggcggcccggcagaagctggcgctgcggcgcaagaaggtgctgagcaccgaggagatggagctgtacgagctggctcaggcggcgggcggcggtatcgaccccgacgtgttcaagtgagcggggcgggtgggggccgcatgctcgccagacacccccgacctctgctctccgggtacgcccggcccgctggtcgggaggagcccccgctgcccccgcccccgtccttgtccggtcttcagggaggtggccgcgccgggcggagagggctcaccggccccgcgtctgtccccgccaggatcctggtggacctgctgaagctgaacgtggcccccctcgccgtcttccagatgctcaagtccatgtgtgccgggcagaggctagcgagcgagccccaggaccctgcggccgtgtctctgcccacgtcgagcgtgcccgagacccgaggtcagagctgggcccgctgtccctgccccagtggcgggggtggcgggcggggagggggcaggcgcggcacagcggcggcgtggccctgagtggccaggcctgtctgtcggtcggtctaggcccagcacctgcagggcccatccgtgggctctgctcctgggcttcgctgccagccttaggaggcacgtccaggtcaggtggacgcagagtgcgtgccccagggtggtccaggctgggtagggctcctccgcttagctcctccccacctcttcactcaggccttcatcctacaaagtcgggaatcaagacggtttggggctgggcgccgtggctcacgcctataatctttgggaccccacggcgggaggatcctttgaggccatgagtttgagaccagtctgggtgacagggtgagatcctgtctctaaatgtttttcaaaagacagtctcgatctctgtcctgtggtatacagcatccagggaagtgcccagggagcagggcaggcagacgtcttcctgcctttaccccacctgggcccagttcctgcctctgatgattgcaggaagagagttagacgcggaactcccagggtgcagaggcctgcggggtctgaagggcctcctccctctccagtgtggtgactgggctgaggagatgctgggactgagagtgtcatggtggagcctccgtccctgctcatcctctccgcatgttgcttctgctcccgatggctctctctgaaatgcagcacaacctcccaggccaatggaaggaggcccagagctggctccctgcctggaagcaggaggagaccctcacaggcatcatgagaaggcgtggaaagcaggctgccttcatgggggaagtgccagggcctgggcacccacgcccgctgacccaagagggcccgggcacctgcgtgctggcctcttcactgaccctcgctctgtctgctctctttgtgtctctctctgacctccagaggcctcctttctctctgccaggaacagtagcccccctgcaaggccctcgttttcctccagcccgcagcctgcggcctct

SEQ ID NO: 1880590 - DNA, 4001 bp, Homo sapiens
tgcactttcttcccagcttgggtgagtggcatgtgatgctcggggccccgctgcatggcatggagaccccttttctgatcgtgagatcatcttagtttccacgcagccatgtattttgtccctcacgttcgcacagcctaagattttgtctgttaccacctacccttgaaaggccggtgaacctcaagcctcttccgtgtgcacctgcagctgcagcctgagttgatggcagggcctgctctgcccccaggcagcagtggaaagggccaagggtccttcatttccacacctgggtactccctaaccctacaggatggatctttttttttagcaactggggcatctaagaaggaagtacagtgcataggaggaagaagtgaccggtgaagcatctcaacttcatatgctatttgctaaaggcctttctgcagctgtctctggataggagggccccatgttctccagtggacgtgtgtgtatgaggaggtccccattggactcaatcagatcacaaagagcaggtggctatacctgcagactttacctgtggggtcacttctgtgggctctgactttggcacacctaggatgaccttgctggggacctgggaagaatgccagggagctgcagagttcctttcttgcctcttgacttgtgagctggacaacaggccctctgtgcccaggatccatggggctccttcactgggccccgatgggcaggtcacagagggtctccagaagaagctctcacccttcacaggagctgccatgaagggcaagtgacacagtgtgcaaaaacattgtacaaagcaaagcaggccgcacaaatccagaaaatgtggagaacagggggctgcccaggaatttggtatcatttgtaagtaagacaagaactgcaagttccaggaggtggcggtgtgcttggcaggcgccaggctgtgattctctgacgggtctgatggtgcctgaggccgtcctcagaggaagggccacctgctccatgttagggagagaaagcactgcctgcaccctgggagctgatgttatgcctaaaagaaacgcacacaagcagaagtgtcctcgggcagattctccctcactacaaacatctttcagccaaagagaaattctagttgctctaagggcaaaatctgcagagcccgtctgatcgctggcattgctgccaccttctcatcctgccatgcagcccttcccgttgcaccaccctctctccacctctgtcacctgacaggccccactttccaggagcccctcagccagcgggattgcactctcaatttcaccgctgggcattcctaatggaattctgcttcttttccatttctttccaggcctccttttatccatgaatcttaaaatttccaaatgatttagctagtccttggaacggaatcccttgtatagaagaacataacagctcagagaataaagacaagtggccaaagccacaaacaaagctaagggctgaatcgtggctggaattcaggtttccaggccagacccttctttgcagcttggaggagaaggataaaacctcagcagaaagaaggtgcatgaagcaagctgcagatgctgcagttagcagggggagtgagctgaggaggcactccttccactcacgggaacagccaggagctgccaagtgacacgctctgaccaaggagaaatagtggaagtttgccagggacatctgagaaagcttttcctttcctcatggaaatggccaaacagctggcactgccctttgagactggacacaaagcctggaggagcagcagacatcccgcaaaggcgagagaaaggccgggagagccacagagcctctgctgggatgtgcagctgctgagctgacaccaaccagcactgacccccaaaccacctgcccggtgagaaaaacacacttactggtttacgccattgttttccgggtatttgatcacatgcagcctcatttattcccacatgatgcaggcttttctgccttgatgcagcccacagccactccatctcaggggagcgatagacgcaggaacagcaacaacaaatttcagtctgtcgacacagtcgactttgttgcctcctgactgtcccacacagcaggtgctcctggtccgtggaagccttccttctgcacttttgccctctcccaggaggatgctgcattcagccggcagatgggaaacatgggacagttatctattgacacagaacaaatcatccccacaactctgaagcacaaaccggtttgaatggcttcaaaccacaaaccgttatgatctcacagtttctgtgggttggaaatccgtgcacagctcaactgagtgcctccatcttgtattcttggatgaggatggagtgaagccctcagcaagggcttgggttttatccgaaggttcaactggagaaggttccatgtctaagctcattcacggttgttggtagaattcagatcctcatggactcttggacttagagcctttgtctctggatgaccattggctccagtctgtgctcaggcccttgccaggggggcctctgcctggtgtagtgcacagcatggcagctggcctcattaaagcaagggaggaagggagagagggagggtgctgggacaagacagtgagagcagaacagaagccactgtctttttatgtcccatcccattacttctgcaatgttctgtgtagtcccctccatactcaaggagaggggtcccacagggtgtgaatgccaggaagtggggattgctgggtatctcagaggctgcctctcacaggcataaaggcaggcctgtgccttgttcacctgtcctggggtggcacacttcacttttgctatctgtctcatcaggtgaccacgactgaccacggggacgctgggaaggcagtctagtggaggttcaggagccacaggatatggtgagaagagtgaccacagtcaggctctgcctcaccaggtggaagctcccttcctccaggacctgcaaggctccctgccctcatcagccccccagcctatgagatgctctgtctcacctgctggaaggtattttccccttcatgcttctggctaagatagtttgtacttcggattctcgctcttccactcaaacctagggcttgggtttttggaaacaaaatccataaattcttgcgggggatgagatttctgctttgactaagtcatgaccctctgtgaggctataagcctggtgctgctgaccacctgcttgaattggaggatggacagagaaggagagattattggggcaaaagcagaaggatggatgccctccagggaacacagcataaattctaatccctcaaccaaggactctgatggtatcaggcaagcctgtgctcccccacaaatacctgacctctgctactcaggtgggaggtgagtcttggaaccacatgcctttccacatcgggctgttgggagtgagtgggacccatgtgttctgtggaaactgaggctctcaacagagtccagcatctgggcggggctgcctcactcagaggtaagaacgggggtcagggttgatattccctgagaaagtaattttaaagtaatgttgacttgctccaaccaacacccccccagatatcttcaccatgcaaaaagaaagttgtgtctaatgcatgtgtcccgacaatgaatcacctcactggggcatcttagaatgcctggcacacacaccacgtggcagcctgggtctccccacagcactgttccagtccagcacactcatccagaacgtgccaccactccccccaagaagcgaatctctttcttctgctcttggaactcatgagacttgatggccacctcattgaataaaatgctgcagaagtgacaccatatgacttccaaggccaggacatgcaagatgagacagcttcttcttggacttcctttctgtcaggacctcgatcttgtaaccaagccaccatgttgtgaggaagcccaagtgct

SEQ ID NO: 1880591 - DNA, 4001 bp, Homo sapiens
aagcaacacaaaatagattagagacctaaatgtaaaacttgaaataataagaatcttagaagaaaacttaggaaaaacactcattgacattggtcttggcaatgatattttgactaggattctacaagaacacaagtaacaaaagcaaaaataaacagatgggactacaataagctaaaaagcttctgtacagcaagagaaaccaacaaaatgaaaaggacctaaagatttggagaaagtatttgcaaactgtatatccgataaggggttaatatgccaaatatataagaaatgcacacaactaaatagcaaaaaaaaaaaaaaaaaaaaaattaataccctgatttaaaaacgggcaacggacctgaatagacacttttctaaaaatatacaaatgtccaatagatatataaaaaatgttcaacatcaccaatcattaggaaaatgcaaatcaaaaccacaatattaatattacctctcacacctgttacaatagcatgtgtgaatatatataatacacatataaatgtatatgtaatatacatgtaacatatatttctaataatatgcgtgatatatatatatatatttctagtgttggcgaaagtgtggaaaaaagaaaagtgaaccattatacattattacattgttagtggtaatataaattattctgaccattgtggaaaacagtatggatgttcctcaaaaaaattaaaaatagacctatcatatcccagcaatccctcttatatatccaaaaggactgaaattgaagagatatctgcacaatcatgttcattacagtacaattcacaatacccaaagtttaaaaaatctaagcgtccatctatagataaatggaaaaagacatggcatgtatatacaatggaatattagccctcctttaaaaagaaggaaatcctgccatttgcaacaccatgaatgaatgtggaagacattatgctacgtgaaataagcccgacacagaaagataaacaccgtatgatctgacttatatgtggaatctaaaatagtccaattcatagaggcagaatagaatggtggttaccaggggctaggggaaggggatgtgggtagatgttgatgttgaggagcacaaagtttcatgtatgcaaggtgaatatgttctggagatccaatacacagcatggtaactacaggtaacaatactgtactctctacttaacatttgctacgagggcagaacctgaatatcctcaccatacacacaaaaaaggtaactacgtaaggtgttggatatacttattaggttgattttgttgattatttaacaatatattagcatatcaaatcatcaagttttatgctgcaaatatagacaatttttaaaaatacattttatttatttattattttaaataaaagtataactagaaaatccctgagtattaattgattgccttttataaactgaggtgaggtatacgcttggcctggtaaactctgagagtagagaagactgagagggtctgaacctgaacaggatcccaccttggggtgtgccagtgataaggtcagagctggctacaggtgccacgcagatatctggccctctagagagcaatgggaaatcagagaggggcagctcggaggggcctcagggcctgcgtcagggtaactgggatcttgggccgggtgggagggtcactgacgggaatggtggaagtacttacattcagagttccaaggtggcccccccaggaagggtcttgtccagcaggggtgggtgctccaacctatgggtggcaggaatatgctccatttcaataaggcaccactgagtaggaaagttcctcaaataggcagtgaggcaggggtagggatgtcagcacagggactgaaggtcagtgctgacttacagaaggaagagaaaggaaccagcatgtgctaagtgtatgtcgcatatcacattcctgatactgcaccagtctgcctgcaaatcttttcccaaggaatcctcacacaagccagagagtattacttacaacatagtttgcacttgatgtaactgggctcagagcccctagttcatcacgaagactgagtgagatccaaaccctgcttgggctctaaagtctgtgcccttgcaacagtgctcctgaagtcccctgtgcttgctggcctgccaggatggttctgcgactttatgaaggaagagcctaccaagagggactggacaatgggagctaggtaggctcctacctgccaccacaggaatgagaacaccaacacacaggcagatgacccacaggagcgccagcctagaattagccttccccaacacaggctgctgcagctcacatgtgccttgttggcataaggcagcagccagctccttggttcacaccatctgccctgtcctctgctccttttcctggttgacagctgggccttcaagtcctccagcctctaccaagtcttctcattcagcttcttaggctcctgggccacatccatgtttagtttcaggaataagagtagaacacccctattatccagggttggaggtggtgacagagcaatgtggcttccagttcattgcatgggttcctgatggtccttgtggtttctgtttgtctttccatactgcctgctgaaaccctgatgactgcaggtgcaacatcagctgcagataaaccttaaccagcttccacaatgggataagaacaagcctccataataagtcccttattttgtatcactcctagtggttttgcttcttggatttcatctgagaagttctgttttcactgtgcatctctgtagatgaccagaggacatcaggaataagaatatttcatagttactgtaaagattatacacacacatacatgtatgtatcatttatataagggcctaactgaatgcctagcacagagtaggtcttcaacaagagtagctatcactaattgcttcattacaaagctgggtcaagctctagtagcagttccacatgggcaaaaaggcttcatagtttttggaatctgaataggagatcaaagacgatctgcattgcaattcccatgatgaggagtttaattatgaacaatgggaagaataatgcatgcagactgtttacagatagctaatggcctaatatgctaaatatagttgcagttccctaaccaaaagctcggtctgctctatggaagcagactgaaagcccccactgctgtgcaatgcgggtgagaacagctggaacaaatgttctcttccttgccactgaatgataaatcacacctgtcaatgaataaaacattccgtctcagcaatcaagcaatggatttttaagaagccttaccatttatcagtttagctattgattacctgtgaacggtcatttcatcagagggataatgaatgggagagcagagttccaatgtgcaatgtgaagtgagttcgtaagtttgcctccagaaacttgatagtatttaaacttgccccaaagcattaaggaacttataatagatgtaaccacctgtcgttggatttctgattaacaataacaggtgtactaagcaaaaaatagacaaatgctgattaaagaaactgaggccagttgcccaccagcagcattacccagaactttaggatgctgacaaaaacaagacacgactgtgtgcataacaggaggcaagatgagcagttttgagttcacacctgaggtcttctccaaaccctaggccagcctggcataattttgttcatattccttgtcattttggttttgttctgagaaacatgattgtgctcattgcatgagctgctcaattgcttaacaagtgatgtgccagtaagtatttaacaactagctctctgagaaaaaggagcttatgtgcagtgttttgtcaatgtatggtctaaatgtaatgtggtttaaatactcccactatggatgatttcaagctgtcaatgtgatgcccctgcactcagagttgggaagaaaggctagcaatcag

SEQ ID NO: 1880592 - DNA, 4001 bp, Homo sapiens
aaatgtggggcacaatatttaagaagacaatattcgccgggcacggtggctcatgcttataaccccagcactttgggagtgaggcaggtggattgctggaccagcctgggcaacactacaaacatctctctctacaaaaaaaatacaaaaatcagccaggcatggtgatgtgcgcctatagtcccagctacttaggaggctgaggtgggaggatcacttgagtctgggaggtcgaggttgcagtgagccatgatcgtaccactgcactccagcctccagcctgagacagagtgagaacctgtctcaaaaaaaaaaaaaaaaaagacaacatttaatatccagttgtgaagagccactgccagaacctgagaaggaatggtggaacaagaagagcaagaagactagacagagaacaattttttgagataaggtctcactcccattgtccaggccagagcacactggcgtgatctcaattcaccgcagccttgacttcccgggctccagtgatactcccacctcagcctctcgagtggctgggactacaggtgcgggccaccatgtctggctaattttttgcatttttggtagagatggagtcttgctatgttgcccaggctggtcttgaactcctgggctcaagcgatctgcctaactcagcctcccaaagtgccgggattacaggtgtgagccaccgtgctctggcaagaacaatgttttaagaagcatgaggatgttgagtatcaaatgccgcaaagttcgggtgagaaaactgaagagtctactcggcaatcaggagttcattggagactctggcagaagttttctatagtagaatggcaggaaatgtagccatactgaaattttgttagggacaaacaggtgatgaggaaatgaagaaaatgagaatgaagactgtttttaagaaactggagtgtgaagaaaacagtaggacaataagtaagaaacctcaacggggtgtgaggacaagttccccaggataaagtggataagatggaggttggcacttaagatttggagcaggttcaacagagaggaatggcaaggtttgagggatggttcctgacgtctaagggcgcatttaatattctttcaaggttaaggtggggcaagatctggaggagagaggatagtaccccaagtgtcatcatccattgacaggtcaataggtagtacagcgacatgggaacagagcaggtgtgcacagaaagcatggtttcccagggagggcagtatttttccatgaggatgcaagagtgaaaagcctgggagattccacgaagagctgaggggcttctgagccacagcttaaaccttaaccctcctcctctcagatacattcaaatccaagtactgataataatctagtaagacctgggcttccctggctaccgtctatcaaggaatgccagtgtctgcctctgggcagtgcgcgttggatttgggttctctgcggggtcttgctgatcttaaagacaatgcaggggccttgtgagtctcacctctgtacccccagcacataacaggtgctcaacacattcgcgaggggagcgctgagcaaagcggaggcccgggttccctcctggagaaacctgcttcccctccaaggcctcaagcgtccgctccttcactgacctcaatcgttgatttcggctgcacttcctatccctgggggagctttcaacgctccgccgtccaggccgccgggccccgcagcccgcgccccgctctctagggctgggcccccaggggctggacgacctctctcgccttcgctttctcaagcgtaaatcgggcggcgggggctgcagagccttcatctcttcctccgtcccgggatgtcggagagacggcagcccagcctccgccaccgcaaagctgcttaacgggcagcgcgagtccctcgggcaccgttggaggccgttgctcaccgttgggcaagtgctttaagaagcacgaggatgtcgagtgtcaaatgcggcaaagggctcagagctcgccgccaaggggcgtggcctccgggccgcggcggcctctgggagttgtagtcccgcctcaacttgtggtggcctctttaaaaaaacaaaaaacaaacaaacaaaaaaacactggcgcttgggtccgtcgctgcctcggtgtccctgtcgggcttcccagcagcggcctagtggaaaagtaaaagatgtctgaatatattcgggtaaccgaagatgagaacgatgagcccattgaaataccatcggaagacgatgggacggtgctgctgtccacggttacagcccagtttccaggggcgtgtgggcttcgctgcaggaatccggtgtctcaatgtatgagaggtgtccggctggtagaaggaattctgcatgcccccgatgctggctggagaaatccggtgtatgttgtcaactatccgaaagataacaaaagaaaaatgggtgagacagaagcttcatcagcagtgaaagtgaaaagaccagtccgatttaatagtgttgggtctcccatggaaaacaactgaacaggacctgaaagagtactgtagtacctttggagacgttcttatggtgcggcaaagccaagatgagcctttgagaagcagaaaagtgtttgtggggcgccgtacggaggacatgactgaggatgagctgtgggagttcttctctcagtatggggatgtgatggatgtcttcgtccccaagccgttcagggcctttgcctttgttccatttgcagatgatcagattgcgcggtctctttgtggagaggactcgatgaaaggaatcagcgttcacatatccaatgccgaacccaagcgcaatagcaatagacagcaagaagtggaagatttggtggtaatccaggtggctttgggaatcagggtggatttggtaagagtagagggggtggagctggtttgggaaacaatcaaggtagtaatatgggtggtgggataaactttggtgcgttcagcattaatccagccatgatggctgccccccaggcagtgctgcagagcagttggtgtacgatgggtgtgttagccagccagcgaagcagccaggcccatcggatgataaccaaagccaaggcaacatgcagagggagccaaaccaggccttcggttctggaaataactcttgtagtggttctaattttggtgcaacaattggttggggatcagcatccaatgcagggtcgggcagtggttttaatggcggctttggctcaagcatggattctaagtcttctggctgggaacgtagacagtggggttgtggttggttggtatagaatggttggaattcaaatttttctaaactcatggtaagtatattgtaaaatacatatgtactaagaattttcaaaattggtttcttcagtgtggagtatattcagtagtatttttgacatttttctttagaaaaaggaacagctaaaggaattttataagttttgttacatgaaaggttgaaatattgagtggttgaaagtgaactgctgtttgcctgattggtaaaccaacacactacaattgatatcagaaggtttctcctgtaatattttatccctggacttgtcaagtgagttctttgcatgttcaaaatggaagccatgaattagaactacattctttattccttgttttaatttgaaccccaccatatggatttttttccttaagaaaatctccttttagaagatcatggtgtcacagtttggttcttttgttttgttttttaacacttgtctcccctcaaacacaaaagtacaatatgaagccttcatttaatctctgcagttcatctcatttcaaatgtttatggaagaagcacttggttgaaagtagtgctgtaaatattctgccataggaacacttctgtctacatgccttctcattcaagaattcgtcatcacgcatcacaggccgcgtctttgacggtgggtgtcccatttttatctgctactctttatttcat

SEQ ID NO: 1880593 - DNA, 4001 bp, Homo sapiens
tgtttgtttctgtggcatgcaaaccaaaataagaaaatcaatctaaaaactgttttggatgaaatatttacaaacataatgagtaaccctacttccaaagaaaagtgaatgctatctccaatttataaaaacagaggaacataatctttaccgagaaaaaatctttaggtataacatataataataccaacataatataccactaatatactaaacatattgttagaatatattaagaatatataaagaacataaagtgaagagattctgtaaatatggaataggtccaaaacatctgcatactaataaaacttcacaggtaggtgatgtcagtccccagttgaaaacccctggcagggccgggtacagtgcctcatgcttgtaatcccagcacttcgggaggccaagatgggcagatcacttgaggccaggagtttgagaccagcctggccaacatggtgaaactccatctctactaaatatatgaaaattagccaggcacggtggtgcatgcctgtaatcccagctactcaggaggctgaggcacaagaatcacttgaacccaggaggtggaggttgcagtgagctgaggttgccctccagcctgggtgacagagtgagactctgtctgaaaggaaggaaggaagggagggagagagggagggagagagggagggaggagggagggagggagagaaggaaggaaggaaggaaggaaggaaggaaggaaggaaggaaggaaggaaggaaggaaaagaaagaaaactgctggtataggagatgctatattcaaatttaaaaagttatggctgggtgcagtgtctcacacctgtaatcccagcactttgggagtctgacgtggggggatcgcttgagttcaggagttcaggaccagattgggcaacatagcaaatccctgtctcaacaaaaaatacaaaaattatctgggtgtggtggtgcacacctgtagttccagctacttgggaggctgaggtaggacaatcgcttgaacctgggaagcagaggttgcagtgagctgagatcaagccactacactccaggttgggtgacagagcaagaccctgtctcaaaaatataaaaataaataaaaattgaaaaaaaaaacaaattacagaagttacgattgagttaccaccttaagagatagctgaaattatgactgaaaatgatattctgtggttgtctaacatcagataaagctgcaccaacaaacatatggacaataaaggcgttgatggatctctaggaatttttcacatagcatacaattcctgaaatatctgtatttaataacactttgtgatacaaatttaacctggacaagactaagtatttcttctgatttgaggactctttccattcaactcatcaataatatatcaaataaacctaattatttccagcacttctctttttacggggtgaaaaaaaatcatttgtggtctttttctctgggaaatctcaaagatagttttgggtgcagaagatattatttaggattaatttagggaaggcaaaatattaagttatcaggagacttgaacacctcattaaggtaggatcatgagctactgtgaaacaattcctgactacttaaagtgacaataaaatattttttaaaataaacatgggaggtaacataattataaagaatcttactttttcctaagtgagaaaactttgctctcttaaataatcaaggacaccagcttgactaacatggtgcaaccccgtctctactaaaaatacagaattagccaggtgtggcgtacctgtaatcccagctactcgggaggctaaggcaggagaatcgcttgaacctgggaggtggaggttgcagtgagccaagaccacgccactacactccagcctgggccacagagcaagactctgtctcaaaaaaataataaaaaataattaaaaaatcaaggacatcttaaagtcaacataaaccagagaaggttcttctggtaaaacacagaatctttgttccccaggcaaactacaaagaaagtgaagaatactctttcacaatcttgtattcatttccttttgctgtgccaacacattaccacacacttaaggggtgttatttattgtcttagagttctggagatcagaagtcccaaatcagtctcactggactaaaagttaaggtgtcagcaaaactggttccttctggagactttaggaagacaactcatttccttgcctttttcagcttctagggccccctttcattcctggctcagggcccctcctctatctcaaagccagcagcagaggatcttccaatctctttcccaccatgtcccttcccacatcacctgttcctcattctgattctcctgcctcacgcttataaacaccgttctgattacactgagcccaccagaggatcctggataatttccccacttcaaggatcttaatcacttctacaaagttccctttaccacctaaggtcacgtattcacaggttccagggattaggatgtggacatcttgggggtggaggagaggcattgttcagtctaccacacactacttaataaggacagaccaatacttttctcattttaacagagagaaaaattctagttttgtatcagtatatttgatagtaaagctcttttaaaaaatcataaataagtccatcaaatcttagtaagccttgaccatgacaaaattctcttttctagaaccttctgtagctttctgatgcaggcgtttatagctacaaactttcctcttagtattgtgtttgctgtatcccttaagtttttttatgttgtgtttccattttcatttgtttcaagaaatttttcactttccttctgaattttttcattgacccactggtcactcagtagcatattgtttcatttccatgtatttgtatcgtttccaaaattcctatcattattggtttctagttttatttcattatggtcagagaagatgacttgacattatttcaatttttttgattttttttttttctttgagatagagtcttgctaggtcacccaggctggagtgcagtggcacaatctccgcccactgcaacctctgcctcccgggttcaagtgattctcagcctcccctatagctgggactacaggcatgcaccatcatgcccagctaatttttgtatgtttagtagaggcaggttttcatcatgttgaccaggctagtcttgaactcctgacctcaagtgatctgcctgcctcggcttcccaaagtactgggattataggcatgagccaccatgcccggcctccttcagcactttaaatatgtcatcccactctctcccggcctgtaaagaagacttggaagtctgctgccaggcatataggagctccattgtatattatttgtctcttttctgttggtgcttttgggatcattttttttatccttgacttttgggagttttattattaaatgtcttgaggtagtcttatttgggttaaatctgcttggtgttctataaccatcttgtactggaatactgatatctttctctacatttgagaggttccctgttattatccctttcaataaaccttccacttttaactctctctctacctcctctttaaggccagcaactcttagatttgtccttttgtggttattttctagatcctgtaggcacgtttctttttttttttttttttttttttttttttttgagatggagtttttgctcttgttgcccaggctggagtgcagtggtatgatcttggctcactgcaacctccacctcccgggttcaagcgattctccagcctcagcctcccgggtagctgggattacaggcatgcaccaccacacctggctatttttatttttattttttgtatttttagtagaaacaggatttctccaggttgatcaggctgatctcgaactcctgacctcaggtgatccacccacctcagcatcccaaagtgctgggtttacgggtgtga

SEQ ID NO: 1880594 - DNA, 4001 bp, Homo sapiens
acgctgtacatttaggctacaccacatttacggaagattttttctttcctcaatagtaatgtaaccttagcttactgtaccttttttttcctttataaacttttcaatttttaaaaacctttggacttttctataataatacttagcataaaacaccaacacatagagcttcacaaagtattttctttgtacccttagtcttttgttctttttttttttttttgaggcagagtctccctcttgtcacccaagctggagtgcaatggtgtgtctcggctcactgcaacatccgcctcctgggttcaagctattctcctccctcagccccccaagtagctgggattacaggtgcgcaccaccacgcccagctaatttttgtgtttttagtagagacggggcttcaccatgtcggccaggctgatctcgaatttctgacctcaggtgatccgcctgcctcggcctcccaaagtgctgggattacaccacgcccagtccccctttttttctattaaaaattttttttttaacttttaaactttttagttaaaaactagacactaacacacacatgagcctaggcctacatagggtcaggaccatcagtatcaccatctccacctccacatcctgtcccactggaaggacttcagaggcaatgcatgcatggagctgtcacctcctatgatgacaatgccttcttctggaaacctcctgaaggatctgctgagtctgtttacagttaactttttttttaataactaaaaagagtacactcttattagcaattaaaaacacagtgtagtaaatacgtaaaccagcaacatagttgtttattattattaagtattaagtactacacataattgtatgggctatacttttatatgactggcagtgcggtaggtttgtttacagcagcatcaacacaaacacatgagtgatgtgttgcactctgaccttacaatggctgtgacgtcactaggcaataggaatttttcagctccattgtaattttacgggaccactgtggtatgtgcagtcattgttgcctgaaacgtcgttatgtggtgcatggctgcataatagtaggtggctggtgtctcccatcaaaactgttttggaggggcaaatcctgaatacaggaacgtgattcagatgattggcccctggtggggaagggagggcaaaaattaatatctttgaaaagggcaaactgaagtgatgaccgagtttacctagaaaatatcaagattacacattctgccactagactaagggaaggtttgaaaactagattattacacaaaacacactattatagaaaaataaagataccaataaagatactttggacacctgagtttgtggctatgaaattcatactcaccccagagataacgcgagacacgaacaaaagtaatcaatgaaaaactgctggcatactgactgcttgaacactgtgggcactcgctcagtgtgggacaagcgtgctggctaaagtccctccccttccctccctcccctccctgtcctccccacctccccctgcctcccacccccaccccccaccccattacctcactgctgccagccttccctttcccatcagtcctccgttaggcgcagagccctggctcctgcggggccaggctggacgtggcttccagtgacagggccctttgtctcacaggtgggaggctggcgtgcgaccttcatcggctcccacgtctctgcctccgtgctctggcagctggagtgggtgcagcatgcagcaaggatacggagatgccatggtgggccaccgtgactgccgacccttctaggactgcacccccgtcagtcctggctgccccaggccctagactcaaagcctctcttccagtccccacagggaacagggccccaggaggagagcaggctgcccccgtgccccgggccctcagagggtgaatttggacctttcctgttgtattttgcccactctctgacattcctcttccccaccttcaaagctcaaatggttccccaggaagcctgcactagtcactctgatctctccctcctctgaaccctgtgctgccaggtcacatgcaaaacacgtgtcattaaagctggaaaagaccttcagaatgacttggtccaaactccccattttacagaagggcaagttggagcccagagatgatgttagcccaccacagctgtacagatgcaccaggggacaatggcagagtccagatccccgggacctcgggacacaggactccctccttacttcggggacactgcatgtgctgccttgggtggtctgctgtgcctccccatgagggcacgtcccatggaaatgggctctttttctttcccaggcagagagctggaggtgcccagggccccacacctgacatggccagggtgggcagggaccagtccatcatcattccctaagcagttattggagctctgaggtccctgataagtaacactccagcaccagtgggtggtaactccttcaggcagaaggctgagcacggtttccatggagaccgcccaggctctggtttccaagacaacacttgcacgaggttacagagcttcctatttatgtcaacttaacatttccaactgctctattcttctggccaaacccgggcctaatgcaaggcctccattctaggatgggtgacagtcctcgagggctggagggaagtggctgagactccgtgcagttaggtgaaagtgagacattgcagccagcagggcctcctcaagcccaggggcaggtgtacagagaccaatacatgctcatgcttatgaattataaaaaggtgtagaaagagacgtagtcctacagcttcctgccatccctgctctccagagggaactggtgttacaaggctttgagtgcgcttccagaaatagcacatgcacagccatagcgctatcacttaaaaaattcacaaacgggatagagataaatatatattcttgctcttgccacctgctttaccctaattatagatttcggagaactttacacatcagcacaaatagatctacctcattctttgtaatagcaacaaaatactgtacttttttaaaataccaagtctccaactaaaggacatttgtctttagtttcttgctattataacaataaatatgcttgtacatatacttttgcatatcctatggagtacatccataggatacattctgggccaaaaacattgcattttaaaatttgattttgtcaaactaatttactcccattacaggccaatgttacaaaaaacatatatctaaaattcctaaacaaaatgttagcaaatggaatccagtagcatagatataagaaaatacctcatgactaaatcagttagcaatattcgccacattaacagatatgcaaacatatgaatagatgcagaaaaaacatttgataaaacaatttaatatcaatccttgattaaaaataaaaacactttgaaaactaagaatagagaacttcttaaatctcaaagagtattcttctaatatttacagctaaactatattcaaggtgaatttccttttaaatcaagaacaaaacaagatttgtggctatcaccatggtgccagagctcctacccagtaagatagcacaagaaaaataaataaaagttttaattatttgaatggaagaaacaaaatttactcataatcagttaccagaattgcttgtctacaaagcacaaggctgggcactgtagctcccgcttgtaatcccagcactttgggaggctgaggcaggtggatcacttgaggtcaggagttcgagaccagcctggccaacatggcaaaaccccgtctgtactaaaaagacaaaaattagccaggtgtagtggcatgggcctgtaattccagctactcgggaggctgaagcaggagaatcgcttgaaccctagaggcggaggttgcagtgagcctagattgtaccattgtactccagcctgggtgataga

SEQ ID NO: 1880595 - DNA, 4001 bp, Homo sapiens
agactcagtgggctcaaaaccaaagttaaactccatcagaatatcctgctacttccagctttaaaatatatcttaaatcacaatttcatactacatgcagccctttggttcaaactaccatcatccctcacttgaaattagaattggttttcctgcttttgtatttttttaaattataaactatttcaaagaaaccatgtgtgactttatactttttactacacaaaaattatgaagatctgccgagtgcggtggctcttgcctgtaatcccagcattctgggaggccgagacaggcagatcacttgaggtcaggggtttgacactagactgaccgacaccgtgaaatcccatccccaccaaaaacacaaaatcagctaggcatggtggcccgcgcctgtagtcccagctacttgggagcctgaggcaggagaatcacttgaacccaggaaagaggaggctgcagtgagctgaaatcgtgccactgcagtctgcctggggaacaaaagtgatgctctgtctgaaaaaaaaaaatagtatgaagagcttacatacttaaacatggaattgctttaagtgtttggcattcactattcccgtgcatgccagcagcttcttattgcaaacacttgggacttgctatagcgcagctggaatactttcccgccacttgcaggacagggagctgacaaccaaggagtggctgataaatactccagctttctcccctcggtttccctgtatctcagcagtatggagcttgttaccaatgagaacctgcttactgactttaaactggtttccttaccttctcagttccatttctccatacctcaattgatgatttctggtaagacctagcaagtaaactgctttcactgaaatttcagtcttggaatctgctttgggttccccagtctgagacagaaatatattcatttttcaatcactggacttccaggttgttttcaattttttcactgttacaaacaagcctgcaacatttgtctacaaacctctggatacacacacaggaagtttttggtatttcccactagtgaaactgctcagtggaagggtatgtgcatcttcatctttaataaacactaccgacatttgaaaagcccgaaaatgtcaaggactggcaagagtgccacatgtgaaggttgtggaatggcagctcactgtagcacatgctggggactcagtcagggtcttggggaggcacttagttacagcaagaatgtttcataaatggtatcagatatagtgtaggttactggggaataagaacacattgcttagaaataattatccgtagatttaaagtcaacataagtattttttttctaatttaaaaatacctacttttttcagagggagggggaacaacttaaaccagaaaacaccttcatattaatcattcttctcatgtacttcaaatttgtacttaatgcctttctcctcctggacatcaaagaaaacacctgggtattctggcagaaatttatatttctccaaatcaatttctggaaaaaacgtgtcactttcaaagtcctgtatgatccttgtgacaaatagtttaagactgcttgagtgattcatggattccttataaaatagaactaccaccaactatccaaatcacgtctactttatttgctaattctggttattaagttttaaggcatcatccagacttcttgcaagaaattgatctccttgtggaggttcttgtggtccctcctgagaactaaattaattctattctttaaaggtcgattcttctcaggaatggagaaccagatcttcctacccataatcaccaaattctgtttaccttctactgaggaggttgtggtcactctctggaaatacctgaattcattcctgagcggtggccagggcaggtcctcgttcttgccgatgcccatgttctggggggacacagtgacgacgcagtttagcaaactaaccatgacagcagcgatgagcacctccgagcctgctcactacaccaagatgcacggccaagattggcctattttattttttaattgacaactaataattgtacatatccgtgaggtttatagtgatgtctcaatacacataatgtacagtgatctgatgaggataattagtatatccatcattttaaatatttatcttttttgtgttggaaatgttcaatattcttctagctacttaaaactatttaatatattattgttaactataataattctacagtgctataaatcctaataatagccaaacaatgtggcttctttcagcttatgtgtaagctgaaaaggcagtacatgtcaggatatgagtaatactgaatgtacatgtcggaatataactgatactgaacataaccttgcttctcctgtagcagaacaacattaatattgacaagaacaatatcaacaacaacaacaacaaccacaactaaaacaatattccctgttctggtaattcataaacactatcagttctcaagctccctccttgcatgtttttcttctttatttcttacattgcattaactatttgcttgggtaaaattatgacataaggttaaattatggattataaatcataaatgccctccaatacacagacatagacactagtgcttatttttcaaatacgtatatataatagataactatataagaaaatttatatgtataaatggctctgcaactttctgaaatttatagttatatattacacagcattccatattaataaatatagattactcaattattttgaatcaataagtattaatcacataccttctatatgttatactaggcatgaggaagctgaaaataaaagataaaatctctgctctcagatttgcacagttgagaaggaaagatcaagaataaagagggaatttttatgaagtgaattaaatgctataaatatacaagcacaggatactatgtagtcagaggtgaaatactcaatttatattagaatttaagagggaggctttaaattttttattttattttattttattttaatagaggtggggtcttgctctgtcacccaggctggagtgcagtggtgtgaacatagcccactgtagcattaaactcctgacactctcaccttagcccctcaaagggctagggttacagccatgagccactgtgtccagccctacttcttgagtcaagataatgtctaggctagatctaaatgtatgtaagggaaaaagggcaggaagaacctttcagggcatcctcagcaattacagaatatgtgaagtctgggacttgtaaaaaaagaatatgaaatactaggataatagtaaatttctcacaattatttttgaaagtttgcaacatcaaaacaggtgctcctggaagggtcagcatcttgggtcaagtcctgccagaaacagaccctgaggtgcaggttcttgagcaaggaatttattaaagaagagctcccagaacctgactaatcttacatccacaaagcaaaaaagggaaggaaaacatgctgagaatgtgcatttccagacaaaaatactgaaaagatgccatcagccttatcaggagcaggcattactgctcagagtttgttccccataaagttaaggaagcttgctctccatcctcctgcagcagctattaattggctaagacccaccctggagatccaaaaaccgcagtcactccagtctctctgataaatggggaaggtggtttcagtagtccaggatggcattccaaagaaagcctgtgatgcaggctgttaaggcaaagacccaaagaagccatgaagaggcacatagaaatgaattagaaggtctgagggaatctgtgaaagtactcacatgggtcattacaggtggacataaaggaatctttcctaagtaggtttctgtcatggctaataaaaaagccagactacaccaaactaaagatcattattgatgaataatttacatatcataaaattcacccattt

SEQ ID NO: 1880596 - DNA, 4001 bp, Homo sapiens
ggaggtgctggagctgcggaggcaggcagccaaggcagaggccaagcacgagggtgcccggaaggaggtgggagggctgcctgtggtcagaagggaaggagctgggcgtcggggagcagagggaggaggcccaccccacttcctcactgtctcccacgggcgcaccccaacatccctcctacaggtcctgggattgcagaggaagttggcagaggtggaggccgcaggggaggcccatggacagcggctccaggagcacctccgtgagagccggggggctgagcagaccctccgagcagagctgcacagtgtcaccaggaagctgcaggaagccagtggtgtggctgatgctctccaggctcgcctggaccaggcctgtcaccgaatccacagcctggagcaggagctggcccaggctgagggtgcaaggcaggatgcggaggcccagctgggccggctgtgctccacgctccgccgtggcctggggctccagagacagagcccgtgggcctccccggagcagcctggttcccccaccaaaggtcagagtcctcagtggaggcaggcgggcccctctcccagctcagtccctggcctggcacctctctttcaggcctcacaactcacacagtgagggactcggacaggcaattgtaggaacctgtggccgtctccccaacctcccatggctggggcagcagagaggaaaggggaagggcgtgtatctgtcactgtgttcctgtccacgacccctccgctgtcacctcccgcaggctccgacagctcccaggctctccctgggcaacagggtaccagccccccagccaggccccactcgcccctccgatggccctcgcccacacccggaggccgcagctcagagctcatggatgtggccaccgtgcaggacatcctgcgggactttgtgcagaagctccgggaagcccagcgggagcgggtaatgggggctggggtcctcccgcccacggcggcaccccccgggggtctctgggaagaacacctgctgtccatccatccgcgcgtccctgggtctgagggtcagtgtccaggccgtcctgtttgttgtgataaacaccagcaccaccatggcccccaagcccaagtgccttgggtggctggaggccgcccccttccttataccaggctgaaaagcccctggagccaggccctgctgtgacacccaccagggcccagggtagggcattctgcaactcatgccacccctgaagagctgccggggctgggcaactgcaggacagagccagcaagctcccctcaatgctcccaaagacccctccggtggggccaagctccccagtggctgctcctggcttcagggctcccacagaaccacccgtgagcggccccctcccacctcgctggatgactccagtgggcaggactgtgggaaagacagaggcaggccctgagccctggccagggtcctctgtgcacactccttcccttcgggcccaccctcccaccgctgccagccccagggggcagggtcccgtctgcactcagccccaagtcccgccaggggcagcccctaccggtccccctgaccacaggctgtgggccgccacctgccagctctcccacaccacacctgtgcttgaaacctggaccctttaggccgagtctcactgggcgcctccacctccccaggcctgcaggtcagcgcagcttcccagtgtgatcaccttccccgcaccttccccgagcccacggcccacaccacccactgccctgccctgcacacctgcaggccagaccgtgagcggccccagctggccccgaccctctagcagacaccttggccctccacccgcccattggactgcccccgctgacctcagtccttctgcccaggatgactcccgcatccagatggcgaccctgagcagccggctgagcgaggcagagtgcaggtgtgcccgggcccagagccgcgtggggcagctgcagaaagccctggctgaggcggaagaaggtgacctcccttgccctgccccgcccaccctgggagtggctgtgagagtggcaccaccatgtccccactgctgccggctataagctttcagtccctggggcagctcggtgggaagggagcctgggggcaacacccaaaccaccaggcctggcgaggctgggtcagcgcttggcatcggagttctcagcagcgacttccccagcacagaggagtgacgtccacaggcccatcagggccctcccgatccggcccccagcatcctctgcccccctgccccaccctggcctcctgcagttcccactgggggcctttgccctggctgtgccctctgcctggcaccctctcccccagacagccacacggctctccccgggcaggccctgcccctcgtcaccccctcagagaggccccttccttctgccccccactgcctcacactcacgagtttctctgcttattgcccctcaattaaaggaaagaggcaggagggaaggatgggtgggaagccgggaccctggggcagccccaggacccttgagctgcaaggatggacccccacctccacgtgggagccagtcactcaagtccacagagccctgcattgcctgcctgtgacctgggaggggcatgggggcccctcaagccaccctgcttgccccacaggccagcgccgggtggagggcgcgctgagcagcgcccgggcagcacgtgccctgcagaaggaggcgctccgcaggctggagttggagcacctggcgagcgtgcgtgcggcaggccaggagaagcggcggctgcaggtggggcaggcggcagggtgggtcccaggtggggcacaagaacaaggcctctcggtcaccctcacaccctgcagggaggccacagggccgggaggtgggagagaggggtctgcaagggcttctgtgggtgttcggggctggagccagcccggtggggccctggggcagaggtgcaggctgggctgtggcaggcggctttggggtcatcgggactggggtcgtccttagcagagctgtccttacggtggttctagcccttgttttacaggttggggaaactgaggacttggccctgggggcacagcgagtggggggcagagccccaagtctaggccctttcttcttgctgaggccacagcggcaggcatggggcggccctggcccagccttggggctctttatagggtcacactgtcctgctccaagaccacttttcattccatgtggctcagacacagaaggggcctctcaggaagggctgaagtcagtgtccctacatgccaggctttgtgctggggaggtgcccgctgggtctgaggttttcaggtgaggagcctgggcctggaaatggaacggccaggcagtggtggatggaggcctggcccaggccttggtcctcagtgctggtggggagccccaggcccagccagcccagccccacaggtccaagcagcccccggggtgtcctgagatcctcttgtcaggactgggccaggggacaactgttccgctccagagagctcccttgcaggccccaggggccagagaacagcgtgcctggctgaggctccccagggcaactgcccccaggcgtccctcaacccattctggaaagagggggccagcacagtgcagaggagacagggcacagagaccggggagccactcctctccaagtgtccctccaatgagggaggcctgggtgagccatcaggagggacggccttgcaggttggcagaaaggccccaagggcagccggccaggcctgtgctgttccacgcggggctcagccccggagcctggtggccctcagaggccaccagagggctgtcagcactcagactagcaggcaggctctgagttcccagtaggccctgagcctctgaggaggtggcttctgcaggggagaggggagggggcagagagcagaggccaggctgcagagagagcaaggtcctcattagccagc

SEQ ID NO: 1880597 - DNA, 4001 bp, Homo sapiens
attaatatctgtcattgtgaattgttttgttttttattttaatgtctgagggcagtccagaaagggctactcacagttgcttgggttttaaattaatgttccattaaaatgaaataaactagttatccttagctgttatgttcagtctacaaatcttgttattctgtttataaatggggcaaaataaaaacagtgaccttcaattttctttgattaatgagctattaactcaacttgaagactctgtttccttaataattatttgtaaatttaattaattaaattctcttaaactctgaactgcattataaatgtaatatattacatttcttttgtaagcacttcagttgcctaacaaagcaattgtattgccttaacaagcaaaatatcttcaaataataaattcttataaatctaagaaataaaatgttattaaaatagtgaagcatcagttttccttgaaattccaataattattcagaaaaataaggtcatttttttccctttgcaacttaaaatcacaagtctaaattcttttaaattttttttaaattttagattcagggagtacatgtactcgtgtgttacatgggtattatatgtgtaatagtggagactgggtttctagtgtacccatcatccaaatattgaacattatatgcaataggagattcttcaacccttctccctgcttcaacccttctcctcctccctcccagcctcctccccagttttggggtccccagtgtctattatctccatctttacgcccatgtgtacgcatcgtttagctcctacttataagtgagaacatgaggtttttgatttcctgcttctgagttagttcacttaggataagggcctcctgctccatccatgttgctgcaaaggacatgatttcattcttttttatgggtgcatagtatttcgtggggtatacaaaccacattttctttatacaatcaacagttggtggacacttagattggttccatgacaagtctaaattctagtacatatttaaaactggaggcatcaggctaatctgtcggtctttaatgttagattctttagactattacagtattttaaagaaacaaacatacgaagattactcctaaacttagcatgaaagttttgcttctaaaggcttaccttatttcactatcttcatgtttaaactcaagctttcccaggttagaaaagggctctcgaagcagcagatgcaccatctccagcaggacgagggtgtcacccttgggtaactggtgacactgggctggcagtttcattgccacgagtgctttttttttttttttttaagagagcttagtgtcttcaagttgagttaatagctcattaatcaaagaaaattaaagatcactttttattttgccctatttataaacagaataacatgatttgtggactgaacataacagctaaggataactaggtctctaatttggatctctaaccaaatctcttggttacagatttaaaactgaggactgcagatctggctgttgcagagtccagagggccacagttggacctgccaggccatttttatagttgtgatgacaataaggggtccccaagttcattcttctcagataggattggctttgcaacccaggctcctgggcatttagccccttccccaattttccataacctccttttaactttcactgctttagatggggagtggcatgccacattcgtcacaaccaactccttgccccaagtttctgcaaatggattcaaccaacctgctccctgtctgggccgtgtcttgttggcttcagttgcagcgtgcagggcactccaaggacacagcactttcccacgggcacgtgtggctgcccagcacagagtttagaggggcaggaacttttcctgagataatcatttgtcttttgttcttgacatattttccttccctgttcagccaacctttcctttcctgcttttattttctaggatctggagcaatttaaggggattaggctgcgggttggggaggggaggaaaaggtttgagaaaggttttgagagaactccatggctgggagcagcagtacctgctgaggtgggggcgggggagcaagacctcagatggcatagccaagctgtagggggcctcaggggagcgagtggcatggcctcaggcccaggctgccaaactgggcaaggaggcagcacagaccccctgaggcttggacacgaagctctcacagtggtgctgacgcactgaagatttaaacactactccctcacacccattttctggcatcaccttagactccctggctcttgcacaggcctagggaggagcagcacccactcccatctccaaaagcaagtcagaatgaagttttctgcagcccagccagaggcggagtcagatctaatttgattttaatagaataaagaagggtactgtttccagcatccctgagtcctgttatattttgcataaaatgattcagtctggggtagaaggaagggcattgcaggatgagtctggctctgccatttaatagctacgggaccctgagcaactttctacactcctcctagcctgtcttctcatttgtaaaatgggaatgagtttcccatctaccggggtccctcctgctcctgagccctggctgcttgaagtggaggttctgctcatgccaggtgtgaggatcaccctcctcctgtaccatcgatgccagcccagcctggacagcagagggcgctgtcacgccatgcagactgttcctgttccaagtccaccagctctcccggctgtacccagcagctgatggtggccagtgtgcattctcccttattcactggagcagtccagatgccctgaccctcgatctgccaatttttagacacaagtaacacgcccccaagttctctggcccccttaggctccttactcgtgatcctcagctgccttggcactgcgcccttctggaagcccctggggtggctcacgtgtggtcccaaaccagtctgcacccatagggcaccactgcagctctgccagatgtctggggtatcccacatggcaccccagactcccagcagcctccacctgtatatgcatccctcccccaagcgtcaaaggtgtgaagtggttggggccaggaatacccccactctaaggggtggggagactcaactacgagtcctgcagaggccagaccaggggacgccagcctttccatcatcaattcctcccttcttactgctgggccagctcactgggtcatcctgtcacccctcaagtctagctccccaccacaactgtgactcccacttaaaccaacacttcagctcccacagtgttccaggtgctctcatacctctcctgtctctcaatcccaaagtaaaatatacatgattaccaccatgggggaactgaggctcacaggaatgttaagtgatttgtccaagacctcatggaactgcagtatcaggacccacacccagatctctggattccaagggccatgttatttccatgacactgtcgtgcctcttgggtgtgggcactgggggtttgggctgtttgggggaagtgggatggcagctctagctgcccagcagaggtctgggagatccactatgtggtctcaggcctggcatggcccacactgaggttggcatcatgtggctcatgggcaggcctggagcccctctgatcccagaatggaaaccctttgcaggctgctggtatagggaagcccagccaggagctcacacacctgccgttacctgaggtttctgccattacctgagacagcatgggctcctgggaggccctgatgacagaacaattaagggggttgtagggggaagggtgggcagaggagttacacccccacgtgcttggcagcagacgtcaggaacacggggtgatgcccacattgtctcctgcctccttatacaaactgtctggggcttctctttttccttcatacaagtcaccagtgagga

SEQ ID NO: 1880598 - DNA, 4001 bp, Homo sapiens
ctcgttgttgtgaaatacactcaattgctatctattgatacctatttttatattttactacagtggcaatgaaagaattatttgggggaggataggtagtaggaatagctttattaaaagaaaaataaagatcacagattttgctgtatacatttccaaattcttcatcacagtttttttttttcttcacgaggattggattgtactgcatatggcactttgaaacctgccttttccctttatgatttattctgggcacctttttttcagatcaatgattttttttctttttcttttctttttgttttgttttgttttgagacagggtcttactctgtcacccaggctgagtgcagtggcctcatctcggctcactgcaacctcaacctcctgggctcaagcaatcctcctgcctcagcctcccaagtagctaggaccacagatgcgtaccaccacactcagctaatttttttttttttttttttgtagagacaggattttgccacattgcccaggctggtctcaaacacctgggctcaagcagtcaccctgctttggcctcccaaagtgctgggattccaggaggtcaatgacctcaagctcctctattcccagcagcacttctgagctcctggcaggaacatatattcatgtataagcatgaaaaggggggtccccaactctgccaagggtgggagtagggagccacggtagactccctcacaaacacaattggagatgaccagaaggctaaacattggtgcctttggccttcaagataccctttagaagacaattattatattttcttgagtgtgaatggagataggatgggaggagcagcttccaggaccctgccccacggcagaccggcctctgccctgtggatcccaggaccctgcccaacagcaggctgccctctgccctgtgcatcccaagcactttctctgtgctgcctggtgttgcagaagtcctgcctcgccatggacaccgtggaaatgaacaggcttgctgagtgactggcatttgcaaagctttcacaaataacactaaacaccgtgatttcctcaagatgttctggagccctcagactgggccctctctgttgtggggtgctcaatcttcccaggctcaggctgccccaggggctgggccacgctgccccaggggctgggccacgcagcccctatcgtcaccctcactacccaggcctctagcctgcacccttcccctccctacactccccacaggcagctctcatcaagcaactgcttctccaagcgcttgtgactaaaccccaaagaggcctggaaagaggatgttggaaacaagcagggggtgcactttgggggaggcgaggcctgggaagccggcacacttctatgtgagtggaggctgttggctgattggccacttgacctttgacctgagccccaaggaaagtgcaccctcctctctttcattttgtttatggcttcatacaagcttcccatttacgtgaacattctgacagaagagggctctcatttggccaggtcctgaaagcagagaattctgctccttctatgggaccagcagcctctcttgcgggcgtttggctctgcctgcgaggcaggtgggctgccaaggcttcccagctgggcttttctgctttagataagctgagatatttgtgcatgaaaccttctgcgatgtgaccctgcgaaatgcatgctgcgccacacccttttatcgttgttaattgagagcagagtgttgctaaacttaccatgtgatggatatttctccgttttgatattgcacagaatgaagaacatagcagacagatgaagtaggcctggtggtgctctgagcagaacaaatcctaaggccaggttagactagctttgcactgtttccctcgtgtctagatttctgaaggatgagtcttttgatttgtttctaacctgcttaaaagagatggggaggcggaggaagcaaggagccgaggtgcagccggatgcctcccaggatgaataatggcaacaagaaacagagttcttaaagcccagatgataagggcctcagtctgggtgtgaatgaacttggcctgacttctttgctgccgtcatatgaaccggaaggagacagcttagatagagcaagcctgctccttccagaagcacgagggtcctgtggcggtttttgcttcaaacaccgcagaacacagagcaaaccccatgacgccgtccttcaactaaacagcccaaagcagcaaactagaggtttccatttttagtttgcaaggggaacaactgagctttcatgagttggaatttgctaacgtaaattgagcctttgtaagagggctgaaattgaccctggagacggaaagcacaggaaatatttgctgtggtcggtgggagaggacgctccgcagacaaagccgcctgcttctcccgtcaggcctgcctcctctctaggcaaatattggagggatgacttttttatttgcagagaggatttggctaattttgttttatttgtgtaccttacattcatggagcactctgcacagtctgttggataatctctaattattcctttcctcttcacacctgtgaggccgatgctcagcatatttcagaggaagctggcaccagggatgagggaatctgcccaagcatgagtcacctggaatattaaaccagaaccaacacacaaatgatctgtgcaaagaggtcagcaaaataaaggattcactgcaattcatccttctgtggtcactgccgggctttgggctcccatcccttcccggccctcccattccatatccctcttctgtatttgcaggcagcaccattgaagtgtgtttgacagacagaactactgttttgaatcaaccctctgagatgtctaaatcagcctgtcagactttgctccctctatcacgtttcccaagaagaggatcagagataaagagaaatatggaaatttggagtaaaaggtgagtctagagaacaagaaaaaaaaaatgtgccttcagagactacaacaaaggaacccaacaaaatataggacaatctggttactatgttgaagtcacaaatgtgaagaaaataatataccaaaacgtttcagaaaaatccaactactatagccaagcgaatgacacattagtgacataatgaacaattagaattaaaactttttaaagtgtcgtaaaaatatttctttattgtttaaaaatgagatttcaaaatgtttccaaacctcatcagtgaaggacatacctacatttctaacccagatgaggtttttgaaatgtggaatatagaagcagtccctttaaaaagaaaaagaatgcctttcatgctggatttgtacaatttccatatgttttagtaatcaagaagtacagaatcccttgaaatgtgcagagattcaaggctagagccaacatagcattcagagtcttaaataaacatataatgtttgggaaagcaatattctggatgttaattttcaatctctaggtatacctgtcagtctttaagatggaaacttctgcttgtcagagtttgaggcctctgtgaacttgcagggggtgagtcctggcttggcccactcaccgatccccaaacactggcgaggaagaaactgaaacagctgtaaccactcacttaaatataccatggcattcgtacaaatgatcgtcgactttgaacccaagagctggggtccaataggaagacaactccaaatcaggccttaaaaacctggtttcagaatacacattgctgccttgcctttgtgggtttgtttattcggcaattgcatgttaaggaagtgggagtagaaatcacttatttggacacttattaagctggtcaaattctcctaattctagaatctgaagtacagcatctgtggaaaaatacaggggatgagattatagagacagaaaccagcctgtataatgctaagactttctgtctgggggtgctagacatgtgagccca

SEQ ID NO: 1880599 - DNA, 4001 bp, Homo sapiens
ccttgatgggagagggttggagcaaaggcgggttgaattgctccatataaaagactaacagaaacttccaagggtccttggaaggtcaaaaggaaagaggtatgatgatgttgcctcttgagggatggtagagtctggaagaggggagaagaggagacagtgtctgtggacaacatggcagtgggtggaaccgggagcactagaatggctggcagaggaggtccctgaggaggattggccaaggaagcacagggcagtggtgtgaactgttccctctcctgtacttcacagtcatcggtcatcccctgctcctaccaaagggtaaatgttggttccgtcagctgtctcgggtcagtgcttctttagggagtatggggagagggacacatcatgtgtgggatgaggccgcatggaaagcagacgacatctgcaggggacacatctatgagggtgtctatcacaattctcccagtctaaacaagaaatgagattgggagacatgttgctctgcagaattcccaggggttggaacaggaggatgaaaaaaggcttgaaattctgactgcaagtgggaagagagcaccaggcagttgacccggacgctaaaggaaaaggtgagctcagcggcttgaggacttggtgacagccaggaagcagctcttggggacccttttgacttagctcctgattccctgccatgctggcgtggtgcaatgcattcaacagattctcaataaatccctaaaaataaattatgtcttgcaggggccatagagagccagaatactatgtaatattatgcatgggaggagctggtgctgcaaaccaaagtcaaaccatgcacagggagcttcgaaggatcttctcccttttcagcccctgctagctcagtggactttatctctttccttcttccctaggccttttctcctgagtaaattctctccagtgcctgatagcagtttgtaaactttttcccagatgactgctctctataatctataattctcatcaattatatatgaaaatatacacctatatctaaggacatatatatatatatttatatatataaaatatgtaaatatattatatataatgtatataattatatagagatatattttatctttcctctgttcctttaaagcaaatcactcccactcccactgcctttttttttttttttttttttttttgagacagggtcccgctctattgaccaggctggaatgcagtggtgcaatcatgcctcactgcagcctctgcctccccggctgaagtgatcctcccacctcgccctgccaagtagctgggactgcaggcacgcaccatcacgtcgggctaatttttgtattttttgtagagatggggttttgccatgttgcccaggctggtcttgaacccctgacctcaggtgatccacccgcctcggcctcccaaagtgttgggattacaggcgtgagccaccgcgccccacctccatcttctacatgaggataaggaagctctgagaggttaagtgacttgcctaaggtcactcagccaatgaatggtggagcccagcacttagctcaagccaggcggcgtcaccgctcactgcaggctgttcccacgtggtcaggcgcagggtctttctgcctcatcactgaagtggggacttgaatacggctcttccttttcttgcatcctccatgtgccctcctggtaaaccagatccccacggcctcagccgctcttcatcggcctgacttgggcttccagagcctgcccagcccacgtggggctggtttggcaaaaactgggctctagattttgctttagctgttttcttttccacttcattgtttccgtgggatgtctgccttcccaaaataacaccggggcattccaggtaaactcaacatccgacgaaaatccccattcagcggcaagtccgaagggtcctggtttttgctattgttttcctcccttcctctggctcaggcggggtaggcgtctgggacaggttcccggtggagcctggatggagggggaagcaggaggaggagaggaggggcttggccagctccagccagccagctgatactcccgccctctgcgctagcactggaggtagccctgagctttcccttctcactttgctggggaatgttcaaaggcctgtaggaaaagaactgggcagggtcttgtgccctacttcacttttatcagagaaagaaaataaaaccaaggtggcccctaattctgctctgatttctggaggcagcatggatgatatcatggagaagcactggctttggattaagccagagctgggctgaatcctggctctggtgcttaccagctgtaagctgtagcagctgtaagtccataaacagcttatgtgttcctctgagcctccatttcctcatcagtaaaatgggagtgatagtgtccctattagagcaataaagacagatgaattcaatgccccaaataggacctgccccataataggggctcaacccatatagaatagttttctctgtacttcctaggatatgggaggagggggagttgcttacttcttctttgcttttttttttttttttttttttttaagacagagtcttgctctgtcacccaggctggagtgcagtggtgcgatcttggctcactgcaacctccgcctccccgggggttcaagtgattctcatgcctcagcttcctgagtagctgggattacaggcatgcagcgtcactcccagctcattttttttgtaattttagtagagacatggtttcaccatgttggccaggctggtctcgaactcctgacctcaaatgatccacctgcctcagcttcccaaagtgctgggattacagacaggagccaccgcacctggccttcattgctttttgatgtcattattacccaagtgctgagaaggtgctgtttagaggccaacttagagaagtggaaaaagcagagagagtgtcgtcagacaggtagggcccatgccttacttgtttatgtatgtacccctaacagaattttgtaaagctatccactgtctacccccagcacatttaaaaaatgaagttcaaaagttaagtagctgcaaaaactgtggtttctggcttattgtaaatattgatatttaaaacctactgtgacttcacactttaaaatggatccagtggaatgtaacatcgacaatttggtagcccctatcatccattttaaaatttatgaaaaagctgattggcattcaggaattttacatctttctttttatctcctggaactcttattactattcctacttccttcacagatttttatcctgacatattattttcttatgcttcagagtattttattgatcacatttacatacatggaaaaagccgtttttcgtattttatactttttttttttgctcttgtaggattctcccccaagagcagggggaatgaagaacaaagtcattaaatgaaaattgttattttatttatttatttatttattttgagatggagtcttgttgtgtcgcccaggctggagtgcagtggcacgatctcggctcactgcaacctctgcctcctgggttcacgccattctcctgcctcagcctcccgagtagctgggaccacaggcgcccaccaccacacccggctaattttttgtatttttagtagagacggggtttcaccgtgttagccaggatggtctcgatctcctgacctcgtgatccacccgcctcggcttcccaaagtgctgggattacaggcgtgagccaccgcacccggccaaaaattgttattattctcaccaccagtacaaggatgcagaggccctgtgagctatggaattattcatggagtcattccccacgttgggtcccctttcttttgtaaaacggaaaaagccttagtgtgttaattcagtcttattctcagataactccattttagggaagaaggccgatgcaagttgaggatctggaaattggttt

SEQ ID NO: 1880600 - DNA, 4001 bp, Homo sapiens
aacaatcttagacctatgcatctccagccaccagtaaataggaaagccctcgattctatcttcattaagcccttcaaccttacttcacatgtccaaaaccaaattcaaagtcttcccaggattcctgtcccattccaccttcacttccctgtatctaccaactatatcatcatcgccacgtcagtcaaatttcccttcacaggcagccaccaaggtctgctcgtttttccatactagtattgcaactcctatgagaattaatacggtttttccatattaaaatctcatccactatgactgcaggtttgcttccttcctggagttcaaaaatgactgcagtgtccagaatgagaagctgctgtaagactcctttcccatggaccagcacccatcctcaactgaaacgcagtctgggaaagtgtgaaaaaatgaaggagaaggagagagacactcagctaacgccactgccctcatctcacctgccacaaataatctgcatcttcccccagctaccaaaccgtccttcacataaatttctgttcagcccacaagctgaaaagcctcctcagcctcttattaaagacccactaaataagtcctttacttcttgatcaaaaggaatcatcgctgtgacttctaaactgtaagaaaaccaaacctttaaaagtacctgtcctcagggcttggggcagtaaaaaaaaaaaacaatctaggtgaaacgtcttctataggaaaatttattttttttgaacgaacttaaccaggcaaagcaagtaactagcaacatgtgcaccatttacttgggcaaatgtcgcccgttcctcctcggtgtcatcaaaaggtacactgggagaacagaagggttgaattgagctggtttccaaggaaccatgtcagagccgctgcggagttaagagctgcgtccacacagcagccaaatcatgaagttgcaggagcggctgttgttaacccacagctaagaataacgctcgactttccaaaataaaacgaagaaacgaagtcccctggccaatgattcggggcggcacagaggggaaacggagcttcctgcactgccctcatcactcagaacctggggtcccaggcgattcagtcaccgcccgcagaacagcgccgcgggcaccacgtgaaactcccggggccggctgggggcgggggacgaggggcgcccactcgggggtcggcagtttgcaggtgcgatgggcggccccctcacccacgtttatccggactggagcccgccgctcccggccgggtttccgggtggttcgcgctccttctgaattggcagcgaggtcgcggcaggttcgaggtaaatcggacgaagaggggaaaaagtctcaggggtctgggggcctccgcgcctcaggggaggcaagggccgggccagaggcgcgagggtgggtgagggattcccgccgcggggccgggaccggggctcgggcagtgggccctgccccgcgcgcccacgcgggccgccctaccgtggctctgcaggatctcgtgcttgagaccgccggtgtagtcgatgagctcctccaggccgcgctcgcacagctgcccgtagcccgagaacttgtgcagcaccttctccagctcgcgctccaccgtcacgcactgatccatgccggaggcggcggcgctcggctcctcggcgcccaggtgtccgcagccgttcggcccgggccccgccgaggccgcgtcctgctcctcgttccccaagcgggcggcgcgggaggctgaggcggccgaggcggcgggcgcactagccgcggcgccgggggagccccgcgcagccggagcccgcctgccccatggcgccctagccccctggcgagtcgccgctgctcccgttcgctcgctgcactcggccccgcgtccccaggccccgctcgcgacgttcgggtgcctgcgacggcgcggccgattgtttttgttttcacgggaaccgaccgatgacctggttctcccgggcggcaccaagtgccgccgactggggggagggggatggccacccgggcgaggaaaggaggcggagcgggccgtaccaagtacaccctcggggtggggggtgcgacccggcgagaacgggcggaggaacgcgacgggcgcccacacgcgccgccactctaatggtgtgcgccgtaccacacggaaggcgtgcgagggagagggcgagggtggagcgaggccccaattggcctgaggagctaaatagggaactttggagacagccccagcgctcggagagcgcaacaactacgcgctccataaacaaggaggcggaaaccggccctcaccactccgcccagaagcggggaatcccaaccaatgggcgcggggagtggtaagaagccaatccctggccgaggcgtaagccttcagccaatccgggctgaggggccaaaccaacgggctcgctgttggagggggtgacttggagagcgtaccgagaaacgagtagtttatggaaagccttgggggaaaactagacaaaaatacaaagggctgttttccataggacgtagccctgatcccaatttatttcgtctcctcatcgatcttaagggaaaggggtaccgtcattccgaacttttgggcgacggatccatctcccgggatgaaaaaccaagccaggccgcccgggggctggttctgcgtcggcggggggtccctaatgggaattaaaggcgggggtgattgggcccgggtgaggggagccgcttgctgctcgcgaaaggcccgcgccggctgtcagcgctgccccgggcttgcgacacccaggaggtcatgtccccatcccccgcggaccgtggccctttggccccttggcctggaacctctcctgacggtggcctcgccccagagccatgtgccgggcagcttagccgggtggaaagaacacgcgctggagagccgggcagcctggcccttgctccctaggaagccttatgctatcggatcggatcggctttaccccctcgggtaaatccttcccatcgcttgctatggcgtctgcagccttggcctagacctccttgatcagcatcggctgcactacctttgcatttcttcaggagcccagctagttcgtgcctcagggcctctgcacttgccctttccttggcccagaaaactcttcctcctacctttttcatcctgaagttcttctcagctcacttgtccccttacagagtcctcccctggctgaccacactaatgtacttcctccccaccgttaataccataacacattttattatttccacaccacttaaactctgaaatgatctgatgttttatttttctgtctgcaccacttacataaaaccatgacggcaggccccctgcttgtctaaattttttgcctagaacagcccctggcatgaggtggtaggcaattctttttcttaaattaacgtgataacgtttttgagccttaacttccgtataactgagaaataattggaattaatacttaactaaattgttagataaaggagaatatatgtaaatacccataataggctcatgataaccacatgataaaggtggtagtagtcattattagggcagccccaactggtattatttcagatctcccttctccccaccccatttttcttccctcttggcagatgtctctgattcttcactgagattaaaaaaaaaaaaaaaaatctagctccagcaacttctatcactcttttccaagtattgctgtgtaccacccattttgtgaacattctcatgtacccaaaggaccaggagtcccttctccctttccaagacagccgttggggcctgcgggctgcctctcacccctgtccagatcttccccctctttctctgcagtaggttcttcctttctactttcagcccaaatgggtttgacctacctgggggaggaaacttaatttaaccctcctcaagcactcatttctttcactgccaaactgcctagacaaatctatgtttat

SEQ ID NO: 1880601 - DNA, 4001 bp, Homo sapiens
aaggttcttttgaagtcttataatggctacccttagagatgatagatgacaaatgtttcctattcagacctttaaaacaatgctagactctcagtctcttcaggattgggagggcctggaagaaaaagatctagctgtgttaatagagattctttacagatgcatattttcccccacaaagcacagctttgcaggaccatttcaaaatatggcaaagaaacatgttttggggtaaaatattttgactttcttctttgtcacatgtcatgccagagtcagactggaaagcaagtcaccatatatagggttaaataaaactcatctgatgagaatttatggtttgttgggcatgactccccaggccccttagataggaatttgggccagattaaaaaaaaaaaaaaaaatcaaagcttagtcctgaggcagcttctgaaatggtgggaaaaaatgtgagttttgaggaaacatttggttcagccattgttcttaagagatactgacatttcaacctactataaagagggaaatttaaagtattaaagtattaatgagttggtaggacccgcttttctttttttttttttttttaattcactggccccgaaagaaacttctctgtcaggccacaatataaccagataccagacacacgagatgttttggagggagggtggtggagccaagattgcagctccttattgaggaaaacagtcctcagagatccagagtcatttctcctgtgttcagcttgaaaaccttgggcaacttctggagatttcaacgtctcacagagtgcggaaacatgactggcgcagcatcctttccggaattggtgatgtccttcctgtaagggttgattttccatctcatcaaccaaatcgggaaagccgcagcatccttttctccaagaatgacaggtggtttatctcaggcttttctgtcccggcgcctttctctccaatgcagtctatggaatatatatatagagagagagcgtgagagagagagagacggagtctcgctctgtcgcccaggctgaagtgcagtagcgcgatcttggctcactgcaagctccgcctcccgggttcacgccgttctcctgcctcagcctctcgagtagctgagactacaggcgcccgccaccacgcccagctaatttttttgtatttttaggagagatggggtttcaccgtgttagccaggatggtctcgatctgctgacctcgtgatccgcccgtctcggcctcccacagtgctgggattacaggcatgaaccaccgcgtccggcctggaatattttaaaatatgcagattattaaccccgacacttttgaaagtcctttgtaaccaacttcctcctcaatataaaatattaatgtaatttggccgggtgaggtggctcacgcctgtaattctagcactttgggaggccgaggcgggtggactgcctgagctcaggagtttgagaccagcctgggcaacacggtgaaactccgtttctactaaaatacaaaaaattagccgggtgtggtggcgcgcgcctgtaatcccagctactcaggaggctgaggcaggagaattgctggagtccgggaggcggaggtgcagtgagccgagatcgcgccactgcactgcagcctggggaacagggcgagaatccgactctttaaaaaaagagaaaaaaatttaagtaatttaattttttatttttttccgcccccgccgtcccgcccctagcattaatttttaaaactcgctttagacaccgtttggagggggccaggtgctgaatacctgctgatgtaatgcagtgattttttgtttgagggccacaggaagaccccttgtggctgttgtactggcattccctcttcatagcagggatggtgcctctggacattttccgacagcagggatcgttgggtgaggttagcagcgccagcccgggttagcggaagcagccttcaggtctcctaggagagcaggtttatgagcatgcgcagcggattttccgttagggaagccgatggggcgcggctccttggagcatgcgcacacaaactttccgctaggaatcaagcgagcatgcgcacacagatgttagggttcgggcgagctatttggagcctgcgcagtcagatccgaggacatgttgacgtcgtccgagagtcttaaaatcctgctctggccggattccagactcgtgggggaaaggctggtatgttcgttttataacaggagttttagcgtcatcttttgtccttggataagtttttccaaatataaatatattaaatattcatttaaaatatctaagaattaacaggcagcagtgcattagacaaatgggcgaagtactggggtaccaagttcacagaaaaatagtagttaaaaatagactttaaatatatgaaaagatgcttagctgcatgtttttgtgttttttatttatttatttatttttttgagatggagtcctgtgttgcccaagctggagtgcagtaatgcaatctcggctcactgcaccctccgctgcccgggttcaagtgattctcccacctcagcctcccgagtagctggaattacaggcaggtgccaccacgccaggctaatttttatatttttagtagagatggggttcaccatgttggccaggctggtctcgaactcctgacctcaggttatcggcctgcctcagactcccaaagtgctgggattacaggcgtgagccaccgcgcccggcctgttttgtattttattttttctgagacaggtggcacgatcacagctcactacagcctccacttcccaagcccaagcaatcctcccacctcagtttcaccaagtgctaggattacaggccagcttcagttttaataaaaatgcaaatcatcatgattggtgaacattgaaacgtttggtaatatactcaatataggagggtgtcaggaaaacaggtgcagtgttacagtgctagtaggagcagaatgcagcaatccttagtggttatcaaaaccacactgaataatatttgcattttgatccaacaatcccactttggggaattttgcctccaaatacacttgcatacatgtaaagtaatatgtgtatgagattattgattgtaatagcaaaaggttgtaaactacgtgagtatccatcagaagactgatattataaactacagtacatacacacaatggaacattatgcagctatgaaaaagagtgaggaatcagttcccaacatactaatgtggaaccatctctagcatatcttactaagcgaaaaaagcccaggtgccaaacagtgtataaattatgctttttgtgtagaaaaggataaatgagagtcatatgatccttatttccacataaattctggcaatatactcaagaaactaatagtcatggtttcttatgagatggagggtaggactgagatagggtgagagacttctcaatgtattcctcattataatatattgaattatctgaatgctgttcattaaaaacaaaaataacactacaataactttttttaaaaaagctagaaacatataatattaaaaaaggggccaggtgcggtggctcatgcttgtaatcccagcattttgggaggccgagacgggcagatcacgaggtcaggagatggagaccgtcgtggccaatgtggtgaaaccccgtctctactaaaaatacaaaaattagactggcgtggtggcgcatgcctgtggtcccagctactcaggaggctgaggcaggagaattgaatcgcttgaaccagggagtcggaggttgcagtgagccgagatggcgccactgcactccagcctggcgacagagcaagacttcgtctcaaaaaaaaaaacaaaaaacaaaaaaactggaggctgggtgtgtggctcacacctctaatcccaccactttggaagactgagacaggaggattgcttgagcacaggagttttgagaccaacctgggcagcatggtgaaaa

SEQ ID NO: 1880602 - DNA, 4001 bp, Homo sapiens
tcggaggctgccggggcggcggggcggttgtcctctgtagagggagcggagcttccccctgcccccaagagcaccggcagccccggccccccgcatcctggcatcccgggcccggcggccagagcaggccctgcgccccctcggctttctggtcctcgtgcgtcccccggggcagaggcgcgaggagggacggccggctgaggcctgtcacgccttcactcccgagtgtccaggcggacggggtccctgcctctccaacccctcctctcccttggcttcccccagggcacagagcgctcctccttgtccacaggagacacaaggcttcaaacgcacacccccacaccccaatcctctccaaacacactcagggcgctggccactggttctccttcctccttccttccttccttcttctgtctttttttttttttttttttttttttgacagagtcttgctctgtcgcccaggctggagtgcagtggcacgatctcggctcactgcaacctccgcctcctgggttcaagcgattctcttgcctcagtctcccgagtagctgggattacaggcatgcgccaccacgcccggctaatatttttgtatttttagtagagacggagtttcaccatgttggccaggctgctctcaaactcctgacctcaagtgatccgcccgccttggcctcccaaagtgctgagattacaggcgtgagccacctcgcctggccctttttttccttttttttaagaaaggaagatctcgccccttgcccaggctggattcgaactccggggcttaagcgatccttccgcctcagcttctccagcagccaggactgcaggtgcgcaccaccatgcccggcgtagccacccgtgttctatccccagcacagctccttagatggtgacttttaacagctcacttcgcctccctgtcctcagtttctccttctggaaaggaactggattggatggggatggtttctgaggctccttccagctcagttgtccaccttaaaggtgtaagtggcagagggtggagcgggtctggttcagggaggagagctgggagtaaaggcaggccaggggctgcgaggtgggtggaggaaaggaagacaggagggaggagagcggggcatggaggatagctttgccagcctagcccaccagtcccggcctctaagagcaggctggcagagccccaagagcctataccacggaagggccccatgggaatcccctcactctctgggtgcctgagtttgcagatatctgtttgccaaaggatgagggaaggaacaggaaggaacgtgccggcaggactggaaaatccagctgggcaggagatagctgtggctgcacctcgcactggaggctgaagctttgcttggctctgcccctgtgtcacgtgtcaggtgaggctgctggacccctggaagccccgccaagggaagtgactaccaccaggccgcaagctcctgtgcagaagtctagcagcctttagctttggggccatacacatgtgcttccaagacggtaggcagatgacgttcaatttaaatccactttcctatacgtttactcaatgagttcaaagatgcttttcatttacaagcttggcggcagcttccaacacattaacccaaaggccttcatgttctccccagccaacccctttgtccctctgcagaaagggaacctcctgcaaaatgtccagatggttcagagaagtatatatgacaggctggttgcaagtggcaggaacgcccctctaagtagtttaaagacatatgtatgggtgtgtgtgtgtgtgcacgcgtgtgcatgtatataatttattttttgctcaaataattttggtaaaggtaattaactaaaggtaaataactaacctttaccaagagcagggatgtggctgggcccagaatgcaagactctccgatagcagctcccaagcttaacaagttaaagacacactgcagcttttctccaaaattctagttaaaagctgaggccgtcaccaaacaattgttgccaagagctcaggatgttgtggttggaggggcctgcgccagaggtccacttctgaaccaatcagcagggcccgggggctgggccatgttctgcttacctcacagcttccacacccacagggttttgggaaccggaggcaggcggacagccccaggagtcataatgagaagaaatgctacctcggtacagtggacgaacgtgcaaaccacacagaaagtttgaaaaaggtctactggaggctctgctttctggtaatggctccaaaatacaaagggcctcacactccggcactgacgaagtccatacggctcttaggctgacacccaccagccagtcaatgggagagctgggaccagagggctgacttgacctcttcagcaggagtgtccaaggcctttgtgggcggtggtgcaggttgtgcgtgtgaataatgaaggcaattcattattactcagaacacaacaccttggcgatctttagaaacatgagaaacagagcttccaaggtacctgctcacacgcctctctggaggtaatcgctgtgccgtggctcttaatgagccactctccacatggcctgaggcctggcaccgtgggaattccctctgtccctgagtcataggcctctgctactgaactgtaaatagggaccgggtcaatgacagcgggacagctggcccagggagcagggttggggtggggactgctgggaggctgccctgttaatctctctctaccatacaaggcactccttgggtgacccccgtgactgtgatgcagaacagggaaggagagtgggtgttaaccttgagcctaaggctcctcctccacctgtgggactgtaagccacctctcctgggctgagggctctggaaggaggcttggctgctcctcagcactcggggagcggtttttcaggcacacacacttgagctccatgacctcccagattcccaccgcccctgcttgactcttcccctgtctccccttcctgaaatgaccccctctgaattcctttgactgttctctggttgtcagtctcacagtgacaggtgtgtaaagcatgaggtgaccttgggcaagttgttcaacctcagtgttatcacctgtagaacggagaaaacaagactacatactttggaggtaagtgtaggttccaatgaaataacagagcttgaggggtcctataggcacatgggcctggagccagaccccctgggttcagatctgtcttgccgtgggttttggggcaagttccttttctgtgcctcagttttatcatctgtaaagtgagatgagaataatggtacctatttcttaggactcttgggagagtcaatgagcaaatacacagaaaacaccttgaacaggacctggcgctaagtgctgggttgagagctagctattattgttgttgtcagagagcttaatgttgtgctgtgcatacaggaagctctcaagaaatgataactcaacaaaagaaaataaaacaaaacccgaacctgcctccttcaatcgggccttgtttcctaaatgagcctgagctcctgggtgaggtgcgggcatagcaagagtttcacacaattttgatcctgtatccgaaaagctgccagacactgtgtttttcttacccttctttttgggggtggagtgaggatgtcacaaactcccttgggaaactgatgaaagctacagaccctctccccagaaaggtgcttggaagcaaatattcacaagatgttgcacacagtttcagggggttcctgggctccctgggagccagggtgagaagctccattttagatggtgcactgtgccatgtctcatttgttggtttgatcccaacaaaacacaagctagccctgctcctttgctcatcagtgggttgtaccccagcttccaccctggctccggggactctccttgattcctctgcccgggccctctggctcagtgccagctccaagc

SEQ ID NO: 1880603 - DNA, 4001 bp, Homo sapiens
ggtcccagaggaaggcactaatgttaagggacaggtgtagaaagtgggaagagaggcagaaagtagatatttacttcatggatcacttcaactcttgaagcagttacaaaacttcatcttctttgaaatgcaacaaatagagccaaaatatgaaacccctagagattatacccagactcaacaatatggctgccactgcactctgcgtatggaaaataaaacccccaatctttcttccaagttaaaagagaattcaaatgaggtcaatattttgtttcactctttcacatgttaacgtgagacctaattttcattttcagaccaccagagtaagatattggttttagcatttatatttgcattgtttttatttttttttgagaccgaggtacaatggcatgatctcagctcactgcaacctccgcctcccaggttcaagggattctcctgcctcagcctcccgactagctgggattacaggcacctgccaccatgcccggctaatttttgtacttagtagagacagggttttaccatgttggccaggctgccaccatgcccggctaatttttgtacttttagtagagacggggttttaccatgttggccaggctggtctcaaactcctgacctcaggcgatccgtctgcctcggcctcccgaagtctttatgcatttttgtggtagaattaaaatatgaatacataaactagcagaataaccacttctggtcagtgtccacttacatctgtcaatttaagtccagaacaactggacatcccatctgatggtaccctatcctagtttgtaaactgtgtaaattatccattacccatgactccaaaaccaaaaaccctccatgaaattgggcatatcgagtgacagcttttacatgttggtaattctttgtgggtggaagtttgagattaattatatagcatgctttacagtgacaaggaatattttaaaatttttattatgaaaatttcaaatttacatagaagagttcagtgaactccacatgccctcatccagattcaacagttatcaagatcatgccacgtttactttatctaggaacgtaatttgtttctgagtgtgaagatccacaagtcgaacagaagttgagttttccattattccgtatgactctgctagggcaagcaagggagagaagagagttgaaggtgtgccttggagcaccgcaggtggtgaggagggtcagggcttccacgcggggtgatgacagtccctggcccgcaggccatttcccagaagctcagacaataccttcgggcctccgctcgacggactgccttgtccactctccgcctgggaacgggggttcgtgggagcgccttagtggaagtttgtggagctcgggaggtggcatgcacaggcgcctcggagcgcggccccgaggggcgccggcaggcgagaggcctgcactaaccggccgtaagcacagctcttttgtactctgttttccccctaaagacatctgatgcccccagtgaagaaaagccaacagcagcaaagcctgatggagagcatgcagcccgggaagcccagtgactgggagctggagggcaggaagcacgagcggcccgagagccttctggcaccgacgcagttctgcgcggccgagcaggacgtgaaggcgctggccgggcccctgcaggccatcccggagatggacttcgagtcctctccggcggagccgctgggcaacgtggagcgctccctgcgcgccccggccgagctcctgcccgatgcccgcggcttcgtgcccgcggcctacgaagagttcgagtacggcggcgagatcttcgcgctgcccgcgccctacgacgaggagccgttccaggctccggccctcttcgagaactgctcgcctgcctcctccgagtccagcctggacatctgcttcctgcggcccgtcagcttcgccatggaggccgagcggccggagcacccgctgcagccgctgcccaagagcgctacgtcgccggcgggcagcagcagcgcctacaaactggaggcggcggcgcaggcgcacggcaaggccaagccgctgagccgctctctcaaagagttcccgcgtgcgccgccagccgacggcgtggccccacgcctctacagcacgcgcagcagcagcggcggccgcgcgcccatcaaggccgagcgcgccgcgcaggcgcacggcccggccgccgccgccgtcgccgcccgcggcgcatccaggaccttcttcccccaacagaggtcccaaagcgaaaaacagacctatttggaagtaaggagggtaaagtaaaaccgaaccgaaacccacagcgtcgacggccccaggcctagatctgcaggaagcatcccgagttctcctagcgtggagaggagcggggccgggccaggctagggggcggctgcgcgagccgtcggcgggtggaggcggagggagagcaggggcagcccccgcgccctgcgagctgtaggctgctgggccctggaaggcgagtggcagcgcctgttctccagtaccaggacccaaagagcttgcctcatatggtacacgagggatggcagaggtagcagagaagcccgccactctttagacctgattaacacacacgcatttagggagttatgggtaatctcttcctgcttatgtgaagagttgcacttttttcagagccccgcacgcaggtcccgggccagtgtgtttcttctgtctgtgaggtgtcgtttctatgttgagaatatggaacacggtgcgccagcctactccacttcttcccggcagcattcttgcttgtagctagggaggaggcaagttgccctagctcaaggtagactcgctgcgcaatttgctgcaaagccagctttatttctgcttgcttttcttttgactggaaaagagtgtcctattaatttgcaaactctattgggtcagggacatcccaaaatagaaaccttctttggcctcagtgaatgttgaggtattctgatggccaacccctgtgtctgcaggtctacaggtgtttgatattttggtgtctaattgtggtgtctgcaagcctggagggcatttaaagaggtctttaaatacttatccatgaagtgctaatagtttctgagcaaataattgctctgatctgattaagcagagcataagtaacatgatagttctgacctgtgcgaccacccttccgttccaactattctcattttcgaatggaaacagtgatgacactgacttttctcattcattaatttttcagcaaacactgagttcttgtcttgtaccaggctctgtgctaattgctgaaaattcagaaataaaccagtctctatcctccgggaccactggcttagtacaggaaggagacacaggaacacagaattatgtaataaactgtgggagcacatgggaaggatatttaaaacctttggggtcatggtggtcagagaaggcctcctagataagttgaatgtccgaattagattgtaaaagctgcctagaagttggctaggggaagagtgaggtagggaagcgtgagaaaagcatggtgatgccttttctctggcatactgtgccatgtcaaagtggtggaaattaggccagaggaacaggaaggggcgggatcatgaagagccttggagcttgctgcccacctgcactccagcagtgaaagtctgtgtctggtccctgcagaggacaaaaacatgtaatagtgtgctcagctaaagctgctgaggttccctggggttctcagattttcctctagctctgattttcaaccccaagctttgtaaaatttgattaggcagaatttcttggagaaatcaatcttaggcatgtgtcagagtttagaagtttattgaaaggggaagtaaatggaaattatagtgccaattcagtgtgacttgggataagcagaggtttacatacaaaaccttctaactagtatagtctgtactgtaaagaacttttatttcgtatgt

SEQ ID NO: 1880604 - DNA, 4001 bp, Homo sapiens
ggcacagctgcatatagggggagagagcacccctggagcgagcacctctgcagcgagggaaaggcacgctcccgagggaggcagaggcataattacaaaggctcttttgtggtttctgaaggcccctctcccctcccctttgttttttgcatctgtcattatgctgtgcaaaccacagccaggcctcttgacagcaccaatatctgccttcctgaacactcggaaggtaacgtggctataaaattgacaagttagataaatactagtacaaagggtagactgtgtgtagctttgtgcagccttctgactggtctcccaccccgacctggataaatcctctgtctgcatccctctggtcacccccagcctcgtccattccatctgggctccttctgacggactccccaggagctcacatttgctcggcctctttgtctaatttgtcactttgacaacttgaaaggtcttttatttcttcccaggtcaaatatgtttcatttcacttaaaaaaattttttttaaagcttccttttttttttttggccaggccacactcttgctgtcttggctgggctgccacagttttcccggaggaggccccaaagcccttggcccacactcctcagatcgctgctagggtaactgagggcctcctcccgtggtgactgtgttgcccggatcctcagcagaggccgtgtgggcaacatggtcatggaaggaaggtagcttatgaactccgcattcagacacttcagaattggagctgggcggggtgggttgggggatgggaggaggagggatggggaaggaacattagtcaggatccaccaccaaagtgttggaatctggctgtccaaaagcccagagctaaaatttatttggttttggtcctgttgttaatgaacagagggtgtcagcgaacctcactcagtgttagcccagtctcctgagtaggtgaggagaacctggaagccataaccccaccaagaagttctgtcagggagcagggaatttagacctcatcagatgcctgtggagtgacagagatcccattcaccaccgacagcctccagctcataccctagcagcgatcgaggaggtgtgggtaaggggtctttggggccgcctccgggagagactgtgactcgctggacccattatgtgctgtggccaaagcccttgacatggatggggaaggggtacgggagaggagcaggcacagagtctgctcatccagggattcccagacgagctgagcctctccctaaacaggagtaaatgccccaaatccccttcttgccagggatatggggatgccctaggggcaggcctagcttgtacttccccctgtgagtccacagcgtgcagcacggggctgagcacccagtgagcagatggctctgaggctggcagttcaagcagtggggcctcagaaacaggcagaactgcccgccgttctccagctgcgactgccctcctctgcatctgctaagtgggcatgactggcacccacctctagagctgctgtgaacatcgagtagcaccgtgcatgacctgggtttggcatgcttggcatggagtgagaccccataatgttagctactgttgtattaataataatttattttcaatatgacttatttaatggaatggatgaagcaaaggacgagattcagcgggaagggctgggcttcgagacctgatcctttctcattttaatgctgctccctcactgtggtcagcctgagtgggatcggctgcccggccttcattttacctttgttgccatctctctttgcggtggttctttctcttcctcctcctccgcctcataagcaaagggtaaggcacagttctgaatctttggttctgtaaagaggcgtgcccatctctgtgcttgattccactggaaaaataagaacaattcctattattttcggttccgagaccttgagtgtgtcaggcttcaggttcacttcctacatctctccacgttgcccggatctgcaagtaatttaaccttgtttttatagagcgcaaagacgttccgcttgtttacactggagacaaattttcctcaattgacgcaatcctattgattaaataatgaccttcttcctcatttaaaggtaatttcggttggtatcatgacgtggaggaagaaaatgaatgccttttctgtcttgctgtctgaagggcaggcagtgagggccgactcccagagccctgggcagggccctctcatttttctcacctgttctggaacttcatcaggcgtcggagtggggctagtgctgggaccccttgaggaggtgggctaaataggaccagtcttgattagggaaattaaaaagccagcatttgctatgtaataagatgtcaaggctggggcagagtagatgctactttgttttaaaacttgatttgctttcaagacttgtacgtaaattacttttcaagctcatatcacacgatatagtccgggcatgtcatttgagccaaggatttaaaatcaaagggaaaggcaatgtgcaagttcaggaagaacttcagggaacagctcacacaggagagacacaaagatgggagcctggggtggtgagagagttgttgggtactcttgggtaagtcctttaacttcttctgggtctagattcctcattggtaaaacaggggtgactggatcagatgacttctaaggtactttcttggttctatgttctgtgatacgatggaatctggagacccggttattatttgcttccattccagatccgtgtactgtctatttccataaggataagaccagtggatgacatttggaaggatgggacctctgttgttccattttctttctgtgaggtcaggtcagtgcattgtgtgttagcaatgccatttaagaaatagatatccctatatgttctgtaggagaatgcatattttgcaatgatctgaaaaattatcctaatgcaaatacagagtggcataaataccatggctggacaggagctagacatgaataaaagaaaatcggagctgacattttaaaggtttttgccctattataggcacatctaggcattccttcattttctctttaccagaggttggcaaacattttctgtaaagagccagacagtaaatattttaggctttgtgggctataacatcttggttttagcaattcaactttgctgtagtagcagaaaagcagtcacaggtaagatgtaaacaaatgtgtgtggctatattccaattaaactttatgaccctgacatttgaatgtcatatccttttcaggtgtcacaaaatattttcttgatttttttcaaccatttataatgtaaaaaccattcttagttcataggccttcacaaaaacggtcggtgagccagatttggccccataaccacagatcgctgacctcttttctttattacagtcctttaagggaggaagtattttaccgatgagaaaaatcaaggcttaatggggttaaataacttgcctaggtttaccagttagaagcaaaagagctggaaggtaatctaaaaggccaggttcaggccgggcatggtggctcatgcctgtaatcccagcactttgggaggccaaggcaggaggattacttgaggccaggagttcgagaccagcctgggcaacataatgagactctgtttttatatatttaaaaaaaaaaaagcaggcatggtggtgcatatctgtaatcccatctacttgggagactgaggtgggaggataacttgagcccaggattttggggctgcagtaagccgtgatcatgtccttgaccccctccagcttgggtgacagcaagatcttgtctcaaaagaaaaaaaaaaaaaaaagaaaagccagattcaagagcttaaacacctaccctttagggatatccagctagagtgatagaatgtgaaagactttgctccctctgacattgataaatagttacaaaatctcctttttaatcattcttactt

SEQ ID NO: 1880605 - DNA, 4001 bp, Homo sapiens
gacagggtttcactgtgttagccaggctgatctccatctcctgaccttgtgatctgcccgcctcggcctcccaaactccttttcttctttatctgtagcaatgagcatgcataatcagaaagaaaaataacgtttaaaagtgggtttaaagtctctgtacaagttgtggctaaaaggggcaccaaaagtagccacttgtgggcaggctgctccctcctccctccgggagaaacacaggtgctgctttgtgcccttagctcctggagcctggggctgagctgggagggagtaaaggggaggggggtggcagggtgtgtactggggcctgtattctatgctgagcagagtcccagccactcctcgtgcagcttgtgaggaagccattggtggtcatctttaacaggtgggtaaactgaggctcagagagatcagtggagtcatctgagagaatgtatgttgatgcatgttccctgctgggcacttcctctcttatctaatctctgaggccagccctgtggggtgggtatcattctccccaatttatagaggaagaaacagcaccagagaggggaagggactcacccaaagcaggggatcccgagggctggtctggatcctttccccaagtgcttaatcccacagttcaccgggccctgaaaggcactaggggcttctatcttagtacaggacacttctgccaaggtcggggcaacgacttgtgggggcaggaggcctggatgctttgtgagggctctgcgttggcaccatcatgagatctgagctttcccctcacctgggcaactggaatgagcaatagccatccctggctaagtgggattgtggcttgtaaactgtaaagtcctgtgcaatgtgcagggtggtggaatgagcatctgtgtaccgccccagactgcagtctagtaagtcacttgacatgagtcaccctgtctgagcctcacctgtgaaggggcaacattaagctgaggggggaggtggggggaagaaaggggacagcgaaaggcaaggaacccagctaatggagtaccgagacagcctctccctcccacacagctctgcatctccatccagtcccccatctccacccaaaacagctcagttccccagagaagctccctggaaaccgggaggctgacttcttcaccaactgcagaaccacctgaggccacctggcaggtgagtcggtggcctttctcctgggctcgcctgcctggctccttaaggctgtgctgggctggcctgggtcactcaccctttggagtctggcttcttaagcaatgtcctataaagccaggcctgagcctccgcaggccctctgagatggagctggcctccggggctgccccacccagcagctgtgacctcccaccccggatcctggctccttctctcttgcaagctctactccgggcatcgagcttccctctctctctcctttttggtatctctcaaatctttctcttttcttatcctctctccctccaccccttgccattttagtcactctttctctttccttcttctcttttgtctctcaaactcttttttatttctatcttggttcatatctgttcagggaaagcctctttctgtctcggcctctccttttttcctgttcactgtttattcttccctctctcctttatctctccgttgctctacttctctgcctttttctgagtctgtttcctctcaccatctctctctccatccctccctccctgtatctgcctctctctccatctcgctgctgtgtccagctctgtctcttgctcattccttcctcaccatctgcggatctccccggctccgtgtcccctgccatgccccgcgccccactcaccggccaaagcgcccacggcacagagcagggccagcccggccagcgcgcaaagcaggggccgcatggtgccagcctggctgaaagcagcgcggcttgcgaccgcagccgcccttcccggatcgcgcccggccggcccagaaggaaatgctctcagtccgagccaaacttcctgggcgactccgggctttctggctggagagaacccgccccctccagaggctcctgcgcaccccatgggcagcgcagaacccagaaacccccgggacctgaggcactgacgtgccacccgggagcctccggaggaaagggggccgcccccccccccgagtccccgcgcctcctgggggcacgggaggaaggagaggggttgggtgaggtcatgggctcaaggcgactgagcctgggatcaggagtttgttataagcccatttcacaggcaggcagactgagactagagagaagtgtcttcctcagcatcactctcagccatggcacaagatctgaactctcgtctcctgggagtgtggaaggttttctctgtctaccgagaacaagaaattaattctaatcacatggaacagtgtctgcccctaagagggagacccagacactcactgctctggtaagggagtgatagcaatgtgaaaaggtacttttcaaaaaaaaaggtaaaatcatgactcttgtaaagatatgaaattagcatatactaaaggttttatttaattcattattaatgaggggacaagtaagatggtacaagcagtccaaagtttagaacacagtagtggaaacttcccctatgggacatgcccatccaacaagtgcaacaagaaattaagttttagtgaaaacaccaaggaaaaaagctacagctccaacttctctgctgcagagccctgagtgccttgcctggctgtaagaggaatactttcatcaccaagcctaggagaatgcctttgtccattgagggtccccattggggttaactggagcccttgcagatcaaggctgcctctgccttctgtgttcctggctgtggctgtgcagttgtccataacagtcaccaccctaaccagtgatccagttctcactccctcctccagagcaagataatagcctcaaatgaagaaattcagattctgagcccgagaatctgagacagactcagatctaaatctttttaaagtcttcaaggagtttatgatgcccagtgagctggctcagaagaatttatttcaggaatgccaagaatttctcatgcttgttggtaggacattccttgataatttagccaggtgggaagttgtcaaagaactgccaaacccataaggattcttgtagctcacagccaggggacgaccttatattttgaatttaagattaagggaaaaaaagaaacacaaaaaacatatacagtacattcttgttgtggtagagcacaaagtaattaagtatacagagaaaaacatgaaagtcttttctgttacaaattccctctgtccaacgattcaggtccagttcccttggcttggtaggctctgcctgttccacatctatgcattccccgtctatctaatgtgtattcagagacaaatgtatatacatgagatcaaatcataaatattttgaagatttgctttcattcatgtttacctcagtcataacattaaatcttggctgggtgcagtggctcacacctgtaatcccagcactttggtaggccaaggtgggtggatcacctgaggtcaggagtttgagaccagcctggccaacgtggtgaaaccctgtctctactaaaaatacaaaaattaactgggtgtggttgtgggtgcctgtagtcccaggttcttgggaggctgaggcaggagaatagcttgaaaccaggaggctaaggttgcagtgagccaagattgcaccactgcactccagcctgcgcaacagagcaagacttcgtattaaaaaaaaaaaaaaacttggagatcaatctatgtgagtacagataaatctaaaatatctcatgaatagatgcaagcagcattatttatccaaacagtcccctattgacggacatctagattgcttcctttttctctccaatataaaataaactttaataaatatacctttgcatatattt

SEQ ID NO: 1880606 - DNA, 4001 bp, Homo sapiens
agatgggggttgcagggggtgcgcaagggaataatccgatttgcagagaggaaaaattgtttgttgtgtatatacttcctgtctttattttcactactctttttcactcagcgcttctaatttccacatgtaaacagagtcagtggaaagcgcttattatctaacgctgtactatctgaaattccctctattattctatggggccatgttgatcaggaccacccctgaatgtaaatgatgcagtcagaggccttgcagtcctggggccagggcggcattttatgtgtgcataaacacacaggacgtcctgcctacaaaccattttgtccccagggctaaatatttaagtgtcctcatggtaatgatcagagataagacttttaccttgctgtgattacaaaagggagtatacatttgcatctattaataatcaccacccttataaacagcaacaacaactttgaatttttcttgcatattcatttaacctgtactgaatgcccattgtgtgcttgtactcactggattttgtaccatattattctacccttatacatacatgtgtaatgtgtgatgttcattctcctttgaggattttggcactaaaagctttcctctattgggaaaaatgtgaaaatattcctttgcatccagagtcaacccatttggaaataggagcaaagcttccacagactccattttttctttctatcaaatatcctttgtgagataaagctccaaggatggaaattagccgcttctgtcctgagaatcttcccaaccctattctttcaaaggattgtccataaggctctgggaccaccacaatgcggacacgcacggctggctgacggcctcgcttcaatagaaagccttttaaaacctgctcccatggtcctgaaaaagactctcttcttgggggcttaggccccggggaaagggagccagggctccggaactgctcagcgcagctcacgaactgttttcgtccacatctgagaagactccaaagcactaaaaatgatgaggggaatttaaaaatcatgtttgttcaagggatggggggaaggaaaggaacagaagacggaggcaggggaagaaatttatagcaaaaaggttacctcggctatttctccactctgggggtcatcctagaaacgtccctcctccagacatgggggtggtgccagttgccaataatcctctcttcccggaaaataaaaaccaagcggttagcaaatgtcaagataaaaaagaaaatcagctgaacaagggaacagccaggatgggctgctcgatgggcgccggccacgggagccccaggtgcaatcaacagctctttaagactgcaggtcatcatttctctgctttgaaaaacccagccatctcttggagagtcaaatcgattagaggccaccttttgtgaaagtgatgctattattgtggttgtaatttatgcaaagacattctgtggcacacgatgattaaattatagtatagaagacaggatttctatagcgtgttccctcctctggattttgcacttttatctacattcgaatcaggtctgtgaaaatttggtgcacatgcttttcattctggatgacagaacatttccacatgtttctgtgtatttttgaagtggagagaacggtaccgccacttggagatccaactgagcctacgaggcaaaggcaatgtgattcttttataaaaagaaaagcagacagaaagggttatttcctgacactctttaggggtgaagctgtgcaggtaaaataaaataataaataaaatacactgaaaacataaaagcattgtgacttagctccctgaacgtcagagacatcaccatacaggattgcatgtgcagaaaggagacccaaggttaagatttgcttcttacctagacaacacctcagcatcctgccttgtggccataactagaaaggagcttcctctgtctccacgtcagccaccattttagtgtggtctctggatacggtaagatggaggcagacagagagaaagcctgaggggctccctctgcacacgctcagctgtgccccgcagccccagcgcctctccctaggtgatgcattattcaccagcccccttcagctgagtcaggaggagctgagacaggacagcgccgcggcgaaaacgcagacgatgacaaagcctgctttaccgacggtcccggggtattgcagggaaaggcagcccccctccaaggcattacaatgtgggcttttaatgggctatttgctatctagaaatatttatgatgcagccgctattcgtgtggggttgcttcctccctgggctagctgccttttcctctctctctccaaatatacagccctcatgaaaaatctctccggggatcacaggatgctgccggcagctggggaggctcttgctggggccgacgggagcctgtgtggcagggtggcttctccctccacccccttcagcccttccagcaccctcggtgcctgccctctggatccttaacaaagaagaaccctgcctccttcagcgcctgaagccgggggaggtgcaggttgagctgggaagaaatggggagcagggtccgggctgtttcagaccttcatggaggacccagggaaagaagagcccccagagggattcgtggacacagcgtgacctgcgggcccctgggctgcgcctgccgtccatcatgtcaggaggaggagaaggagagcacgaggcgtgtgtgtgtgtgtgtgtgtgtgtgtgtgtgtgtgtgtgtgtgtgtgtttaaagaatgttaattcatactgagatcctagggaatattttcctaactaggacagacttgggaataaataacgtgcttatatagctgggtctcccctccccttcctttctcccactcacttaacacacacacacgtgtgcgcacatagacacacgcacacacgtgcacacacattgctagttactaaagctagcctgtggggcaaggaaaagctgaccttgagaaatgcagttttcaattccagctgaagcccacgtgaggagcctgtgcctggcactccagacagactgcatacgttaggtgggccacaggcaggcacatcccacacgtggacttgggcgaggtgccctaatgtggcagctgaggagcaatagagggacccaggtggaaccatttccacaggcctggagtgtgcactgcaagtctccagccttgacaaagatcatgggtgtgctgaggtttctcatccacccgagcctctgtctacacacacagagtgcctgggagctgagaagtgtgtttattctgctcctttcctccctcataaatgactgctaccagcacttggaggaaaagcccaagctgtgtctgagtgaatggaagcagagtgggcaggccggcctcactagccaagtccaagccgcgaccgcgtgtgtaagtgatttccatgatctcattccttaaccctttttgagatgatccttctcttcccgagtgcacttagggaaggcaggtaaaatcatctgctttcctgtctctttccttgatctggctctatcagagaaagaaagaactgttaggacgcatccaagagaaaagatacctgatcaaattatttcaatgaaagaaatccagttataagatataaatatatacattcgaattctattataaacatgaaagtgtctgtgtgggtgcgtatctgtagaaaatacaagaagaatacatatcaacacggaagcagtaatacctcttggtagtgtgataattatatttgatttttcatactttttaattttttctcaagcaagatatgagttattattgcttcaacaatcagaaaacaattagcttaaagaaacagacaatctgaacagttaccatacacattagcaaagacactgtttaaagttccactcaagtaccccagtgttctcagcaggctttctatcttctcattgtatttattccagttttcattttaactcaacccagt

SEQ ID NO: 1880607 - DNA, 4001 bp, Homo sapiens
tgaaatgtggaattaaatctttgcaaaagtaaaattttgcacagtttagtgtcctgtgtcatttatttgccaaacatcacaatgctatgacctgctacttcctgacacactgacttaacccctctaagtgtgcattcaaaatcctagcatcagtaaaagccagcatttatgaggtgcttattacatgccattgcctgtgcttagcattttatgcgtactaactcagttattccttacaacatctcactttttgggtgagaaaacagtgacccagagagatgaagcaacttgccccaaatcacacagctagttcagtggtagagcaggggctcaaagttgtgtgggaagtgggagagaagaatataaagaagcattggtctgcagttgagaattcatctgcggtttttccacatcctttgtgcagaaggtgaatagatcgtggaattgatctggagtccagaattttgccaagtgcagaggaccacagggtatgatatcgaccaagttatttgaagtgactgattaggtgatcttgactagctagagaaggaagacagaagaaagaaagagcaacaatggaggagtcagagggctccaggaggttggagggccatgacaggcaagagagtgctgcaaacatggatgattttggctaaagtgagatgtaggaacttgggaattcataggcgacagggctcctagtactgatggggttcaggcacaaggaggttggatactggcaatcaggaaatgaagggcaatgtcactaaatggcttgagtcccaaagagatagtcatttattttaatttttttctagagaaaaacagtttagatgcattcagactattttctgttttttcattcacatgttattttttatggaatgaaatctatcaatatcttcctttatggtttgggtgatgtttcagggtgttcaatcatccccatttgcatggaactgttcagttttagcactgaaagtcccacatcctgggaaattcctcagtcccgggcaaatcagaacagttggtcaccttagaagccatggactctcatacttcaaaaattaccaatagtctcgcaaccagttctctcctttcattctcatccctcctctcttgctgaattattatccaaaatacaaaagaacaaactcacagactggtaggaacctacatctttaatcctaacccccgttacctgctttggatatccaacactctaaccaaataggcttaattaaatatgattccccaaacacccccaccccaggtgtctcagtcactctgtgctgttataaatgactatatactgggtggcttagacaacagagatttatttctcactgttctagaggccgggaagtcagatcagggcgccagcatggtcggctctggtaagggacctcttcctcgtttgcagatgaccattctctcgttgtgtcctcacatggcagagaggatagaaagcaagctctctcctgtcttttcatgaagacactaatcccattcatgagggattcaccctcatggcctaattactttccagaggccacaccacctaatgccatcacaatggggactgggcttcaacaagtcgattagggggaaggggggagccacaagcatccagtccatagtaccaggctctcatatctcaggcctctgttcctggtcttctccttccctgaattttctctccctttgcagcctgcctgcctcccattcttcctttcagaccttcctttgaagcaaccttgtctaggaaggctttgcaacctgaactcttcctccttagatatttatagctctttgagctcctctattaattataacaaggtagtaagtgacagaacatctgacaccagatggctcaaacaaacgaaaagcaccctacctttggaaggtagatccacattcaggcatagtcggattacaggatcagagcatagccatccagattctgtatctcttcctccatctctcaactctaggttacctctctcctcgggcagcccctcccctcacagctgtaagagcatcggcagcttcttgggctgcattttttcagggtatgggaaaagaggaggagttactatatcaacatccccagaggctgaaaatgcccctgactggaccactttattccatcgctgtggtcaggaggttgtgcagggccatgaggctgcacaggtggttgttatgcattgcatgacaccaagaggtgccattcacatagtctgcaacacagctaccggaccgagcacaccctttcacctctctgggtctcagtttcatgagtcagataagagtgacaaatctgaggtctcctttagtcctacagatctaccattccaccattctgtgacctcctctgttgaaatagtattttagtggtttggctatctttccatgaagagttcttaaactctctttttatctatgttcatccccctccagaataacaagtgggtggtaagcttttttaaaaagaggaagcagagaagcccaaagaaattaagatgtaaaaatagtacattgtgaaaattctcagttccgtgttaccactggtcatatctatttggctggacaagttataatgtagtcgccatttgctgagtgtttgttacatgcttgcttctaaatgttccttgtgtgttacatcttctagtttcttctggtgacccccatggactagatggtactgtacctgttgttcccattttatagacaaagaaagtaagccctggaaagttgctcggggtgcatgttcaccgaatggtggcatctggatttgaacatatgtttgctgggcttcacatttctctctgacccaacacactgtgtcactccttcgtcagagtctctgctggagttcatcgagtctcaactgggggctctagcccaagggagtgatgtacttgctggttcacaggaacatgagtgtttttaaaaggaagattcaattttaatataattaataattataaataataacaattttatatttggaaatttttattttctgacaaaagtatagaaagtaaaattcaataaaatactcttggctggttgcagtggctcatgcctataatcccagccctttgggaggccaagatgggtggatcacgaggtcaagagagtgagatcatcctggccaacatggtgaaaccctgactctactaaaaatacaaaaattagctgggtgtggtggcacacgcctatagtcccagctactcgagaggctgaggcaggggaatcgcttgaacctgagaggcagagattgcagtgagccgagatcgcaccactgcactccagcctggtgacagagcaagactccatctcaaaaaaaaaaaaaatactcatggcaagtggggacacacagacaagagagatgcttcttcatgtatcagaaccttgggtcagggatgacctttgagacttgtatgtcgatctgaagaagaaattgtttttaaaaagctgaaaagcacagatcgatacaataatgggcaggtcttattttagttagtatctgtttcaattcagtctctactttgctgcccagggctgtgtgtatgccactaacctttcccagggagtgctggtcaaccaggagagcaggctggatgttgtaggggagccctgcctctccaggcagcagcaggtaggtcaagactcagacagcctctcttccaagcctggcttcctggatctttgtccaaccctaacgtgtgatgggaggtacacaatgcaaaaataaccaaagagacctaactgggttgctgctgaaaacaagggctttttcatatgaagatgtcacattaaggaaagaataccatgcaagctgatagacgactgttccgcaggaaggtggaaccaaggtggtccctgcttgtccatgcatggggcaccatctcttggtgtttctagagtaatgaataaatgttcttgtattccagtgagtttcctagtggatagttcactgacctgtttatttgcag

SEQ ID NO: 1880608 - DNA, 4001 bp, Homo sapiens
tggatccttggcaaaggctggagtaacaagctatgaattgttgattggggactagggttgcacgagacaagcatggaataaaggtggccagaggcacctgccagaatgccagttatgtgtcacagcagaagcaaaggtgataaatgacagccacaagtagcacagaacctcattttaccaaccactttaatcttattccctcatcacatcttttagattaaaagatgtttgttcattaattaaggttccccttcctgtaaagtttctagctcaaaatctagttaacctaaaatgaagtcaactgaaaaataatggacaggaaattacattaatggctcaccaatatctaacaatcccttagaaagtaagagttggctgcatagagattctttttggaaaggaggtggaattgattccttatagcaagtaagtttatttgttgttttgcttagtcaggttaaaaatttctatttctgtgcattaaccggtgataatgactgatacttattctgtgggcaggcagcctggacagttctttggctagtcttacctgggatcactcctgtggctgcagtcatctgagttcaacaggactaggatgtccaagatggcctctctctcatatctggcagtgggtgctggctgttggccaaggcaccttggtccatctctacgtggccttttgtcctccagcaggctagactgggcttctgcacagcaggtattctcacggttataggagagtgataatgggggattcaaagcttcttaaggcctaaactctggaaatcacacagtgacatgttccccatattctactggcaaagcaagtcataactcagcccagattaaagggatggagaaaaagactctaccaaggtagccagacgaaaggggctaatgaagggacatttcaagtttgggtaagggatttttcacaaaaaacagcatgtggtcatcttatgctgagaacaggggtgagacatatgggaagaggcaggaaaaccttctgcatggagtcctaggaatagctggggtgtccctccaagtgtactgggcacttcccaccctgaacatctattataggactaacaccatgccatgctgggaaaatatggtttgttcagaggactgcaaagcttagtcactgcccatccttggccatcctactctcccaactgaaataaggaaactgtagggagagtcaaaaagagcagaaaaataaattgagtactgcaactagatggaggtgggaagccaaactgatgttacaatttttccctcactcccaaatatacatattaatatagtcaaacacagtgtcatcccttgagggctgagtgcttctgctttctttaaagcagatattctcaaattccactcactggctatttccagtggactgtacattcttattgcttgtagagcaatagtgcccatgtttaggtttgaccttaaaaaatgtttttgcaagaacctataacttgttcatacttttttatttttaaagtatacctattcatttgtctttttcaaaagctggtgaattttctttgtaaagatatgggtaagcttgaagtactttgtccagcataaatgggtcataaactggcagggcagaggacccctacactatgtgcaatttttatgcttatagtatggaagcatgtttggtaacaaaactaaactttaataatacactgcttagccccatataaaaataccccctggtaataaaaatactgtaactgtgtaataatcaatgctatattatcttctcaagtttattttgtattaaagagatcatatatttttaaaaatttttaaaacgcctcaacagcttcacgatgtgagacctgttcctgtagtgtgtaccattaaacctctaaagtccagaattgtacctaacactgggtaggaatccagcataccatttgtgagtgaaaggatggtaattattattatcatcttgacagccaggaacagaggtgggtgggtacctggaatcagagtcaaacaataactaagagtcaaacaataactaacaggaatgatgccggatccgtccattgagacaataatcattctgaggtttctgttgcagtctaggaaaaatggagaaggctagaaggagtattttaaactgctccagaactttagatttagaaagaatcttggcagtcaactcctcttcacagccagttcatttttcttctctagggtgccattggagggcacactccctgaacacttatgagtgaagaaaccctccttttcaccagccattgggttccttttcaagtttatttttttaaaattttctttatattgaaatctgcctcatttaattcctacctctggccctacgttctgtttttggcaccagatagataaaacccatactctattttacactcattcaaatcattgtatttcccccaccggtgaatatattaccaaagttggttgagtttcataatgcaaacccaaagggaaaattatcttgaataatcatatgacaatatgtggaaagtttaggggctgtgtacgccacctcatggttttgaactgtgtggttaaagacgttgagagttgacagattagtcagggatttttcaagagtattaattacaaactttgaaatcttggtcagtgaaagttcattttagtgcatcttgcaaatacgatcaaaggtcttttcagtactgatttgatgatgcttaaccacagtgtgtgaagaatgaagtttttcattagaaattactggtgtaatagagcacattttcagggaagatgtattgttggactattacaattcatgctcttcccccaccatatccctaccctctatattccccatcccctatttcctccaccttcctccttgggacctcactgaaaacctgaaatgctctgaaaacctgaaatggcgttttggactgctgcaagggaaactgtgatcttaacaacatcagtgcggctcagacatgaccaccatgtgagggcaaaggtggggctggtgtaagtgatgttgttaaacctgtaaaaataaaccatgaaaacctggggatttactgtgatttggggagtgaaacaaatttaccactggccgaaaacttgaaaaatggagtacaatgtgtagatcagaagaaaagaaagccgtccctctgcccttgtgtagttttagaaaaacaatcttattagtttggtagctttttttcctgaaaataaaaaaaaaaatacattggcacctaagccatggaaaatgaaataaaaatacaccagtgcagcttccaaaacactgacttgcatctccctctcctatccgccgggaatgtcttatccctgccttccagtggctgccagaaccaagggcatccgcggcgttccttggcattggcgttaacagcagatggattttccgcagcggccaggcggaagatgcctagcattggtccgccgtctcactgtactgaatttcaagaatcatggcctactgccagccaggtcaggaccgaaggcgctagtctggggagactggagcaggtctctagtggttcacctgttcggaggctcttcctgttcagttccctctgcgcgccagagggtggcaccccaggcactccagaggtggagaggaggggacgacaggggaggcaaagagagaggagcggagggaaggaccagggaggaaggaccaaggagggagctttaataaattctcagaccttggtctcgagttcccggctaatttgggggcaaagccgaccgaccccacgtccacgcccacccccttacgggaaaagccggggtttccactgggctaggtgtcagagttgggaatgtctaaaacaaaaaaggcttccgagggttattcatggccaacagtttccacaggagaatccaaagggaaactagtttccggggccgctgtgtgtgcgggtgcttggtgggctgaaagctgctgtcactagatggctgtaagtgtgccaacatctgac

SEQ ID NO: 1880609 - DNA, 4001 bp, Homo sapiens
ctttaaattgcttcctgtcctcatccttcctgtcagccaccttccttcgtttgatctcaggaaagttcaggtcttccagccgctctttgccactgatctccagctggatctcccagtcacgcagcttgcaccagtggctgtagtacaaggtcaggggggtcccctcttccagggtcagcttctgccaggcttccactgcctgctggtcagagacgccgaaggaaaccctctggcggcggctgcagatgtgttccgagttctcctgaaccttcccaagcagctgctgcacctgccggcagtagttggccaccttgcactcccggaggaacgacttcagccgcaggaccacaggcagcgccagctccgggaagccgatgcagtgtgcctggctgtgcaggtactccagggtgaggtcgtacagctgctccaccaggccgtcctggtacgccttctcctgcaggttgacactggacagcttcaggatcacggagaagttgatgggcttggagctcatgcgccccggcttcctgctgaagtcgacctgctggaacatctccaggatgaaaggcagcactgggatgaaggcccccgagctccccgagagcagcgtcagggcacggatgcagtgcattcgcagtgggtagaagcgggcagtggggataagcttgatacagccaatgatgacatgggcaagggagtagaacaagggttggagggcttcgctggggcccacagtgctcaggacccggcaccacaggaagaggcagtgcacgtactgccagttgtacacagacgtttccttcttgcgggtggtcatggcattgtgcaggtgtatggcgagctggcggatgtagaggaaggcgtgctggtaggccacacccggctccaaggccagcagctccctcagggtccgctgcatgaaactgatgaaggggagggcaccaggcgaggtgaacttgcagttcctcacatacatgatgtacatttgcttgaggacggggccaaggaaagtgtccttcttgtgccggcagactctgctgaggaccaggaaagccagcacccgcagggactcctcccctgtgctccatacgaccaccattctcttaagcagcatacggcactgcttggggaaggtcaggaagcagggcactagcacgctgatgtgccacagcacggccgccaacaccatcgtctctgccacacaggacactagctgtatgaccgagcccaggtacgccttgatgtccacatggagcttcccccagagccggctgctggacggctgcagcatcctgctgctgtcctttgccgcctttccaaacagcagcttctggagacagccaataaggtctctgatgcagaaggtgaccagagcattgaacacagcactgtccctgacctggaatttgttggcctcagcactttcctggtccccttgggtggtggccacagctgctccgaatgcctgtaccacttcatggaacagctttggagtgaggtgttgctttgctgcctgcttccatctctcaaccatggcgagggtcacaggaacacaattcttccccttcagccctctggggactctgtccccatcttccccctcctccgctccatcctcatcctcactggcttcctccagcacatctggcagggagttgaacggctcctcttcctcctcagagctgagtcactgaagtttagctggctctggtcattctcctgcaggaacttgtagaactcggggtctctgtccttcagccgagagagctgatctttgtgctcagaggcacagcctttacgccggctggccaaggagctcccgcccggctcatccggactccgggcagcctcgcgtgcctcccgcgtctccgcttctggagagtattcggacttagagtcaaagcccgaagctaggaactcgtccaccgtcagctccgccaggcgcctcctgcggcgccgcgctcctgccatgataccagcctgcagcttgcggcccacttccggccccagaatgccgcgcggctgcacacttccgtcgcccaggccccgccccgttccccgccccgccgcgccatgcccagccgagtagctttacggttctcccaccgcagcgcccgtggcctccgggcgggatggcgcgttcgcgtgctcggtgcgggcagccccggtggggcccagatgcgcctcccgctcggcgcctggcttcgtaggacgcggcgacgccggtgtccgtcctggggaagagaaaccaggagtcccgccgcgcccgcagcccacccggcgttccgagggcaagcgcctgcgaggatgccaggctgcgatggcggggcccctatgcaaagagctcccacaaatcaacaataaaaagcagagggtccagtagaaagcgcgaatggcggtgggaaccgcactgatgttgccagctcgacagaagacgggcgacccgagagccaggctggctttgcctccgatccgcagagaccaggccagcgccacgaacaccacgcagggcgctccccgtccatggccctctgggtgcggacggcggctcttccgcggcccttcccggggacgccgcatggggcgaatgcggtggggaggccagcgccttccttcctgctaccagcctgacacccgggcccccgggcctggacagccagaccccgcgacagggtcgccccggggcgcaggcgtggatcccccagacctggcgctgaaggggcacgtgaggcggacgcaggcagagtggcctcagggtcccattcggcctcttggtgctgcggtgccccgtggctccccagaggagagcaagttagggggtcgggggagcggggatggcttccgggggaggaggagggcgaggcctagggggcttctcggaggaggaggagggcgaggcttagggggcttcccgggggaggaggagggcgaggcctggggggcttctcggaggaggaggagggcgaggcctgggggggcttcctggaggaggaggaaggcgaggcctaggtggggcttctcagaggagaacggcaaaggcctggggggcttcccggaggagaaggcgaggcctaggggggcttcccggaggaggaggagggctaggcctgaggggggagcttcccggaggaggaggagggctaggcctgggggcggggcttcccagaggaagaggatggcggggccaggggggcttctcggaggaggaggcagacccggggcgcagcgctggaaggatccgcgtccaaggtctagtccccgaagcctgtcgggaggccgggcgggcggtgccgagccaatgtgaacaactcttgcagtcacttttcttggaaatgggaagcttaaaattgggtaggagctgagaaagatacaggttcaagagagggcttttttaagatggaggtatgtgttataaatgagggattaagtaccccttgtggagtccttaaggaaccttccaataggctgtggagatgacactgggaaggcatatgaataaaggatttactgtactcacagattccaaagagggaggcacgacataccttgtggggatcacctgggcagagcaccaacaaagcgggctcagccaagcaggtggggagccaagggcaaacaggttcctgtggacagttgcccttattgggcatcagggtggggttcaccagcaaaggcaggaggggatatcatgggtgtgcttaaatgtcactaggccatggtcgggagagtaagaagggggacttgtgacagggaccagccttgtcacattggtgtacctggtcatctgggaaaggtgcccacagcttgtttgtggagatactgaggaatcaggaaaatgggaagtttttagaggttgcaattcaagatgttatggtacatcatttttcttggcaatgactcattaaaaaagaagaaaaaactaatgaggcaggaatggaaataattccaggagcaaagtcctttaggaggagtggggaacaggatccagtgcaaagtggggg

SEQ ID NO: 1880610 - DNA, 4001 bp, Homo sapiens; identical to SEQ ID NO: 1880491

SEQ ID NO: 1880611 - DNA, 4001 bp, Homo sapiens; identical to SEQ ID NO: 1880492

SEQ ID NO: 1880612 - DNA, 4001 bp, Homo sapiens
ctcaacaccagcccagcccatgagagcagccacgggggctacaccctgcaaagccacaggtgcacagtcctagcagaggttttccaccagcctctgcctctgcagcaggctactcctccttcctactacccccaccctcccaccaccctacagcgagcttactcctcaccacgctacccacctctttttccctccaaccccacccaccccccatccatgattaaatcacctcccaccaggctccacctccaacattcgggactgcaattccacatgagtttttctagggaaacacagccaaaccatattattctgaccttgaccccctcccccgaatctcatgtcattctcacagagtaaaatacagtcatgccttttcaaatgtttacaaaagccttaactcattccagcgttaacccaaatgtaagaagttcaaagtcttatctgatacaaggctacggtctcttctgccaatgagtccctgaacttaaaatggagttcttttaaggtacgatgatggtacaggcattgggtaagctttctcactccaaagggaagaaatttcccagaaaaataacacaaatgggaccacaggcccaatgcacatccaaaacccagcaggccagtattcaaatctcaaagctcctaaaccatgaagcaaactcactgtcagaaggacagcattacaaagatggtgtttaaccatttgtgaagaatctgccccccacctctgcctttccccacaaccccaacacaatcccccccaatgctcccaaccacccccaccttccaaactccactctccaccatgattaaatcaccttccaccagtccccacctttaactttgcccattacaattccacgagctttggtagggacacagagccaaattatattattctgtccctggtcccccaaatctcctgcttcttacattgcagaatacaatgataccttccccacaggcccccaaatcttaaataattccagcatttactcaaatgtccaaagcccaaagtctcgtctgagacaaggctacagtccgatctgcccctgagtttctgaattataaagcaagttaactaattccaaggtacaataattgtacatgcaatgggtaagcattcccagccagtagaaaaaaaatgccagaaagaaaaacaaaacacagatgggactcacaggatacatgaacatccaaaacccagcaggccagtcattcaatccgacagctccaaaatcatcctttttgaatcctcgtcccacatccatggcacagggctgagggccgggctcccaaggccttgggcagatctgcacctgtggctttgcagcgttcagcacccacagctgcctctcatggacagggctgttttgaatgcctgtagcttttccacactgagggtgcaagatgttggtgggtctatgaatctggggtttggagaatggagcctccctgtgagggggcttcaacactacatggcccttctttgctgccctagcagaggttttccatgagcctcttggaaaggctactgcctggacacccaggcttttctctacatcctctggagtccagacaagaggctccaaagcctctagtctcttgctctcttcacctgctgccttaacactatgtggaagccatcaaggcttggagccacatgtgaagtagtgacccaagctgtacctgtgcatcattcagccatggctggagctggggctgcagggatgcaggcagcagtgtcctgaggatgcacacagcagtagggccatggaactggcccaggaaaccattcttctctgctaggccccagggcctgtgagagcaaaggctactgcaaaggtctctgaaatgccttcaaggccttttaccctttgtcttggacacttgcactaacctcctttttatgcaaatactctaagccttattgaattttcgccctgaaaatcagcttttctttttgaccacttgactaggctgcaaattttccaaacttttgagctccgcttctaagtagaagttccaacttgaggtcctttcttagctcatacataacacaggctgctcgacgcagacaggacacctcttgagctatgctgcttagatgttcattccacaagatacatcctaaatcatcacccccaagttcatagtttcacagatctccagggcaaggtcactgtgcagcctctgttgggcaaatcaaatgtagctttggctcctattcacaggaaattcctgatttttatccgagaacttttaagtctggccttcactgtccatccttctgtcagccttctgatcacaagtatttaacaattctctacaggggtccaagcttttcctcatcttgctgtcttttaagctttcccaactctcccgacctctgtcttttacccactactgaacctgcttctacattatcagctctctgtgtcacagcctggcaatgtggtaaaagaagaaaagtccattttcagggaaaaaattcacacaggcttcagatatttgcatgaaaagaagctgagtgctgcttgccaagacaatggggaaaaggccttgaaggcatttcatagggaaaaggccttgaaggaatttcatagcttcacttcacagtactaaccttctgtatgatcaaaaagaaaagaggtttcattggctcacagttctgcaggctgcaaaggaagcacagtggcttctgcttctgggaggactcaggtgcctcccaatcatactagaagaccaaggggcaaggagatgtttcatacagcaggagaaggagcaagacagagaggaaagaggtgccacatcatgttatacaagcagatctcatgagaactatcacgaggtcagcatcatgaagatggtgcttaaccactggtgaaggcttccaccctgcaaaactacctcccactgtttccaggcagaagcatgctgcagaggcagagcctcttcagaaacctctgcgagggcagtgcagaaggaaaatatgggcttggaggactaacacagggagccaccaacctccagacgacaggcgcatccttgcagaggtgactggttgctctttgagccagcttggccttgcctggcatacacaggccccaggtagcaacatgctgctccgagtgagcttgtcctgccttgacacaaattctaagtgtggccagggccacagaaggccgagtcccctagatgctaatcctggctgctttctgcacttgaacatgaagtcctcctcaagatggcctgtggtctgcctcttggcaaccaagaagcccgcagtgccatatgatgcctgaggcatggactgcggccccaaaggcagcgaacaccctgctcctgagcctgctgctcatttcttctctgtggctccatttgtagcacagttgttgcactgaggcttgtgcatgccgggcaaggccaagctggctcaaagagcaaccagtcacctctgcaagggtgcgccaggagccggtgcaccagccaccaacctcacttgctgccagacatggcacatcagtacttctaccctaaaggtagggccacaaggccatctgcttttcctaaggactctgctccatcagccatcaggagacagccactcaggctgctggaacctggccatcccggcttccttcagtgggtgaagctggtggctggtccaacaggtccaggcgcacccttgtagaggtggctgattacgctttgagccagcttggcctttcctggcatgcacaggccccaggtactaacacgctgctccgagtgagcttgtcctgccgtgacacaaattctgagtctggccagggccacagaaggccaagtcccctgagtggtaatcctggctgctttctgcacttcaacataaagtcttcctcaagacggcctgtggtctgcctcttggcaaccatgaagcccgcagtgccataggacccgaggcatggactggagccccaaaggcagcgcacaccctgctcctaagtctgccactc

SEQ ID NO: 1880613 - DNA, 4001 bp, Homo sapiens
atagacaaaagaatctggaatagaaagaaaagcgggaggcatcacactacctgatttcaaaatacactgcaaatctatagtaagcatggtactatcaaaacagtatggtactatcaataaaaggggtgggagagagagaggtgaacgaatgacagacaagtgaaacagaatagagaaatcagaaataaattcaagcgtttacggtcaattcttttttaacaaagtccccaagaacacacattcgggaaggacaatctcttcaataaactgtactaggaaaacccaacacccacatgtccaagaatacatctaggccattacccttaccgtatgcaaaaatctactcaatataaagatttaaatgcaggacctgaaactattaaactaccagagaagaaaacaggataaacgcttcatgaaattggttaggacaaggaattttcaaatagacatcaaaagcacaagtaacaaaagcaaagatgtaattacattaaacttaaaaccttttctgacacagagttagcaatcagtataatgaagacagaacccagagaatggaagaaagtatttgcaaactatgcatcaggcaagaggttaatacacaaaatatctaaagaactcaaactactcaaaagtgaaaatacaaataatcttatttttaaaaatctacccaaaacctttgtcccccaccatttccccaccttcttttcccgaccgcatttggccctctccctctcaccaccatttctcttcctctacctatccccaaactttctcaccgttttctccccaccatcattttgcaaagccttctctacgctcccgctcaccacgcttttccccatccatctacccaaacactttctcccattttttcccaccgtattttccccttctctctggccaccctttttccccctcccgatgtcatcacgcccttttgctccttcagctacgcaaaaacattgtcccccatcttttcccaaaaccttttccctactcctgctgctcaccatcctcttttcccccttcatctacccaaaaactcttttcctcatcttctttccccccgctcctccttgccactctctttcccttctccatctacccaagaacatttccccaccatcttttctcaaggccttctccccactcctgctcacctcccttttccccctccatctaccccccaaaatttccccatcttttcagtcttcccccccttcccactcgtcctcttctctcccctatcctgcttgccaccctctttttagccctccatctaccccaaactattttcccatctttttcccaaccttcttgccctgctcccttctcgccaccctcttttctcctcctcttcaccctctttcccccctccatctactcactttttacctaccatcttttctttctccaccatctttcttttctgccactgtcttttcgcaaaaccttgtcttcctcccgctggttaccctctttttccttcccccacttgctatcttcttttgctcctctatctacccaaaaacttttctccccaccctcttttcacaaaactttctctccctactgctcgcccgttgtcccccctcaccactctctttcctcttcccaattgccaccctcttttcccccttcatccacccataaactttctacccaccgtctttctgcaaaaccatccctccctcccgctctgcaccgtttttccacctccatctacccaaaaacttttttccccaccatcttgtccccatcgtctttttgcaacgccttctcctcctcgctatccttttttccctttgcactaacaccacactctctacccacctctatctatcccaaaactattttcattctcctaccccttcagccgcgctgcaatctccatcgccaccaccaaccgcagcaaggcgagttgcgccgcagtgctcaacaggaaagtacggaaacctaaagaaaccctaacctctcttcggcattacatatatactgaggttttgcgcatgatggttcctggactgcatgttctgattggatgagaaaaaaactccaggcttactcggattggactttattatcatgttctgattggatgagagcaagtcttaagataaccaatcacagcatgaaaataaagtccaatcagagtaggcctagaggtttttctctcatccaatcagaacatgtagtccaggatccgtaacctcagtatataaagcatgcggagggagccacacgtcatttttggcttttctgtattggtgtgcggggctgctacgtgctcggcttagagaattagaagggtccgtctctttttgcccactggagtctggcacttggggcactgcctccctgttggtggtggtggtgatggagctgtaggagggaggctagcagtgggagcttctcctgctgggctggaagacaagcagaaggaagaggcaccaccgcatgctggaggctggagccacggcggcttgcctcgctgcggttggtggtgacatcggagaccgcagctacggtaatacaaagccgtgtcctcggctctgaggctgttcgtttgcagatacagtgagttttttgcattgtgtctggaggtggtgaatcggcccttcacagaatctgcgtagtatatggtaccaccactgctaataactgagacccactccagccccttccctggagcctggcggacccaatccatggtatagctactaaaggtgaatccagtggcctcacaggagagtctcaggaacgcccccaggctgtaccaagcctcccccagactcgaccagttgcacctcaaactggacacttgcaaataaagagacatcctggttagaaattgccacacatattcactgtttctctcacttatatccactcacactctaactccctagttttccatgaatcaccttctaaaatagcaacaaggaaaactcagctcagcccgaactccatggtgagtcctctgtgttcggtgctgatcaccaagtggaaatgccttggagtcccggggttaaggctcctctctcagagctgcagggtcgggtttgggttggttttcatcagtagagggagggcactaatttcgtatctccaactatatagcaagtgctagggtgggacacttgagaagtaggctgtatccagataagaagctgttacccgcagaagttggctggtaattatggtatttggaaaatacgctgtcttattaatgaaattgtgctgtgataaacattttgcctttatcaccctatttcattttaaaataattgtgtaaattatgttctgtaggagtcaatattttttcatttacagatgtggaagtaaatccacacacggagggggctctgtgtgtatctaagagctcatgtctaggatgagtgaaccctggtatctagccctgtgcttctcatcaccggctccgactgctccctaagccaactccagtacaaagctggatgtgtctagtgttttttttcagagcccactttccgtagtaagagcatgtgtggttttgctgcactccagcactcatctgaaaatacggggaaaactagggtccaggcacattaattttcaggtacttctgacatttaacatatttgttctgtctttctattactccttgtctaaggttccatttgtttgcttgtaatacaatttatgaggcttatttgaaagataatgcatttcacatatttaaaatgtacaattaataaacatgatagaactgtcatcattatcaagaaagtgtacatgggaattcttctcaacatttcctcttgttcagctatattcctcctcctttccccttcccttcttctaccagtttcccgggcaactactgatcttcattattttatgttagatgcatttttatttatcaggatttataacaatgaaataacatagtatacttactggtttagcttattttactcaacacaaatacttagatattttagctttttcttgtgtgt

SEQ ID NO: 1880614 - DNA, 4001 bp, Homo sapiens
tggaagagattctgggggtagaccatagcatatgactgcatttgtagtttaaaggagcaaagggctaccagtcttactcataacttgatttttaaaaagtgttcagtgcctacaatttgctatgctttttttctaatctctcagaaacttgaaaaaaagctatcgagattaccttttacagtgtgtgcatataactttaaaacgactattttaacgtcttttatttaaattttattttaacttagtgcataaacattacagccagtttaacttgtccgtggaaaggcagtagaattttaccccgggaccgtcttgcatactgctttttttgagttttaacatccgcaaaatcttggcatattaatttagttgggttgtagaattctgagtttaggaacaaaaaaaatttaggtggagatggttgacctatgctccctactctgtagcttttgtttttttaaaaactaagttttaaatcccgttttctgtcctgtcttctttaaaagcaaaacaaaacattttaagtttcttaactttttcctgggacaaggaacggtgcaaactcaaagctacagtattcttggaaagaagaagcaaccccctcccttggctcctttaggagctgataggtcatttattattggaactgaaatggtataaacaattctctctctttttttcccttgttaacagcaactttcattgttagagagaggagagagagagaagccttgttggttgacgtcacttggttcatgaagccttcgcctagaagtgaagctgctgaacaaaccttgagaagaatcatctcctgcttcaatctgctgctggataggaactaatcagagagagagaggcggaagacggagaaggagggagtcgaaggctttcccgatcacaaatctcacctccactacaactctctttatacttttcttgcagaaataataatagaaataaggaggtggtggggtttccaaaaatcttaaccttcaaccatctggggaaaaggcaaaaatcccatctaccgcaactctcagttcgagagtaaaggtgagtttaaaatcctcgggcgtgaggggtgcgggtgaggatgtaaattcccagtgttacaaagccggtggaaacagcagcggagaaactgcgctcgggcaagcgggggactccggagttgctgcgtggaggcgctcgccccgccgccctctcgccctccgccgctgtttatcctcgccggtcggtgcggctctttgttgtggtggccggaaggctggggtggttctcggggtcccgagtggagtttgggggaggaggacacggagatgtgccgtcctgggtgggaggtggggggtgcggcctcaggagaacgtaaactttattcctagaagccggtgcgggacttcgctggagtagggccgtgggttgtgctcccggccgggcaggcgctgccgccgcgagtccgccgcctttgtgccggccgccctggcttcgcgtctccttcctcttccccttcggcttccagcgctcaggtcgccgccaacagttttgcttcttaaaaaacaacctctgtcagcgttgcgatggccgttcctaccccggaatatccgctgctcccccactccctgccggggtagtttctggatcaccccccacccccgtccgcctcctgctgcccttttttgcctccgccccctcttccctgtcggactgacgagctgcgtctgccacccccactccccggcttgggcctctagctctcccgtgtgtagctggaggctctgagtttactgaagatgagcgggggtgggggtggggcaggtgggattgggaaaagatctggatacctgggaaggtctatgtcagcacgcagaaggtttgaggagcattgcttctcatacagtaaggtctgtgccttggtctcatgttttagcagttcttccccgggaacgaccgccagctcccaactcctctgcttccctcttttaatcttcttgtcgctacccctccccccagcccccgttctctttcgcggctccctcccctttaagtagtttcacgaaccccagaattgggatttgagaaggggaaggaagtgtttgaagagtcagagctggctctgttgtttgggagattttctcttcttttctttctccctctgtatttatcttttgtctgttgcttccttataaagagggaagcagctgcagtccttggccgagttgttgaaatttatccctttgtgtatattacaatatcctccattttttttcctgccctctaaacaacaagcgtttcgccatcttgggcaattttattcccaagtctctctcttttttatttttgaggaaaggaaagaagtattaggaagtgtgtctggataagtctcaaagtttagggaatgttcagggggcccagtgacgtcatgtaaactttacggagaaattttcccaagagtaaattttttgcttaatttttctcctgttttataggattgtgtaacttacaggttactgataagttgtgtggcttatttttgtgttttgctctcaaaatcagtatacgaagtctgcgtattgtatgttttggtaacaggtggaagattatatgcaaaaaatggtaaaaaacttgtgcgtcatttgttatttatctggtttttgtgtacttttttttttaatttaaaggtttcaactgttatctgtagtcagtatattccctttcttatttgctccactctcccttatggattttttgaaaattagcttggttaatatttatgtatggttattttagattatctggctccccgtttctaataaaatgttctggggttttctttttctattatttatttacattttgaaaagaaatgactatggaaaataccttaagataatggatactttaaaatttagtagcagatattaagtcaaacaattattgagtatttaagaggcagaattgattttaaaagttattttataatcgctagctataaactctttgtcagccattatgaacagataaacaaaaactagcactgttttaatttgcttgtctaacatagtttttcgcctcacaaaagttggtttggtcacatgaccaagcttaatgatacactgactagtatataaataagaggcactgtatattgaatgggaaagtggaattctgtctcctgtagtcattttcagtcagcatatttacatctcttctaacaaggacatgaaactgtctgtatttaatttgcattctctttgtcttctgggttgagggaaaaacactgactacaattaacttaaaaaaagctaatagaaacaattctgaatacattgaaaaggtttgtgtaacacacagaaatttatgttctatatggtaagtttttatttctgtagcagtcttctttggtgttatctatttatccaggaatttgcttcatgtaatatgctatatagaaagcttgactgagttgagtgtctgccatttatgtgaattgtaggtaggtgaaaaatgtttaaatagttaaaagcacatagaacagatggttctaaattatacatgcaacaaaggactagaagatttggcagattataaatggcaagcaacagaggataagcagtttaagaaaatggtagttaagtacatttgatgtctcacacctattgtaaacactgtacatattattgtcactctgctgcataatcagtaatttggacaacattaagacactcgtatggttcagatagaaaaaagtaatttttacaagtatttgaaacaagtggttgaatttaaaattattttaagcctacgatgatgaagagtcttttttttttttttttttagaaaatcagattgtatgctttaaaaatacaaagttatttatgagaacttaatattgtgttcttataatggttggagagaaacaggaatgggtacatattttaaaatccagataatagtagcttcactgttctcacatgttaaactagtgccgaattgtagtacca

SEQ ID NO: 1880615 - DNA, 4001 bp, Homo sapiens
acgactctatgaaataaagagtagcagataaaaatgggacacccaccgtcaaagacgcggcctgtgatgcgtgatgacgaattcttgaatgagaaggcatgtagacagaagtgttcctatggcagaatatttacagcactactttcaaccaagtgcttcttccataaacatttgaaatgagatgaactgcagagattaaatgaaggcttcatattgtacttttgtgtttgaggggagacaagtgttaaaaaacaaaacaaaagaaccaaactgtgacaccatgatcttctaaaaggagattttcttaaggaaaaaaatccatatggtggggttcaaattaaaacaaggaataaagaatgtagttctaattcatggcttccattttgaacatgcaaagaactcacttgacaagtccagggataaaatattacaggagaaaccttctgatatcaattgtagtgtgttggtttaccaatcaggcaaacagcagttcactttcaaccactcaatatttcaacctttcatgtaacaaaacttataaaattcctttagctgttcctttttctaaagaaaaatgtcaaaaatactactgaatatactccacactgaagaaaccaattttgaaaattcttagtacatatgtattttacaatatacttaccatgagtttagaaaaatttgaattccaaccattctataccaaccaaccacaaccccactgtctacgttcccagccagaagacttagaatccatgcttgagccaaagccgccattaaaaccactgcccgaccctgcattggatgctgatccccaaccaattgttgcaccaaaattagaaccactacaagagttatttccagaaccgaaggcctggtttggctccctctgcatgttgccttggctttggttatcatccgatgggcctggctgcttcgctggctggctaacacacccatcgtacaccaactgctctgcagcactgcctggggggcagccatcatggctggattaatgctgaacgcaccaaagtttatcccaccacccatattactaccttgattgtttcccaaaccagctccaccccctctactcttaccaaatccaccctgattcccaaagccacctggattaccaccaaatcttccacttcttgctgtctattgctattgcgcttgggttcggcattggatatgtgaacgctgattcctttcatcgagtcctctccacaaagagaccgcgcaatctgatcatctgcaaatggaacaaaggcaaaggccctgaacggcttggggacgaagacatccatcacatccccatactgagagaagaactcccacagctcatcctcagtcatgtcctccgtacggcgccccacaaacacttttctgcttctcaaaggctcatcttggctttgccgcaccataagaacgtctccaaaggtactacagtactctttcaggtcctgttcagttgttttccatgggagacccaacactattaaatcggactggtcttttcactttcactgctgatgaagcttctgtctcacccatttttcttttgttatctttcggatagttgacaacatacaccggatttctccagccagcatcgggggcatgcagaattccttctaccagccggacacctctcatacattgagacaccggattcctgcagcgaagcccacacgcccctggaaactgggctgtaaccgtggacagcagcaccgtcccatcgtcttccgatggtatttcaatgggctcatcgttctcatcttcggttacccgaatatattcagacatcttttacttttccactaggccgctgctgggaagcccgacagggacaccgaggcagcgacggacccaagcgccagtgtttttttgtttgtttgttttttgtttttttaaagaggccaccacaagttgaggcgggactacaactcccagaggccgccgcggcccggaggccacgccccttggcggcgagctctgagccctttgccgcatttgacactcgacatcctcgtgcttcttaaagcacttgcccaacggtgagcaacggcctccaacggtgcccgagggactcgcgctgcccgttaagcagctttgcggtggcggaggctgggctgccgtctctccgacatcccgggacggaggaagagatgaaggctctgcagcccccgccgcccgatttacgcttgagaaagcgaaggcgagagaggtcgtccagcccctgggggcccagccctagagagcggggcgcgggctgcggggcccggcggcctggacggcggagcgttgaaagctcccccagggataggaagtgcagccgaaatcaacgattgaggtcagtgaaggagcggacgcttgaggccttggaggggaagcaggtttctccaggagggaacccgggcctccgctttgctcagcgctcccctcgcgaatgtgttgagcacctgttatgtgctgggggtacagaggtgagactcacaaggcccctgcattgtctttaagatcagcaagaccccgcagagaacccaaatccaacgcgcactgcccagaggcagacactggcattccttgatagacggtagccagggaagcccaggtcttactagattattatcagtacttggatttgaatgtatctgagaggaggagggttaaggtttaagctgtggctcagaagcccctcagctcttcgtggaatctcccaggcttttcactcttgcatcctcatggaaaaatactgccctccctgggaaaccatgctttctgtgcacacctgctctgttcccatgtcgctgtactacctattgacctgtcaatggatgatgacacttggggtactatcctctctcctccagatcttgccccaccttaaccttgaaagaatattaaatgcgcccttagacgtcaggaaccatccctcaaaccttgccattcctctctgttgaacctgctccaaatcttaagtgccaacctccatcttatccactttatcctggggaacttgtcctcacaccccgttgaggtttcttacttattgtcctactgttttcttcacactccagtttcttaaaaacagtcttcattctcattttcttcatttcctcatcacctgtttgtccctaacaaaatttcagtatggctacatttcctgccattctactatagaaaacttctgccagagtctccaatgaactcctgattgccgagtagactcttcagttttctcacccgaactttgcggcatttgatactcaacatcctcatgcttcttaaaacattgttcttgccagagcacggtggctcacacctgtaatcccggcactttgggaggctgagttaggcagatcgcttgagcccaggagttcaagaccagcctgggcaacatagcaagactccatctctaccaaaaatgcaaaaaattagccagacatggtggcccgcacctgtagtcccagccactcgagaggctgaggtgggagtatcactggagcccgggaagtcaaggctgcggtgaattgagatcacgccagtgtgctctggcctggacaatgggagtgagaccttatctcaaaaaattgttctctgtctagtcttcttgctcttcttgttccaccattccttctcaggttctggcagtggctcttcacaactggatattaaatgttgtcttttttttttttttttttgagacaggttctcactctgtctcaggctggaggctggagtgcagtggtacgatcatggctcactgcaacctcgacctcccagactcaagtgatcctcccacctcagcctcctaagtagctgggactataggcgcacatcaccatgcctggctgatttttgtattttttttgtagagagagatgtttgtagtgttgcccaggctggtccagcaatccacctgcctcactcccaaagtgctggggttataagcatgagccaccgtgcccggcgaatattgtcttcttaaatattgtgcc

SEQ ID NO: 1880616 - DNA, 4001 bp, Homo sapiens
agggttttataattggattttagagtaatttagaagacgagataagatgtaatggttgagtattagaggttagaactacaagagaaacccataatgtaagggttcactgcactgggggacaacagaacaaagagaagcagcgccaaccgaaaacggccccagtgagaagcaacaaggtgaggcttgcgatgggggttcccagagggtgtcagcagggacgcaggctcagcccctgcagcataccgtaaggagcacaggcttttctcagaatgctttttctttagtgacctgtcactgtcccacctctcctcctccctacctgcgagttcagcttggcatttctttcttccctgcagcccagcagtcagacctgagcatctgccatccaggcttccaccctcagcaggctgtcctggggctccatccaggctcccctgacaccacccacacacccacaggtccccccacatacacccccacacatacacaccccacacacataaacacccacagacacacacacacacacatacccacatatacacacaccccacaaacataaacacccacagatacacacatacacacccacatacacacaccccacatacatacacacactccctacacactccactcacatacacacccacataaacacatacttcccccatacacacacacagccacacacacatcatacacacactccccctacacacacatacacacccacagtcacatccacactttccccacacacatacacataccccacacacatacacacccacatatacactccatacacatacacacccaccaacatacatacacaccacacacacatatacccccacatacatacacacactccccacacatacccgacttacatacacacccacatatacttctcccatacacacatatacacacccacatacacccctccacacacacgtataactccccacacatacatacccacataaacacatacatatacatacttccccaacacatatatgcacaccacacacacacccctccacatgcacatactccccccacacccatacacatccaaaaccccacacacatacacatccaaatacacccacacccacatacaccttacatacatacacacacttcccacacacaccccacacacatacccacatatacacacacccacagacacacacacccacatccacacaccccacacacatacgcacatacatccccccacacgtacccacatacttccccccgacacatacacacccacacaccccacatacatacccacatatacacacccacatacacccccccaaaacacaaaccccacacacacataccccacacatatacccacatacagacacacatactcatacatgcacttactctcctcacacacatattcaccgtaaacacatacatacccacacacccatacacacatttcccccacatatacacaaccccatacacacacactccctacccacacacacatccacacacccacattcccccacacacacccatacacacactccccaccaccccacacacacatattcacccccacacacacactccccaccaccccacacacatattcacccacacacgcttctaacacacctacacacacgctttccacacatatacacagcacactcacacccatatccctccacacacacatgcataccaccctacacagagaaccagggcctaacctctctatctctcttctatccccgcaaggctcagcctgtgcccactgggagacagagaaaagaatctgaagaagagtaaaatctgcctctacccaccccacccccaattttcattccaagccttaggcagataaatgtacttttccacctgttcattggggtccctgtccagataatccatcgcacaggctccagctctcaggtgaaggcctcaggtgagaggctctttttagatttaagaatccaagcctggaggggaaaccctgtttctagaaagggagagctgtgttgctgacgggcggtgggaagagatgggaacctatggggttgaattcctgcccagtcatcggcgcttggctaccccctgctgggcgggaagctcttggcctcagactcacacattatgctcagggtcaagtctattcccaaggcttgggacagaatccacttacttcctgtcaaattgttatcacacgttcccaacgtgaagctggagtgtgaagttaccttccaatccccaagaggtgtttgttaaagagtttttttcctctgagccctttgtatgccagtttaagcagaacaaatctatttattttttgtgaggatcagtttattaaaagcatgcacataactcaaatcgtatagtaaaatgatgttaggctttgttgagcatgaaaagtgtgctcgctcaaaccccatttccaaccttccgtgcgtcattttcccctgaagcagaacataggttatgttaacaggacctcagcccaaaggcctaaaatcagcttagctcccaggctttctccagccatctcttcccacaacccactctttccacctctcaggaaaaccccagctacatgatgtagaaaactggcaaatataagcggacggggaaccgatttttaaccagatcaagttttcaaatatagattaacacgttttaattgtcctataaactattattcttaaagtcactcttaacaaaacccagacttggaggaagttctctgccataactgtaatgtgtatacactattaagatagttatgaaacctcagacacatttggaagacgtggcttaatagtgcctttaatacaaaataaagtaaaatgtaaataaaaagggattagttgttataagctgtgacacagctgcagcgacagaaactgaagaaacatgtaaacagagagtgcttttagtcactcagtgacccaaatgtctttttcagactctcacaattctaattctgacacactcgttcatttcatttattttgcaaaccaagcagaaatgaaacggaccttcagattaagtaaacaggggctttacatatagccactaagctgccagatagacaacttttggtttacatggagtgtaagggtaaagaaacaatgtcaaaactgcatcccttcttgcatttattggcatgaagtgaaaatccaaatatattcaccaacaaattaataaagggtgaacaggctgctaaccttgcatggtgcgttaaagtgtcagagcacttgaactgcacatcatagcacagcctcagaaataaacaaacatttctctctgtcagaatggggtaaataaattaggatttggctaaatctctggttgttttgctcccatgttgtggcctagaataagccctacactatttccagctgaagttgactctacttgataccttaagcaaatgagagaaaagacaagggtgacagtgtaggaaggaactgacttgagattttcctttcttattagttaacagagttgtcagtgagtgagaatgcaggatacaaattaatgctttttcaaaagccttcactctaatcctattttttccttaatgatccctttgtcaattactgttgtctgggtgtagccttataatagtcatgttcagattgtttaccaaggttgggtgaaatggcaggatgagggtggggggagggaggaacaaagagataagcctatccctgataagcctaggaagctcttaactgaattcaagtaaccctgccccctccctcaatgggagaagcatgccagccttcccaccaagttcttccagatgatactcagtactttaatctctatgcctgctcagcaaattgagtgatttctcttctctaactcttgctatctggtgactccaaccccttttttctttgagccatttcctttttccgtttttcttgaaaagttttcttaaatccatacacattaaactaataaagaaa

SEQ ID NO: 1880617 - DNA, 4001 bp, Homo sapiens
taaacatcggaatgaagaaaaaggtcacaggaatgaatatgaagaaagaaaagaatagataggagagcaaagaccagagagctagtatatgaataataggggtccccagagaggaaagcagaacaaatgaagctgaaacaacaaaatcacagcagaatattttcctatcctgtaaaaataaattgcagttttcagatagtcttgccatgttttgaagcaaaaatacatttaataacactgagcacttaatatattgctagaaagttattatatatattgtttagtactttgataagaaagagatagcaaaatatagtcctttccctcaaggggctaaaaatctattggaaaaagcacataaaaatataattgtttaatatatggcaaagtcagtgatggacataatgtaggtttgttgtagcaccaaagcaaggcaaagtattggttaagggcttaatgtgtctatgggagcaggcatccaagacaatatgagatgtaaataatgaattatgtccaagcactagatgaagggagatggaaagcatagctattcaagacagcaggacaatgtggaggaatatataataataaccagataatattctatgggaaaatacacagtttcttgtttctggatcaaagaaatccaaggtgggagttaagaagctcagggccagaaaagtgggcaaaagtgagtttcaacgactgtgtgtgccatgttgtgaagtagacactttattctgaggtgatagaacatcactgaagagttttttgtagggtaaggaaaattttcatgtgacatgaagcactgtttacttctcagagggtgtactagagaaaaggagactagttgaaaggctattgccaaagtctgggtaagaaataacaaagactcaggatagaagggagtagttacagcagaaaacaggatggatgtgagaaatgttcagctgtgaaaatagaattaagtaactcatggataggctgaagggtaaaatgggtaagaagggctcagtgatgccttctgtatttctagcttgatgactgtgttatgaggctggaacatgatgaacagagaaataaaatgttgcatattaaatttgtaatcctccctaagaggagatgcaaagttattgttttattcttaattttgataattacttaaatataggtttgactgccatttaacaaaatctgaaactcgtcactaggagaattacatgtttgtcaacatgccaaaatcccatagaaaattatttaaaaatatagcccatgtggtcaaatgctgagccagatgaaagagcaaagtggcaaaaacaaaacagaaaaagcacacccagaaagcgtgaaacaggattacagaatttaatataggcagagttttgaaaataaatgtactttaaacacattcattaaaaaaaaaaaactctcaaattgggttaacaatatacaacttcttggatattatggcagcagcctggtcatgcctgacttacctttcatcactttcagttaaacactccaaagtgtccagcccgagataaaagctgacagcaacacagctggttgatgaaaagagaagcccatattcaaattccagtactaagcccgctggcaggacgtttgatgagatgttcccagaagcacaaacttgaccagagaacagtcttctctctggaaagaaattgattgtgaaagtcaccttccaccttccactacctggctgtctcccatcccacatcctggacacgtttcaatgtactctatctcagtcaagggcacagcgatctatcccgtttttatacctggctcctaacactttctgtattagtctgttatcatgctgctaataaagacataccaaacactgggtaattaataaaggaaagaggtttaattgactcacagtttagcatggctgtggagacctcaggaaacttaccaatatggtggaaagggaagcaaacatgtccttcttaacaggagtgcaggggaactaccctttataaaaccatcagatctcgtgagacttactcactgtcatgagaacagcacaggaacctcatgattccattacttcccatcaggtccctcccacaacacgtggggattatgggagctacaattcaagatgagatctaggtgacgaaccaaccaaatcatatcactgtccctttcctcatgcctgctatccaatctgtcagcagttctgagtattttacctccaaactcttttacatttgattgcttttctttctaccaccatcaccatagtccaagctactttcactcctgaacttcttaagcaattcccccacaatctatttcttgctctttcatttataaaggttttcctggagtgccagagttacattacacgtgcatgtcactctttttggcaccatagagaccaaagtactgaacaagacaagatccctggtctgaaagagcctacgttttagttagattgacagctagtgtctgcttgtattacctttcaccaggtaagctacttgctttggggaaaaccaaacaggataaaggctgggtccttcgtgaagaaaagatcttggagaaagtagagtacagagaccatagccgaagtcttggtagaatatggttggcttgaatggggctatcactgggagtcctggaaaatacaaagcagcaaaaaagcagaaaaaaaaatcactaaaattacacaaaatttactggtagcaagcacaatgcatcgtatacatattgttttctttgaaaattttgatctaacaacttttgatctaacactctttggaaactaaaaaagcaatactcacacatgtgtaaatattagatagttaagaatattctttgcagcactactgctgcaagatatggtaagaaaaggattagctcagaatatatttgcagagaagagccatggaatttgaactggacgtggaatgtgagggaaagaggactccttattgaatgaaagaaaggtgatactaaattggtggagctatttgtttgaagtgtgagacttggggaagaagtctgctgcacaagtggaaataattcaatggtattcttggactttttttgataatagagagatactaatattttgtacatatcaacttttgtagaaagtcttaaaatgtcttaatccactttacactttattaagtggagtctaatgaagaaattgagtatttattttctgcctgatgctcttgcgagtcattatcgttgttctgaatatcagttgtcactattcaggcctctgacatgagatatgcaagatgaaggagattctagacaaatagaagaaccacagtgcttgatttcaaaattttcaaagaaaacagtatgtatacggtgcactgtgcttgctaccagtaaattgtgtaattttagtgatttttattctgcttttttgctactttgcattttccaggactcccaatgatagcaaaatctgtgggtcctcaagtcccttgtgtaaaatgatgtggtatttgcataaactatgtcatcatctcatatattctaagtcatctcaagattacttaaaatacctaatacaatttaaatgctgggtaaatagttgttatactgtattgtttcaggagtaatgacaagaaaaaatgtctgcacatgttcagacagatacaaccatccatatttcttctgaatattttcagttcacaaatcggttgactccaaatagatgtggaacccatggataccaattgactattacagtgtaataattttgtgtgcttattcagctataatatgtaaatacatttttcactttttaagatccaggtactacttaaatattcagaatcaagatatgaaagtgcttcctaagactctccttcagatacccatgtcaggaaattcagatgttcacatttcactgtatattgttctggggattttccccatgccttcaaatatgtctatcatgtcttcttaagtttttctaaatatctgtatctacacaaatatat

SEQ ID NO: 1880618 - DNA, 4001 bp, Homo sapiens
gtttatttaatgctgactgtatatcagttacattgtgagatctttgggggttcacagatgaaggtggcatgagtagaatcagcatccactctagctgcttccagcataaccagggtgaggtgctccagcaggccctggagctgtttccagtgtgccaggtctgctctaagagaatcagtccactggccgaatctgaaactttggcagcttcctggtgccaagagtaatgtagcattgtgtatgtcactggagagtgtaagaaacaatgtttaattcagttataaattattctagcaataagcattcgcttataatgacctgtaaccaaagcaaacttttttttctcaacctgtttttttgttgttgttgttgtttgtttgttttttcagccattaatatgataccttggttagataatccagattcagtcaggttagtgacctgggcatataattgggagaactgaagatgcatgattgtgatggttgatactgagtgtcaacttgattggattgaaggatacaaagtactgatcctgggtgtgtctgtgagggtgttgccaaaggagattaacatttgagtcagtgggctgggaaaggcagacgcaccctcagtctgagtgggcataatctaattggctgccagtacagctagaatataagcaggcagaagaatgtgaaaagagagactggcctagccttctttctcccatgctggatgcttcctgccctcaaacatctgactccaagttcttcagttttggaacttggactggctctccttgctcctcagcctgcggatggcctattgtgggaccctgtgattatgtgagttaatagtaaataaactcatatatatatatatatatatatgtgtgtgtgtgtgtgtgtatatatatgtgtatatatgtgtgtatatatatgtatatatatgtgtatatatatgtatatatatatgtgtgtgtgtatatatatatatatatatatatgtatgtattccattaattctgtccctctagagaactctgactaatacaatgattaaatatataattgacttctttagaactgggctaattttgatcaggtgttttctgtgttttaaaaatccagttaacacacactaacagctacttgggaggctgaagcaggaggactgtttgagccaggagttcaaggcttcagtgagctataattgctccactgtactctggctttggtgacagagcaagaccctttctctaaataaataaaataaaataaataaaaatgtatgtgattattatgcattgcattcctatatcaaaacatctcaataaatatgtacacctactatgtccccacaacaataaaaaaattaaaaatttaaaaaattcaattaacacatctgttttataaacataagcatggacaaaatctataaaaataagtaaatattctggagagtcatgcacagatgtagcagttcacatgggaacaggaaacaaattccaatttatctaacttcctctcaccccgtggaaggtgctaaaccatagtcagagctctgggctgtgaagagaaaattgatttcagttttcgaattcaaaagaagaaaaataatttgatcttaattttagtgactggatgaaaataaggcaatacaaagtataaaatactagtgaggcctcatttataatttgacagacaacctgtagggaaacacattgctccttttgattctcaaatgcaaaaaaggatacactgggtgccttgagttggtcaaattatctcatgcaaagtgtcatgtattaagccacagtggtttaaacactaaggctccactcaccatctgaagaacctggaggtatcttcttctttggaatgttcatgtgctcacatggttccgggatattggcaaaatcaaaaggagtaaccttcaacactgacattcttttatattttcatcttatttttacgctggggtggacttgttcattcctcttccacccccagtcagagtgaagctctcccagttttgcagacagagtctctctcccacttggtcataccatctgtttccacattgcagtttactctacatgaataccaggtagcagacaggattttgcccaatagcaagtacagcaaaaagtctttcacaggctcctcacaatctgtgaacatatgatcagtctaggataacacattgtactaaaaatataccagagaaatgttcatgtggtaataaacaaggaacctgaatcaaggaggaaacatgccatgagcttctgaagtgtatatttctctgtgtaccagaatgatgatggtctgtcaatgggagatgactggatcaactaatgtttgtttctttattgcaagtgttaatgtacatttaacagtgtggacatagtgtgtttggtctaaaacccaaactgtgagttaaatgagagacagtctacaagtatttatcatgaggtggttggtttgataaacagaaatatatgtaatttccatgataatttctgaaactgcacagtgacatgataaggaatatctcagcaagtctgagagcacaaatttaaaagaaaaaagatggtgtcctatattttatgctgcatcattctttccttattagctatatcatcattttaatagaacttgacaatactccccaaatgttagatatctatattatagagaccttatgaagactgattgtcagctcatgcagaaaagacttgtgcggacttttagtatctcattttattactggattctggaaactgattttctgtgcttcgaatttgtaacttgctttaatttatctgatagtcataatacatttttattatttagctaagttgaactttatctcatattgtacctgttcctcacctctcttattttcatttctatttgctaggggaggatgggaatgggaagtcagatgtcttcttagattgggcaaatgattatgtctgggattgaattgcacaatatagatgtggatctaaattctgcatctgcatttggtacaaccattttggttctcatactaatcataaatgtttagaactccaggtggtatctgctccccttggtgcttgaaagcaatgggaggtagtagcgataacaacacgctaaacatcagaaggctggtgttcacacttgggccttcccttctgtgactatatggctttgaaccactgatttaaagtctatatgcctcatctataaaatttggaaaacaatacacatgccactgtgctgtgctccaataaaacgcctggtccataacatcccttttttgtatctgtataatcagttgacacaaataacatattcctcactgtcttccagttcactgttttacgtatggatctaacacagtgtgatgggttcatggttccagaggcctgattaaatttggcctcatttactagctgggtgatgagaacctgtcagttgaattgttgtgaggattaaacatatattaaaatagtatctaacatataataagtggcttattaagattgttgtttttaccatgtataaatgaagatttggaagtattgcttccacaggactggtcactttgtttcttcagatcatcctcaagcattgattgtgcaaaaagaaatctttctctagctcccatgggtaaagatttcaaccagtcctctgttgtctctgcatgctgctcacgtattcattccatcacatttcattgtgaatatcaattgtcaggtctgttttctccactggactttcagctactcaaagacaagggcatacatattcttttatttctctcagtgtcattggatccaggttttgctggcaaacaaatacctgataaatgctagtttgatataatcgtgattgaatggaagaaactgatttattcttttatgtttcccctataaaagtatgttcttaatctgtgatccatggatgtgcctgggctggtgggtgtttgtgagccatctcacgttgtttgcaaaatttgttaccttatac

SEQ ID NO: 1880619 - DNA, 4001 bp, Homo sapiens
agttaattttcatttagctatttattttattttatttttgagacaagatctggctttgtggcccaggctggagtgcagtggcacaaccacatttcactgcagcctcgacctccctgggctcaggtgatcctcctgcctcagcctcctcagtagcagggaccacaggcctgccccatcgtacttggctaatttttttatttttagtagagatgggttttgccatgttgcccaggctggtcttgaactcttgggctcaagcaatccacctgccttggcctcctaaagtgctgggattacaggtgtgagccaccgtgacaggccttaactatttatttttacttttaattatttacttattttcagacaggtctcattctgtcacccagggtggagtgcaatggtgtgatcacagtcacttgcagccttgacctcccaggctcaagtgatcctcccaagtagctgggactacaggcgcacaccaccaggcccggctaatttttgtactttttgtagagatgaggtgtcactatgttgcccaggctggtctggaattcctggactcatacaatcctcccaccttagcctcccaagtactaggattacaggtgtgagccatcacacccggctccatttagctatttcaaagtaatgtgcaatgtaatgaggcaaccacaccatcttagcaggctgaccaatgtggtgtggggtggggtggggttggggaatgcccaaccccagagtgagagatgaggtaggagcctctgcttgggagatgccacacagttggtcaggagactggagcagagtgacgagcagggacagcattccaggcacagggcactgctgggtcaaaggcaggacacctggggcagcaaactgtcccagaacaaagcgtacaaagaaaagactgcgccctcactttgggcttccctcttgcatgcactcccacagcggggcccgtggagggaagatgcatctttggaagcagtgagcagcagaggccacccagttgctgtcgatgagggcagctccacagatgtgcccgcctaggtagaggagactggcctgccatggccaccgctaaggctcagccctctggcctccaaagatcttcccggtgggcctcccggaggaattgccgctgaatctggccttctcacacactgtggagacagcccagcaatgaggtgcctgcacgaaggacgccagccagccccgggtgcccccaaatatcaggatcaacaggactcggggccaccaggcccctcctctcacttcacaggagggacaagtccaaggctcaggttgaagccacgtggcccatgtgacagcaccacctggatgacccgggagcacacagcccatggccccctgtcaggggcgacggcccgtggggctacggggtgagcactgggcccgacttttcccaggcctcaatgccgtttgtgatggcgcagaagctgcctgctacagaagggatgtactgctccactgcgcggcccctaagcggcagtgccctcccttcccggcccagtgttctcccagactgaagcgaacgagagacagtccgcgcacaatcccgtctgcagtagcatttccccatcctggaaatgagggtgtgtggggcgctggactgtagaggcctgagatccaacccggcagagccagcgggggagcgccccgccctctcccctccttccaaaggcgccttcctcccagggcccggagagccagacctggcctggctgggccctcctggcgggtgtcctcatcgggcggagggggacggccacgagaggcaggcgacctctgctcctcgctctgtctgggccacccctgcccgctcacctgcagagagggacgaggtggactagacgcgcagcggcaggaggattggccagaggagggaggcggccagtgcgcagtgcccccgccggccctggcctgagcgctctgcccctgcttccctcatcaggccggtggcctgggcgtccccgacggggcggagagcgcggggcgtggccaaccgcggggctccaggaaaacgcctgcgtccatcaggatgctgggactggatctcgcgcggcgggtgcggggagcccaggtcggtaggaggcaggggtcgctggaaacccccagagcatcacagggcccctccctccaggaagtccactgtgcaggggagacatgaaggcaactatggcccaagcccagaaatatacagtaatgatgagagggcaagtgcttacatcacgtcatcaagcatttccagcttgctttccgagttcaacccactcctccataaggacgccggctcaagggattaggtcaggcccactagggacaatacaatatccttttcttaaactccagcatacaacagtcacgagagggctgtgccatctcagtcacaggtccctccacactcaacaggagggtcatagacaacagctgagtggcagcgagtcatcttagaattctacctaacacagcccaacctccggcctccagtgacgcatgtccctcccaatccccaaaatgcattcagcatacctcaaggttaccaagagcctcatcctgttactggaaaggggccgattcagacatcaagacaggattcttggatcttgcagaagaaagagttcgggcgggtccataaagtgaaagcaagtttattaagaaagtaaaagaataaaagaatggctaccccataggcagagcagtcctgagggctgctggttgcccatttttatggttatttcttgattatatgctaaacaaggggtggattattcatgggttttcagggaaagggatggacaattaacagaactgagagttcctcccccttttagaccatgtaaggtaacttcctgaccttgccgtgaactgtcatggcactggtgggagtgtctcttagcatgctaatgtattataactagtatataatgagcattgaggaccaccagaagtcactctcgttgccatcttggttttggtgggttttggccggcttctttaccccaacctattttatcaacaagatttttatgacttgtatcttttgcctacctcctatctcatcctgtgacttagaatacctaacctcctgggggctggccacggtgactcacacctgcaatcccagcactttgggaggccgaggcgggcggatcacctgaggtcaggagctcgagaccagcctggccaacatggtgaaaccccgtctctacttaaaatacaaaaattagccaggcatggtggcgggtgcctgtaagtcccagctactggggaggctgaggcaggagaatagcttggacctgggaggcggaggctgcggtgagccgagatcacaccactgcactccagcctgggtgacagagctagactttgtctaaaaaaaaaaaaaaaaggccaggcgcggtggctcacgcctgtaatcccagcactttgggaggcggaggcaggcagatcacaaagtcagtagattgagaccatcctagctaacacggtgaaaccccgtctctactaaaaaatacaaaaaaattagctgggggtggtggtgggtgcctgtagtcccagctacttaggagactgaggcaggagaatgatgtgaacccgggaggcggagcttgcagtgagccaagactgcgccactgcactccagcctgggcaacagagcggtgagactccatctcaaaaaaaaaaaaaaaaaaaaaaaaaaaatgcttaacctcctgggaatgcagcccagtaggtctcaacctcattttaccggcccctattcaagatggaattgctctggttcgaacgcttctggcaatctcattagagtctcaacttaaaattcaaaatctcatcatctaaatctaaatagaattatctcatcagctcaaaatccacaatctcatcatttaaatactccaaatagaatatggatgaggttcccagctgtaatctgctaaacacagcccttgagtacaattcttcctcacctgtgg

SEQ ID NO: 1880620 - DNA, 4001 bp, Homo sapiens
gagttaattttcatttagctatttattttattttatttttgagacaagatctggctttgtggcccaggctggagtgcagtggcacaaccacatttcactgcagcctcgacctccctgggctcaggtgatcctcctgcctcagcctcctcagtagcagggaccacaggcctgccccatcgtacttggctaatttttttatttttagtagagatgggttttgccatgttgcccaggctggtcttgaactcttgggctcaagcaatccacctgccttggcctcctaaagtgctgggattacaggtgtgagccaccgtgacaggccttaactatttatttttacttttaattatttacttattttcagacaggtctcattctgtcacccagggtggagtgcaatggtgtgatcacagtcacttgcagccttgacctcccaggctcaagtgatcctcccaagtagctgggactacaggcgcacaccaccaggcccggctaatttttgtactttttgtagagatgaggtgtcactatgttgcccaggctggtctggaattcctggactcatacaatcctcccaccttagcctcccaagtactaggattacaggtgtgagccatcacacccggctccatttagctatttcaaagtaatgtgcaatgtaatgaggcaaccacaccatcttagcaggctgaccaatgtggtgtggggtggggtggggttggggaatgcccaaccccagagtgagagatgaggtaggagcctctgcttgggagatgccacacagttggtcaggagactggagcagagtgacgagcagggacagcattccaggcacagggcactgctgggtcaaaggcaggacacctggggcagcaaactgtcccagaacaaagcgtacaaagaaaagactgcgccctcactttgggcttccctcttgcatgcactcccacagcggggcccgtggagggaagatgcatctttggaagcagtgagcagcagaggccacccagttgctgtcgatgagggcagctccacagatgtgcccgcctaggtagaggagactggcctgccatggccaccgctaaggctcagccctctggcctccaaagatcttcccggtgggcctcccggaggaattgccgctgaatctggccttctcacacactgtggagacagcccagcaatgaggtgcctgcacgaaggacgccagccagccccgggtgcccccaaatatcaggatcaacaggactcggggccaccaggcccctcctctcacttcacaggagggacaagtccaaggctcaggttgaagccacgtggcccatgtgacagcaccacctggatgacccgggagcacacagcccatggccccctgtcaggggcgacggcccgtggggctacggggtgagcactgggcccgacttttcccaggcctcaatgccgtttgtgatggcgcagaagctgcctgctacagaagggatgtactgctccactgcgcggcccctaagcggcagtgccctcccttcccggcccagtgttctcccagactgaagcgaacgagagacagtccgcgcacaatcccgtctgcagtagcatttccccatcctggaaatgagggtgtgtggggcgctggactgtagaggcctgagatccaacccggcagagccagcgggggagcgccccgccctctcccctccttccaaaggcgccttcctcccagggcccggagagccagacctggcctggctgggccctcctggcgggtgtcctcatcgggcggagggggacggccacgagaggcaggcgacctctgctcctcgctctgtctgggccacccctgcccgctcacctgcagagagggacgaggtggactagacgcgcagcggcaggaggattggccagaggagggaggcggccagtgcgcagtgcccccgccggccctggcctgagcgctctgcccctgcttccctcatcaggccggtggcctgggcgtccccgacggggcggagagcgcggggcgtggccaaccgcggggctccaggaaaacgcctgcgtccatcaggatgctgggactggatctcgcgcggcgggtgcggggagcccaggtcggtaggaggcaggggtcgctggaaacccccagagcatcacagggcccctccctccaggaagtccactgtgcaggggagacatgaaggcaactatggcccaagcccagaaatatacagtaatgatgagagggcaagtgcttacatcacgtcatcaagcatttccagcttgctttccgagttcaacccactcctccataaggacgccggctcaagggattaggtcaggcccactagggacaatacaatatccttttcttaaactccagcatacaacagtcacgagagggctgtgccatctcagtcacaggtccctccacactcaacaggagggtcatagacaacagctgagtggcagcgagtcatcttagaattctacctaacacagcccaacctccggcctccagtgacgcatgtccctcccaatccccaaaatgcattcagcatacctcaaggttaccaagagcctcatcctgttactggaaaggggccgattcagacatcaagacaggattcttggatcttgcagaagaaagagttcgggcgggtccataaagtgaaagcaagtttattaagaaagtaaaagaataaaagaatggctaccccataggcagagcagtcctgagggctgctggttgcccatttttatggttatttcttgattatatgctaaacaaggggtggattattcatgggttttcagggaaagggatggacaattaacagaactgagagttcctcccccttttagaccatgtaaggtaacttcctgaccttgccgtgaactgtcatggcactggtgggagtgtctcttagcatgctaatgtattataactagtatataatgagcattgaggaccaccagaagtcactctcgttgccatcttggttttggtgggttttggccggcttctttaccccaacctattttatcaacaagatttttatgacttgtatcttttgcctacctcctatctcatcctgtgacttagaatacctaacctcctgggggctggccacggtgactcacacctgcaatcccagcactttgggaggccgaggcgggcggatcacctgaggtcaggagctcgagaccagcctggccaacatggtgaaaccccgtctctacttaaaatacaaaaattagccaggcatggtggcgggtgcctgtaagtcccagctactggggaggctgaggcaggagaatagcttggacctgggaggcggaggctgcggtgagccgagatcacaccactgcactccagcctgggtgacagagctagactttgtctaaaaaaaaaaaaaaaaggccaggcgcggtggctcacgcctgtaatcccagcactttgggaggcggaggcaggcagatcacaaagtcagtagattgagaccatcctagctaacacggtgaaaccccgtctctactaaaaaatacaaaaaaattagctgggggtggtggtgggtgcctgtagtcccagctacttaggagactgaggcaggagaatgatgtgaacccgggaggcggagcttgcagtgagccaagactgcgccactgcactccagcctgggcaacagagcggtgagactccatctcaaaaaaaaaaaaaaaaaaaaaaaaaaaatgcttaacctcctgggaatgcagcccagtaggtctcaacctcattttaccggcccctattcaagatggaattgctctggttcgaacgcttctggcaatctcattagagtctcaacttaaaattcaaaatctcatcatctaaatctaaatagaattatctcatcagctcaaaatccacaatctcatcatttaaatactccaaatagaatatggatgaggttcccagctgtaatctgctaaacacagcccttgagtacaattcttcctcacctgtg

SEQ ID NO: 1880621 - DNA, 4001 bp, Homo sapiens
ctggacaccacagggagctggcgggaggactggggagttgggcagggccttccaccagggtggttcgggactccctgcacagcactgaggtctctggtcccctcattagcccagcctcccgtgggatcatagacttgaaccctcaagtcactgcagagcccaagagtggagagacacagcaccgtgtgccgggaaaaggtgcccacaggggcccttcatggctgaggcttccagagggtagtgggacggcaaccccgctccccaccagccgcccaccacagcattcatgatacagcttcggagtgtgggtcggggtctatctgggaaaccagggcaaaggcggtggcagctggcagcacccacacccacagctggggcactgctcacatgagcccccatcagcaggccccttggttgtgccacaggcaggggtcctgccccagggagggggtagtccgtgggggggggctcgagggtgtggcacaggccagctgtcactcctccctggagaggcagctggggacgcagctgggaggggagccaggagcagagacagcccggggccagcaggtgggtgacaggtggggcagcgggaggggcacgtgctgtcctcctggggctggggtatagagacgggaacctgccccccaatgcctggtgctggcccagcctccccccggggcctctagcaccttcccagttgtgtctgcaccctcctgggcgtggcgggggagggtgggggtcaacccctttccttgtagtcccgcgccagtgggcaagggagacgccccagtgagcaggagcctagcctctctgcctggggaggccaggtgatgagccacccggagtgggaggaggccttgaacttgggtctgaaagatgagcaggggtttgctgggccgggtacaggcaaaagctaatgcaggaaggcagagagcaggagcgcttagagggagtggctctgtgcagccggagtcagatgggtgaccctcactcaggaggaagcactgggaccctctctcctcacgctgggtcccccgcctccctctaggatccccacacccaggtccttctgggcctctgccacacagatcaggtctggaaggctccctggaggaggcggcgcctagacttggacataggcctgcagagctgatttctctcacaaccctgggaagacagaactcctcagcgggttgatgtggaggagagcggagcctccctccaaggcaccagtccagtgctgggggcgacacagagagccagaagctggcgggggtgggaggctctgccccccaagggctttacatgccgaagccccatggccgagctgggacccagggtcagcccaggcaggccgcgagaaaggagactgtgggccccaccccatcacagagggaggaggtgctgtgcccgctgggggggcagctgcccctctctgggccctttgggtgggaagaggcttggtgaggtagaaagcccagcccctgccagcagcgttgccttctcacagtggcagccctttgtaacccgggggggtccctgcagggcctctccctgtcttctcaccatggggcagcatttgggggcctcttgagggaccccctagatgcttctactcagagcccccaaagccaaggagcctccactcctccgtctgcagcctcccctgccggttcttgctacccagggttcagtggcctgggggctgacagagggggtcgcctctgccaaggcccctcccggcgcctccctggctcatccagcccaccttcctcccacgctggctcacgcaaagtgctctggtcaccaggagcccttcctgaccagccccggccccttcttggccttcgccccacctggcctcccctggatccctgacctgggtgccgggcctgctgggtccagagcccaccccgccctgaacaaccccgagcctcagccaccctcaattcttaccctttcacagctggggagtggagtctgggcctgaggtctcccgtgcgcctctcggcgcctgcgcccgcgctgtgcaccgccccgcgcctgcgcccgcgctgtgcctttgcgagggcggagctgcgttgtgctcagcacagactcggagagcatcgcgagggcggagcagtgttctccttggcacagacccgggcgggccaggggcaccgcgagggcggagctgcgttctgctcagcacagaccagggggacaacgtgaaggcagagcagcgttctcctcagcacggaccttgggggcactgcctcgctttgggacaactcggggccgcatcgacggtgaataaaatccttcctgtttgcagccctgaataatcagggtcagagaccagttagaagggttcagtgtggaaaacaggaaaccaaaagcccctctgaatcctgcccaccgaggttctccccagccaaggtgaggcggccacagtgcgagatccacaccgcagcctcggaagacaaatgcagcattcctaatgcagacatgacactcaaaatatgacaccccccttgctcatgtaacaagcacctgtagtgctaatgcactgcctcgacacaaaaacattaatataagatccacaatcccctcgctgccgtgcagtcctaagacagcgatcataataatcaacattgacatagtcaatacaaacgtagtaacgaacctagggttaaggttggtgttaggggttaagtttagggttaggggttggagatagtggttggggtcagagttaggggttaggagtcaacatttagagttaggggttaagagaggttgggggttagggattaggggttagggttgggttagggggagggtgagagttgtggttaggggttagggttagggattagggttaaggttaggggtcagggtcaggggtcccactctgttggctatttactctactgactgttccctttgccatgcaaaagctctttagtttaattaagtcccagctatttatctttgtttttattgcatttgcatttgggttcttggtcatgaaatccttgcctatgccaatgtctagaagagtttatccagtgttatcttctagaatttttatagttcaggaattaggtttaagtttttaatccatcttgagtagatttttgtataaggtgagagatgagaatccagttttattcccctacatgtggctcgccaattatcccaacatcatgtgttgaaaagggtgtcctttccccactttattttttgcttactttgtcgaagatcagttggctgtaagtatttgggttaatttatgggttctctcttctgttacattagtctatgtgcgtatttttaaaccagtaccatgctgttttggtaactatggccttattgtacagtttgaaatcaagtactgtgatgcctctaggtttgttctttttgcttagccttggttgggctacatggctctcttttggttccatattaattttagaattgtttttgtaattctgtgaagaatgatggtggtattcagatggggattgcattgaatttgtagattgcctttaacagaatggtaattttcacaatattggttctacccatccacgagcatggggatgcgtttccatctgtttgtgtcatctatgatttcttttctttctttcttttttttttttcttcagagggagtttcgctcttgtcgctgaggtgggagtgcaatggtgtgatctcggctcactacaacttctgcctcccaggttcaagcgattctcctgcctcagcttcccgagtagctgggattataggcatgtgccaacatgcttggctccaactatgatttctttcagcagtgttttgtaattttcatcgtagaggtcttttgattcctttgctaggtatattcctaagtttttttttttttttttttttttttttgcagctattgtaaaaggggttgagttcttgatgtgattctctgcttggtagctgctgatgtatagaagagctactgatttgtgtacattaat

SEQ ID NO: 1880622 - DNA, 4001 bp, Homo sapiens
cactttaaaatggcagtgcttctgctctgtcaatagtaggatatgccaacccaaaatatggcactttggcataaagattattttcgagtcaaaggcacttaaaaaaaaaatgcaaaaagagcactgtggctttcctttttccttcctgaaagcaggagataaaacttccgtatgaaaggtgccctccctgtataaggaggaagggagatgttctcaacaccagagacatggagtcaaagctgagctgtatctgcacaaacttaccgattttcatttccactttgttacaacaacctttatcttcttagtcacttctgcattaactgcactaacccaaatctgtttgttttctcacattttcacaatttactactctttttagccttccctagaaaaatggagactcaaaagcacttagggtccaactgttaatttgggtctccatttttctagggaaggctccaatgtaaatgtaaaaattactaaataaaatttgtatgctttcctcctgttatgttttatgtctctattttacgtcagtggagactaagctctgattttttttttaatcttgctcaaattcctatctaaggggcctagggattcatgccctacaatccataaattctcatcagatgggttttatttaaccctatatattgtgacttactttccaatctgacactggcataacgagacaagaaacaaaatcaaaatattttaccgcaaaacattttttttagtttttgacatatcttgaaacggctctgcaaagctgtcctttgttgggggaaaatctgcatctacatagaatttctattaacatagctagatcattttcttccaggtcctcccaatcctaaagagattacgtaagaatctagcaccttttaaagatctgaataggaaacatttgtcatccattgtctctaagggcagccactataagacttcaaaagaaccttggtctccacaatcttttattttaacctcaacatttcctttctatgggtcccaggtcttcaactgtcaaccagaaaatgtttaaatttacctacagccttggaagcccctgctttgagttgtcccacctttctgaaccaaaccaatgtagttcttaaatttatttgattgatgtctcatgcctccctaaaatacataaaaccaagctgcgccccaaccaccttggacacatgttctcaggacctcctgagggctctgtcacgggccatggtcactcacatttggctcagaataaatctcttcaaatattttagagtttgactcttttcctcatcagtttaattcttaggcccagccaagaccccaagaggggagaggaaatattttcactttccctacaccagtgttaagaagcccaagaacgcaattcagagggcttcccaaatcattttgaagaatggtaacatctctagaatatcaattagatcgtaggggagtacataagtcatgtgtacacctttaggtgtttgtgaaaaccaaggcatataaaatatcacattatttggcctcagtacattcccatactgacaagcactgtaccatttttcccccgctctaagcaagggcttcctggggggaagagtctgtggttgggtgttcagaagcagagagtgctctcccaaagctaaacgatgccgccaactactgtgaaacttaacttcccctctcccggaattctcatggaagacaaggtctgatcaaccgagggcttaagaagtatcaaattggaactcatggaatcactggcggagctgatttacatatgagaattcctaagcctcacagcatagaaattttcatgccagatggtcctgaaaaagttgttttaattggctaccaaaggtttaccttgcaaacaccaagttcttaaagattacaaaatctaataaagccgaagtgtgaattaaacttaaccgcaagaggagtcacctgcggtcacctcgtttcgcccacaacaaagatgtctgcgcatcgcttaccgtggagccgttccagtgcgtgggccacgcgtccgcccttttccgcgtcacatgaccacgaacactcttccgctacggctcccagaaggggccagcccgcgcctttcgcgcttctgccctggccctctgcgggccgctccgccggtgctgtccctgggcgcctccgtgctctcagccaaccacctctgagagcgcccactcgagcgccccgggagccagagggcgggggtcctcgccgggaccctcctgtgggcccaggggtgagtgttgacgtcttcccgacccgcgacctgccgcccgagctggctgccaggcctatcgccgccgccgagaccctccggccaacagggacccgcggtggccccggcccccccggtagtgtctccctgacccgagtcccgtccccgggcctcttgccttcaaccctggtctttcctcctccccgggaccttgagtccccgaggagagcgagggagaggagcgtcttctgcaggtgtttttgggcgaacctcttcaccttgtgtggttcggcgtctccttttgtgtattaacccggacttttccgactggaaaataggggtttgggaagcagcgggagtcccgtgagcgtgaacgccgggctttgcaggtcttcactcatccttccctgccaaggccctgacaccttacaggctgaccttaaacctgccttgtttaaaaggaggtttttgtgttgttttgtggcaagtacattttggaaaagaagggccttgttggaagcccaggttgtggcatcgcgggtggctgcgggccaccctgtccgtctgtgagcatccctgctcgcagatgtggctgcaggcagttgctctcgggtttccttccaggagctgggaagccggaggaaagctgcggttcctgttccgccgagcttctgaccttcctctgcaggacgtgtgctactattactatcgtaaaagaacacccctgtctacctcccacaaagttagaagcaaagggcattctcgagggaagagcaccctttcaaaagtgacatgttttcattggagaacattaaaggggaaaaaaaaaaaaaaggtttctggcccttctgcccaaatatagaaccatttgtattcaggcctctcatccaccgagagacttaagatgatcacaaatgttttgtctccctgcgtgaaaaacattttttctgcctcaattccgttggctaatgagagcccaaaagaaaaacccttaggaaaattaggacgatttagttatacttagtagtcttttcccatgcaattaaattgcttgggggaccttctatcttttggtttcaaaggcttgtatattggttttgccattttttccaaaaggaaattgtgttctctcccttcctgtctgatagagctgcctcctttcagaattgcaaagtttagtcttcgctctcctctcttctggtattgaaacttttctgtgggttcataaccttattttaaagttcattaatatatagttttaaaagtttgcagtgactttttaaatatagtttctttgaaaaagaactgaaacagggtgtgcagagtggcccatctgtgtgaactaggtccacgcagtaggtaataaacaactggagggttttttttggtttgtttttgtttgtttgtatgtttgtttttgaaaagtacataaacatttgcaaccacagtcagtttgactcaagttgtttcggtgacttccgaggctttctgggttccagtgttctaatacagaaaatgagaaagttgggctggaatcattgtgtcccaaaattggtacactttccgctagtggcatgtgacttgactctaggcggtacgtggatgaggatttttttgtaataggatgtttttgcaatctgtatttatatatgtacagccatggtttaaggtagtgatacaaaattttcttttacaatacttttttgattttaaaaagtcgagttaaaaaaattaactgtagcaaaaagttaatgtactc

SEQ ID NO: 1880623 - DNA, 4001 bp, Homo sapiens
attttgggatttgcaaatacaaaaaaaaactagaaattactcctgaaaattattaaacttttaagagcaagcactcaaagggtgtagcttgtataatttgcaaattttaagcacattttatgccaacttatttcagacagcctacaatgattaactattttaaatcttcccttaatttctatttcatgtggtaggacatgtgggtggggtacttcagtagaaaatgacttcatgaagttcatttgctggtggaaactcttggcatgagagactcagaacaaaaaaaaagtctttccttcaacaagcatattttttctttacaataataatggcaaacatttattagagcttactataggctatgcattactctaaacaatctacatatgttgtctcatttaatcctcatgctgtcctccaagatagaaaacattattcttgttttacaagtttcattatctattttatagatgaagacactgaggcaaagagttcagtggagctgggattcaaaatgatggagtctcactccgggatccatgctcctacccactatgtttataatagcagttcctgaaaaccctattaaaacagatgccattaaattataagccttttaacttttttttttaccgtctattacagatcactaatatgatttcaagtaatgatgaatctaaatataaaggcactaaaacaaggaaaacaagacaggaaagaaaactctaatccattttaaaagaccacatgtgtttccctatttgttttgcttaaaagtgtggacaaatttgatccagaaaggacatttaaaaaaatggcacactgagggctgagagtcagaaataagatttactgtaaggacttacagataatcacagattcctcatgggaaaggtaaacatgtaaagacgaggagaaaacagaatatgaaagagtaaacgtcttttttgattagggccggatggtaaggatttggaggcagcaagagacagcttcataagggaagaaatggttctctagattctttagtcttcaaaatgagtttgaatagacccaaggacagaggtggaatctaattgagaaaaaggtcaaattgagcttactgtgaggggaaggatgcaaaattagtgtctgctgcaagaaaaataagcatggaaagaaattaagggaggagacagagacagagccagagccacagaccaggagtagggaaaaaaaggtaagcagcagacggggcagagtggcctggaggaatgaggggtcacacctagcaggtgcccaccggcgaagaggcaagggccgagcccggagggcaaacgccggcaggagtcgtccccgaaacaccttgcccagcgaggcggacacaagctcgggcctgcaagacggcccaggagggtgggggcgggaaggggtcgcagaaggtgggcaggggaagcggctgaggacacgcgatgcacctgtgggcggtccccgtgcccacctgactcgcccgcagctccctgaatgaaccctccacacccgccggccgcccccagaccccacctgacgcgcccgcggcccatcgtcccttcctgacgcgcccgcggacccagacctcagcagacgcgcacgcggcaatcccgtccccatctgacgcgcccgcgacaaccccgtccccacctgacgcgcccgcgacaaccccgtccccacctgacgcgcccgagacccccggtccccacctgacgcgcccgcgaccccatgtcttcccctgacgcgcccgccgcccccggtcttcacctgactcgcccgtggcccatcgtccccacctgacgcgcccgcgatccccaatcttcacctaaggcgcctgcggcgcccagtcttcacctgacgcgcccgcggcaccccgtacctacctagcgcgcctgcagcccccagtcttcacctgacgcgcccgcgtcccccagtgcccaacgggcgcgcctgccacctgggccggcacctgacggcgaccaggcgattattgccggaagtgggccaccgcctctcggcgcgcctcagggaagccccgcccctggccatgctgattggccggcgcggattcgcgtggcagtgttgctgccgggtcctgacgcccgcagcgtgcgcctgcgtagtaggcactgccccgccgtccgcgcgcgcccagagtgccgggcgtggaggtgtgggggcgcgggggcgcgggggcgcgggggcgcgggggggcgggggcgggggggcgcagggacgggcgcggtcagtgcctgagatccctgcgatcgctgggagatgacggtgaagacctgagatttaggcctgcgcggcgggtgacgacgccggtccgggtcttcactggaggacgctggccggggccttcaggtgttctcgtggcctgaggacgcgcgtccctgagaatgtgcgtgcccgcgccgcgcgggtcccacaggagcctgggcagccccgccgccgcatttccaccctgcggccgtatttccacccgctgggcgccaagcccgggatgactgcactctagggcatcactgcgcgctcacactcagcattcaggcacaagcacgttctctttataaacagtttcgaatcttgtcgagtctttctagaaggttgaaatgccctggaggagcagcgtgaatagttttttccaattaggaaaaaagaatgtggggcggctggagggagagaggcaggccgagaaggccaggtgcgtccaggagccgcagcccccgtgcctcagtttcctcctagaaacatggaggtggcggtgcacgctacaggatttctgtaagaacagatgagttaacgtgtgcaaaacatttaaaacagtgtctggtgtgtagcaagcaaatatgagtattagtcttttccttgttaaaatgtgtgcatctacatttggtgcacattacaggaagtgtatagtatggattcatattttggaaaagtaattttagaagttatttctgatgtgcttattgtaatagtgtttcttgaccacatgcttttagataatgtgaaggcaatgaagcaggcaatattgcttgcacatccccaatttaaacacctgtctgtccctccttccctctctcctttcttttcttccttaccctctctctttattccttccttcattcccttcaaggttgcggattattccattatataaatgtatcaatttattagaatagtttctatgatgtctatgatgggctttagattgtttgcaatagtttgccattacaaataatgcccagtagtgctgtggtttgatttaacttgtgaaggtatatttccaaataaatcgctatgattggattgttgtgtaaaccaaaaagtgtctgaggcagatcacaactgatatagaggtttattttgccaaaattgtggatttgcctggggaaaaagaaacacaggttacagtaggatttttggcctgtacttttttccaaatatttaagggaaaagcgccggtaggaggggaaagaggggagagtaggctatgaggcaagtggtcacatttttgtgaggctctgattagagtacagcaaatctacatttcacatgtgaaaagaaaggtatgggggagggttatacatctgtctcatactcagtagatctacatttcacataagataaagtaagcttttgggaacaaaaagaaggcatgtatgtgtgtgtgtgtgtgtgtgtgcgtgtgtgtgtgtgtgttgccaatattaacttttccctttggcatagtaagtttggaggcctgagattttatttttctttcactgatgtgtcaagattaactgcatatggaatactagtagaaattgccaagccaagaccccaccaccacaataggggacatagtaatattaaatttagcccaattggccagcatccacacaattcctagtgaaagaattcctggctggatggtaaagaggtaaactaactgcagaaactcacaaagcaacaaaagaagtccacagaataagagcaggaat

SEQ ID NO: 1880624 - DNA, 4001 bp, Homo sapiens
acactgaagtcattagaactttcttgtgcagctttcagtcctgagaatttggctttctggcactaaaaaggcagaggccgggtgcagtggctcatgcctgtaatcccaccacttcaggaggccgaggcaggcggatcatctgaggtcgggagttcaagagcagcctgaccaacaaggagaaatcccatctctactaaaaatacaaaaattagctgggtgtggtgttgcatgcctgtgatcccagctacttgggaggctgaggcaggagaatcgctaagaacccgggaggcagaggtttcagtgagctgagattgcacccttgcactcaagcctggacaactagagcgaaactccttctcaaaaaaaaaaaaaaaaaaaaggcagaggaaaagagcagacctggcttccatttgggataatttgtcaggtctgcttatctgaatccttggctaattattcttgcgcttggcctaaacatgccaaacaattctccaaatgtggacaaactgaaggaaggcctgtaatctgggtcctgggcaagtaccttaaacaagcaaaagcaagacctttggctatggaataacatttatagtcaggagtttctcaagataccagagcctgaaggtagatccatcgagaagatattcaatgatatgcactcctaaggcaataatttaagtgatactttcatattactgatgctttaaaatttaataattaaaaattacacaactgaaaggctacttatataggtgaagagataaccattttcaaacatcaatttagtcaacagatactcaaagtaaacaatttgagaatttagtacatatgcaattttcctatgagcaaaaggattcaaaagattttttgaaaaagtatgaagcagttaactctaagtagtttgctctactattaatttattatacttatccttaacaggtttgatgagacctagtttctcaggagccacgaggtattagggaatattagtggttagaaggtgtggtgcctaaggggattaggaaagcatttctgaagcaaaactccaacgtggtattgccaaagtggccatcacctaattgattaaagctcctgcaaatgtctattgggaagttcaatgagaacagaaaaataaccttccattaccctcaagctttcttgggcaagtattaacaatcggagctggagtccacatagctcagatgtaagacgcgcaatctgggtcttaagcagggtggggtttttgggtaggtaaggtcacagctaaagagcttccggatcgtcacgtgtttatatttcaggtgcggtaatagatctagtccactctccaccccttctttacagggttgcttgacagcctgcgcagtccccgcccgtctttgataatccaaccctcttcgaagagggaggtcaatcactgctttagttctgcgctctgcctgcctcccacgcgggatggtgggcagctgttccgcgtgttttcctcccggagctttcacgctctgcccactgcacacacctccctcgcggccctcctggcctgccctcctttgcaccctggcaggccaactccaagggtccgagtgtcggtgacaggggcaagcaagcacagctcacttttcctgggggttttcctcacggtgtgtttagtgacccctccccgcaatcccagaaaggctgcagcactccatggtatcctacatgtagctgcttctaaaataataaaggctgggacattggctgtcttggatattaccactatgctacctgcttggaactgggaccagatagaccaaggtccaactttgtcgttaggggaatcagaaacgaaaagaagccactttctgctagtcctaaccccggtccctgggccaggcaaaccttttcaagcgtccggcggcagcggccgggcgcgggtccgcagaaaagccgaggcgtttcgggtcccaagctgttccgccgccggccccggcctggcaggcgcgcggagccggaacgcgcaaggggtcgggtgcgcgccaggcctggcgcgctccctccgggatcgcggctgcgcagtcgggcgggagtcgggaaaaggggaggaggttggaggagccggagtaaggggagggggaggagcggcgaaagcggaagccatgttggagtttcaccccgagcgaggggctgcgagggttctcctctccttgtgggtgtgaccaggttcggcgcggcggcgggccgcggggggcggggacgattggccgcttgtcgtcgtccgcagcggcgtgaggggagcggcggcggcggcggcggccgcagcgtggagccgggtgattgtgaccgccgggggagccgggagccggccgcggcgccctctctccgtgtggccccctgagcggcccccctcccctgcccgggagggaggcggggggcacctggggcccgccatgaaccccggcttcgatttgtcccgccggaacccgcaggaggacttcgagctgattcagcgcatcggcagcggcacctacggcgacgtctacaaggtaaaggcaggggccgcgcgccgccgaggccgtgggatcccgacccgcagccaagcctgggcgtccgagcccttgccgcctgtcctcgggagacgctggcgccagggagcagtcggggaggaggagctgcggacgccaagggctctgctgccttggtgaacaaagggccgaatgtttaaccccgagacctccccagcccttacctgagcccccccggtggacatgatttttgccacctcccttcttgcgcgcatttccagggaagggcagaacgagagcaggccacactgctcatccatagtgcagagaaggtctgggcgtttgttgcgttggcagggtcagcgcgacgaaccggacagcaggggtctggtgttgtcaaacctgcctgcttcacgccaacctggggtcgtccgctctaggttgggagctgctgcccaccaggcctcggtggtagttattatactatgctgagcgacctccatcttccatcgacagctctcagcctttagcgccttattcatccccctgtcagtttcttttaattttccagagtaatgacttttttttttttttggaaagagcaactttgttttctctaagtcgaattggactgcgatgccatttaaacttgttttttaaaaagtgacttgaatacttagggaaggtactggtttgacaaggttagaattcaaagtccagtagcggtacagcattcctgttgtagagggaccacttctaaatgtgggaagataaatcactcttccctggccaactcaactcttggcctcacagttactgccaagaagagaggaggttgttgccaaatgtggcagcagtcttgatttagttgtgtatcttcttactggtaactgaagttgaactcctccagtttcacataacacctgaggatgcacaaagaaacttaattttgcattggaaagttcagtcttaactttattttgcccatgtttaagcaggtttttactcttcagtgtaatgcctgtggtaacttacatatttaatacagtgcagccagtgttctgctttagtctgattttctggatgatctacttttcaccatcgtggatctcatcacttttcctactatgcaatatagatatattgagcccacctacaatgtatgagatacttggcaagtaagcactttgggttgtagcagtaaacgatagacttggttccaaatcttcctaagtgtttctatttttttggacaaggacagtattaaatagccatttaaataattattgccgtttaattttgtgatgcagaaaagagtattaggatcagggttatgagagcatgtaataggaggacctgatcctgtttagggtatcagacgctcatcgcctttcagctgagatctcagagatgattaggcgttgcttagggtactggggagaggggattacgccagataggggagcatgatatgtgaaggctctgaggcccgatgtg

SEQ ID NO: 1880625 - DNA, 4001 bp, Homo sapiens
gacacctgagcctgtgaataaaccaggtcctatcagggggcagtgtgcacatgcacatgaagcctgctgggtacctcaacccaggcagttacccaggtaccctgccgggtaactcagagttgagttaaaccctgctccttgatgaccactcgtggtaggacagcgatgctgcttaaagaacttaaggaacgaatctgattaaataattatgatttagcattttaagtggaaacctctcatggagctgcttgtaggaaacgctggctggctgagttccctccttctgcccctgctggacaaatggcctcgcttgctgtgctgggctggcagagctgcaggcctccaggtttctgctggaagcatcatccctttcttctttcaggctttgttgagccccaggtggagctgatggtggcatcctttggaccccactgtaaagtccttgcagacatctgtcatggcacgatgacagctttactgcacgtgcactcacttgagggcagagatcagatcttaagatcctactgcagaaacctagggccagtgactccttgagatgtcatcgtaccgataggtggtgacggtggctgtgcatttccacaatttagggctttttctgtccgtggctctcaattccgctgcaccttagactctcttgaagattttctaatgcctaggccacactccaggccaataaaatcagaatctgggcaaggccttgggatcaatctttttttcagacggggtctcactcttgtcacccgagctggagtgcagtggtgcgatcacagctcattgcagccttgaactcctgggctcacttgctcctctcacctcagcctcttgagtagctgggaccacaggcacatgtcacaacacctggctaatttttgtagatacggggtctcactgggttgcccaggctagtctcaaactcctaagctcaagtgatcctcctgcctgagtctcttaaagtgctgggactgtaagcgtgagccactgtgcccggccagaatcaatctttttttttttcctaagacggagtctcactctgttgcccaggctggagtgacataatctcggctcactgcaacctccaactccccggttcaagtgattctcctgcctcagcctcctgagtagctgggtgaaaccccatctctactaaaaatacagaatcgatctttttaaaaagctccctaagtgtttctaaggtccaaaactgagagcctctaagtggactttggacggaagtggggtggaggttgatggtgtaggaactttggaatttttgactgtagctattttggtggttgtaattgaagtaaaactgcaccagggtcaggagacctgcggtaggcccagcaactctgtgacctatctaaactacacaacctcaagggcaggctgtggtacggggctgccccactgagccatctgcagaggtggtatcactcaacgatgaaagactcaacgaaccagcctttaacgaccagtcttttctatttcaagagcagtctggactctgacagcccctgattcaggtgcaaactaaaaattttaagattggcaagcaacagacactccttaagtggttcctaactctccccaggtgcagaacacttaagggtcccaacatctgattgaaacacagcccacaccaaaccacgagatggcacctcatacacattagggtggctactattaacaagaacaaggatgtggagaaattgaaattgttgtacaccgttggtgggaacataaaatggtgtagctgctgtggaaaatgggacagcagttcccccagaaaaattaaagaattaccatatgatccagcaattccacttctagtatatattcaaaggaaagcagggtctgagtttttgtttttttttttttttgagacggaatctcactctgtcacccaggctggagtgcagtggcgcaatctcggctcactgcaacctccacctcctgagttcaagattctcctgcctcagcctcccgagtagctgggattataggcgcgcaccaccacacccagctaatttttgtatttttagtagagatggggttttgccatgttggccagggtggtctcgaatcctgacctcagatgatctgcccgcctcggcctcccaacgtattgggattacaggtgtgaacgcctggcctggcctcagatatctgtatatccatgttcacagcgttatttgcaacagccaagaggtggaggcaacccaagtgtccaccaacagatgagtgattaaacaaaatacggtatatacacatgaggaggtatcagcagcctcaagcaagaaggcaattctgacacatgctacagcatggatgaaccttgaggacattatgctaagtgaaataagccggtcacaaaaagacatgctgtacttttccacttgtatgagggacctagagaagtcaaattcgtagagacagaacgtagaacagtggttgccaggggctggggaggtggaaggaatagggagttagtgctcaatggatacagacatttgtacatattatttgggggtagggcaaagtgaagagaaaagaaggttcaagttccagactggggatgagacaaggtgcttcaccccttcctcggttttattcttactcaatgcaggatagaaaatgtttcaaagactcacaggaatatctgtgggaatgctgatagtgtttctggtgagaacccaaaaaagagacactaaaaaaaattaactggccaggcacggtggctcacaccacccagcactttgggaggccacagtgggaggaccgcttgagcctaggagtttgaaaccagcctgagcaataaaccaaaacccgtctctacaaaacaaataaaaaaactgttagaagcaagcaagtaggtatggatatcaccccaaagggcaaggtgagaaggatgtccaaacagtggctagctaatggcatctgaggattctgaaagaactcatagctctggccggcacagtagctcacgcctgtaaacccagcactttgggaggctgaggcaggcggatcacctgagattaggagttcgagactagcctggccaacatggtgaaaccccatctctactaaaaatacaaaaattagccaggcgtggtggcgcatgcctgtaatctcagctactcgggaggctgaggcaggagaatcgcttgaactcgggagatggaggttgcagtggagccgagattgcgccattgcactcagcctgggtaacaagtgcaaaagtgcatctcaaaaaaagaactcacagctctcatgaaaagtttgtgaaccccaccagatgatcaatctccattacattttgattaaaaatgacaacgcagattagtccatgttcttgaatccatccatcagatttgacttgggcctactttccaaaactcaaatgcatcctcaatgggcacttacagtcctaagaagactccaaagcctctgccatcttaagctgccaaggccactctcagaggcttccgagcatagagaaccaccaaagtgagcgtgtaattccctaaggccaccacagtgagtccctgctcatcaggatgtgcaagctcccaaatgtctgtttaaaaaccagacatgctgtcttaatactcatccatcaggaaagacacaggaataaaacagagctgcccaggaaccatgtggatgggtggggcaggagggcatccctcacatcccaacacaggtcgggggtctgatctaagtgcgatggtcacagccctgccaatatgcagggcttgctccttcgcctctgcgccctcagtgcctgggagagatggaatccacggaccctgtgccacagtcaccaggttactttgtgatctccttcaaggacactctcacaattctagtgtgtgtagaaatcatcaagtgaatatggcctttaactcaaagaatgaatgtcttaccctgcaggctgggcccttcctgcctgcctcaaaactgtcatattcctctgtgcc

SEQ ID NO: 1880626 - DNA, 4001 bp, Homo sapiens; identical to SEQ ID NO: 3326

SEQ ID NO: 1880627 - DNA, 4001 bp, Homo sapiens
gcataatactatcaaaaaaaggggcgggggagaaacagaaacgaaggaatgacagacatagacaagtgaaacagaatagagaaatcagaaataaattcacccatttatggcgtactcatttttaacaaaggcaccaagaacacacattcgggaaggacaatctcttcaataaactgctaggataactcaacacccacatgtacaggaatacatctaggccgttatcttaccatatacaaaaatctactcaaaataaagatttaaatgtaggacctgaaactataaaactactagagaagaaaacataggataaatccttcatgaaactggttaggacaaggaattttcaaatagacatcaaaagcacaagcaacaaaagcaaagatgtaattacattaaacttgtcaaaagcacaagcaacaaaagcaaagatgtaattacataaaacttaaaagcttctgcaaagcacaggaagaaatcagtagaacgaagaaacaacccagagaatggaagaaagtatttgcaaactatgcatcagccaaggggctaatacacaaaatatataaataactactcaaaagcaaaaatacaaataatctgattaaaaaaaaatctaccccaaatctttgtctcccaccattattttcccaccttcttttcccgaccgcctttggcctcctccccctcgccacctgttttcttcctccatctaccccaaaactttttccccaccatttttccccaccgtcatttcgcaaagccttctctgctctctcactcaccacccttttccccatccacttacccactttccccactgtttttcccaccgtcttttccctttctccctggccaccttcttttcccccatcccactctcatcaccctcttttgctccttcatctaagcaaaaacattttctcccgtcttttcccaaacccttctcctcactcctgctgctcaccactttttcgcccttcatctacccgaaaactgttttcctcatcgtcttttcccccgctcctccttgccaccctctttcccttctctacccaaaaacatttcaccatagtcttttcgcaaagccttctccccactcctgctcacctccccttttccccctccatccaccccccagaatattccctactgtcttttcacagtcttccccccttcccactcgtcctcttctttgccctatcctgcttgccactctcttttttgccttccatctaccccaaactattttcccatttttttcccaactctctttccctgctccctctcgtcaccctctttcctcctcctcgttaccctctttccccccaccatctacccaaacactttttacccactgtcttttctttctccaccgtctttctttcctgcccactatctttttgcaaaaccttgtcttcctcccgctggctacccttttcccttcccccacctgttaccctcttttccccctctatctacccaaaaccttttctccccactgtcttttcacaaaaccttctctccctactgctcaacgctgtttctcccccccaccaccctctctttcctcctcccttgccaccctcttttcctcctccatctacccataaacattttacccaccatctttctgcaaaaccttccctccctcccgctccccaccccgtttttctccctccatctacccaaaaactttttttcccactatcttttccccaccgcctttttgcaacgcgctctcctgctcactatcctcttttccctttggcactaaccaccctctttaccccctccatctatcccaaaactcttttcctcctcttaccgcttccgccgcactgccgtctcggtcgcggttaccaccagtcgcagcgaggcgagccacggtgtagcggctccagcctccagcgtacggctggtgattacccattcctggtcctctaagccgggcactgagcagctccacaggaaaatacgggaacgtggaagagcctgacttcccttcagcagcagtcatataccgagattatatacaggaggattcctgactgcatgttctgattggatgagaaaaaccctccagggttacttggattggactttattatcatgttctgattggatgagagccagtcttaagacaaccaatcacagcatgaaaataaagtccaatcagagtaggcctagaggtttttctctcatccaatcagaacatgtagtctgggaaccacatgtgcgtaacctcagtaggtaaagcatgcggaggtggcgtcaggtcatttcaggctcttaagtgtgggcgtttggtatccggcatggctgctacctgtttctggctggagcctcggacactggctcactgcagttggtggtgtcgacagtggtaggagggcaaccagtagcgggagcttctcctgccaggcaggaagacgagtagaagggagcggcatgctggaggctggagcctgagcccctggggctcgccttgctgtgtttggtggtgacgtgggacactgcagctcggccagagtggtagaaatgtcctggtgtaggtgagttatccggggatgtactgcccgcctgtgggggcaggggttgggtgtcctattggggctcactacccgaggctgcactgcctgtgtcagggggctggttgggggcactctccgaggttgcattgctggcggtggaggggggcggttttggctggctgtccggggctacactgcccgtggtggcgggggtgatgggggggaggcaggttgtgtgcactaacgtgtactgccggtggcgggggaggggttaggggcactattttctgctgcactgcccggggcagggagtggttttggtggttatttggagctacaatgctggcagcggggggtggtttaggagtgttgtcgggtgctgcactgcccttactcagggtgcgctatcaggagctgcgctacctgtggtggggtgggggcggcgattttgaggcattgtcttgtgcagcaacacctgtggctgggtcaggttgtgggcactatcgggtgctacactgcctgtggagggggtggttggggggggtattggggttacactgcctgcaactggcacagggtgtggtgggtgtgctgtccgggggctacactgccggcggcaggggtcaggttagggttgctatgggggctatactgccagtggtgttggtcggctgcagaggtggtggggacagcaacagccatggtctccttgctccttcgggtgactcttctcttttccagactccagagttcctcctggtgcaatcttgagcagggcagggcccccacacccactgcggttctccggcctgcacctcccgcccacaccccatgctctgtgttggggagaccacctgggactaccgggtggggattagtgggcatcgcgggggactgtgggaacagggcactgtgggtggaggtgtcaggaatgggaaccagcagttgagtggggagggctggctgggtctgagtttctcctactcctgctccccaaggagtgcagccctggtgggcccagcaatttctggccagttgcacctggatgggggtggtttcagcataggcactcacacccgccccagttcctggccaccttttgccagaaagagaggctggacttcggtgggtgggtctgagtgccttagctgaagctggtccctgccacccagtggccagcatgacaaggtgaggctctaacgttaccactccctgcatcccattctaggcttttctggctttgcccgtctagctgctccaagccaggctggaggaggaggagaaggaatcacctgtggtacgctggagcctgcatgtggcgtgactctgcagctcgcctcgtgtgactgatggcagccacggagactgcagctcgacaggagtggtaggagggtgcccgcgggggcaaggtggtaggaaccttgtagggtgggctgctgcattgatggcgacagcaattgtattggcatt

SEQ ID NO: 1880628 - DNA, 4001 bp, Homo sapiens
ccttatccagaatgaggtttgggcaaacaatttgtactactgtaattacattgtaaaagtgtttagtcccttgattgttcagaattaattgtataaaggcctagaagttatattaggttcacagtttaaaatggaaagactgtggggggggggaggggcacttttcaaaactactgagttgattttaagtccgcaaactcaaactatctcattctttaaggaaaatttgtgtgtaggtaatttaaagtacatttttaaggtaatctggcacatcatggttaaagcatgcagtcgtctagtcttcctcctgctttgaagattttggttatgtttgcaaagggtgacttacctgaaccttcttttctcatctgtgctagaaaacaaaagaaaaagattaccggaaagcaacaatacaaaataaatcctgttgtcaaatatatatatatatatatatactgaccttttccaaatttgaaaacgtggccgcagagttgtggtaaatccaagccccgttacctctttgccgaagaacccctgaggctgttaaagaccacagtcctctaagcgtatttcgcaataaatttctctcagttaaattatacttacacaatttccctcgcagttcatttaaggatcataaacgtaggtgtgccctgtcggtgtttggtttgacccccacctcccacccacgcatctccctcctacccccgagtcgcgcagatgcctggcgggcctgatgcggggacgatgatcacacccccgcgagcagccatcggaaggcgctcaggtataccccgaagtcggctggggttccgggaaggggtcgcagactgccggcccagcttagtcctttccctaatcggaaaaggagcgtgctgcctggcccagccagcgcagcctcccaaggattaaacagaaatcgccttcctgagacggggaggttccatcttggcctgaaattctgcttccaagttcatgttgtggggccggggagcgacggtgaggcgtggggtgggggggtggggggatggggggaggccgggaagtgtaggcagaggcataaaggcgctggtaatgcacctggctgcccacccactccgtccccagcttttactcgcgggcctgtcttaacctcccaagtgatgtttcagggcgtttgtaccagaaaacctacacatgtatgtgatggaaaaaaactaaaagatcctgaaacttaagcgtcagaaaaaagacagggagaaacagagagaaaaaggagagaggaagcaaatgataagggatcctggagatggtttaaacacacacacacacacacacacacacacacacacacacacacacacacacacacgagggagagctctttcaaggcaaagcgcttctgaaggttttgggagaacgtgtgtcagcccttcaggcacacagggtgccagtacggagttgggggcggggaagggtgcagtgcaggcggctgggaaggctcatctgctcggctttatggaaacgctccactgttgggggcaaccaaccccgcgttgactcctgcgaagtgctaaaggaagcgatagatgtcgcctaaggagactacggacgctcggtggaacctcattccagacctatgttctcatgctcgccctgtgtctcctgctcctcggaagcccactctatagaatcttcagtcctacctcgcagacggacgcaaattatcttttactttgcgcttaagagttggcttcaatacattttagagctcctaacctttcccaaacaatcttcggatgaagggatacccccaatcttgctcaaaactctttccctacctacacccccttgagggtgagggttcagtccgcagctggcgagtgggacgtgggtgggggcgatggaggcgcgggcgggctgcttggagggagtcagccttttggccaccttcagggcgggaatagggactggcagttcgcattccccgcagatcgaagctccctgctgatcgattatttgataattgattttccccgcagccaatgcgcggcggcctgggcgggggcgcctcctgattggccgagcactcctccacggctgcctaccgagatttgggtgagctcattttccagtcgaccgcagggggagttttctgcgaggtttcagctggagggagggggaaaaatcctctcggagccgagcgagctgcgagccctgcttgtggatgtgaggtttccagccactggtagagctgctgcggctgagccatctcggcagatcagagcccagcggacagaaatataaatacgaaaataacgccactaaatataatcacaagggagaagcttagagcgggagaataaagagaaggggtgagggggaattaaagcccaggcaataggtgttaaagttaaaaacaaaacaaaacaaaaaacagtggttggttggagcctccgagttgtaggtacaggcagcttttgtctgaaatctcagcttccgaagcggatttctttttctctggcactgggaggtttcgccgagccgggttggggacgggaaagaggagcgcggggaaggatgtctggggtggtgagggcagggcttcgctggagaaagagctagtggggcgcgaggttcttacaggcccgggagaggtcgaggctggagcccctcggcgcctctaagacaaaggcagcggtggctgcagccggagcctagcactccggcagcgtcgcgccgcgccgcgccgcgccctgggcgcacggccgcctcaccccgagcgggtcggagaaagagcctccctcccagcggctccccggccccggctccgcccgcgaggtctgggctgctgcgagcccgcgccgggtttcgctttccgacgatcataaatagcttggtgtttgtaaacaggcgctgggggcacattccccgcgctcagctcattgttccctcccttcctctctacttcgcgcaggacgcctgggctggggctgggagccgccggggctaggaggtgggggagtccagacccgaagtgacaaaatgctagcattttctttcccccggccgggcgtccacctctaacagcaaagaaacctctaagctgggtctgcagaaagcccgagccacctcaaccccatgttctcaggactccttagcagaggctttcccaacctggcttctccctccttttcctccacgatcccgctttgacttttctccttgcagtgtttagttctgagaattcagtactttgcgcatcaccccctgccccgaaaaacactggcagaccccaataatttcgaggaaagtcatgaagtctatgcgcggagccctgtgcaaaataactcccgctgctgcctgcccggcgttgattcccaatttatttcaagagagtcggctttggggagagagtctgcagggggagggagagaaaagaatactgaaaataaagctggcggccgcgggctactgcctgcgtttgtgtgcgtgtgccctgggtgtgtggtgtttgtgcctgggcgtgcgatttaatggagcgcctctctgcctctccagtgcggccagagctcgcttcgcgcacccacccctgccgaggagcctacttgctgcagcccaatgcattgtgtaagacgcgacctgttatggccaccactacttccgggttctagcattctggtcggaatccacctctccgcctgtgcaacacacactttacacacgcacggggactgcaagcgggcagcatcgatcgtggctcctttaagacaaactcagacagacattttttttaaccctccttctctaatctccttccagtgcagcacttgcaaagagggagagagagggagagaaagaaagagagagagagaagagagaaactgattaggaattaggactgattcaagggaagcgagcgctagggctttgtgcatttgaatattaacatttgaggtgttctgaccagaagaagacagagcggatgatcattcattcaccacgttgacaacctcgcctgt

SEQ ID NO: 1880629 - DNA, 4001 bp, Homo sapiens; identical to SEQ ID NO: 3328

SEQ ID NO: 1880630 - DNA, 4001 bp, Homo sapiens; identical to SEQ ID NO: 3329

SEQ ID NO: 1880631 - DNA, 4001 bp, Homo sapiens; identical to SEQ ID NO: 3336

SEQ ID NO: 1880632 - DNA, 4001 bp, Homo sapiens
ggcagccgctggggcgccgaggagcacaggagctgatggcaggcccaggggaagggcccacagtgggctgcgtctcaccgagggcaggggctgcctgagcaaggacccagaggtctgggtgcaggtggagggtcatggggacgggggagcccagagaccagcctgccatctgcaatcctagagtgtcactcaggcttggggccgggagagcagccaagagcgcgaggggaagcagcagcaactctggtgctggggaggacccagcttctcaggacaaagtggggaaggcggggcaggctctgcacacccaaggttggctggccgagtggaattttctttcttcaaacttttctcagattcccctgaatctggaatcacaggacatcttaaaaggaaacccaagttcatgtttgctccaaagcatctaatagagatgacactaacatgatcttgatgcaaatgccaccgaagctatttcatcagggtcagaggcaaaattcagtgtactgaaattcccatcacaacgcaggcacctggccagatctgagcccggggtggtcaatgctgatgtgggccaagggcccccaccacctgggagttttcagaaatggaaaatgatcacaaggttcctcacagggatgccggccagcattcatcattgagcgtggaggagatgcgctcacttggatgccaaggaggacaggcagcgccctctgaaggtaagaattgctccctggatgtagcctcatctggataacctacacaactcatctttccatccagtctactcaagagctattaatgctttaattcctaaggcattcattctttaatctgttccttaagctgttttcttggagatttgtacaagttctgcaaattaattcaaatttcatcttaaaaggaatttgtcaactggactgagagacaatcaaaacagtcagacacggaacatgctgagcgccacgctgctgccggggaattctcttctgaagcttgggtgacgctcctgcccgcctcacaggcacacagctgaacctcctgtgcgtgcatcacctgaacggtcacagctcgacccaagtctgctcttaaattccaccacctgtgaaacagccagcgagcagcctggcccagcactccccactcccaaaagacaggaccctatgggggaagaaactgctgcccaaatcttctgaatgtcgcttacaaactcctttttctgctaaaaccttccattctgtgacagcacagagaggatgatgcagactgcagctgggaagctgcttcctactcctccaggcccctgctgggtcaccctagagctgccaaggccagcaactgaggaggaggagggcaggcaggcagggctccttccagccactccagcttctccagcagtttagcgcatgctggaaggtgctggcgctgatccgcccctggcagtgctggtgagagaggcaagttactcctcgcagatctgtgtctccagctcggtgcgcgtctccctacggacatggaagagtgcgggtcccctgaggagcagggaggcgaggggccctgcagagcagccaccttctgctgagaaggagcctggactcactggcacagtgcagccagagggggcttcggtgggcaccgaggctggggagtcgggctcaccaatgcgcagaatgctgtcgctgttctcactacggcacctcctgcattttcactcattgtggggaagggatgttcacactgccttggtttaccggactgccacgtgaaactccactatctgctaaagtaagctaagagcagagcagagaaaatcaacagcagcacacgccgcctgcatcccatgcgcacctccggccacggccattgctcacctctgaagacaatgctgcatttatgttggattcaataacacaaatggagcgttcacagggcaaggagacccaccccagggctcctgagggcttcctaatgaggatcctgggagccgggtgggtggggatgaggcccaagctgtcccaggcccggccccacacaccagctgcagagatgagaaccacaatcgcattcacgcattcgtgcgcctacggctgtgtcagacgtgacttgtgctatttctgtatcaaaaaccattcaaaatgccacgagttcccaacagaagctgctagtgcttttgacccaaagcaccctgaagaaaacaataaaaccttctctccttaaagaatgcagcatcaaaacaaaaaagtctgtattctcatgaatattctacggtacagcagaaaacggcttttataggttgtgccttgagaaacatattaagacaatcagactcctgacgtcagtgagagcacaaaggccgcattcagagtccaatgggagacggtcagtgtgctgtgaatgaattctcaatcacaaacagaaaaacctgttagtctctctctctcgctcttttaaaataaatgttcataaagaagcatactgattttccacgacatgcttaggtcctcttctcaggacgcgatttcatgccatcatacagatatggaagaaaaagaggcactattctttaggtaacacagtcaatgtttagggtctcttcaagtaaagaatgactcattcaaatcaagggaaaaataatagatatttcaactatgtaaccatgatttcctcttacactgatattttgcctctatgtgggggtggggggaagagagaggatgggacagaagaggagggagacagcacatcagaaatgcatgacttagctacaatgtccttcaccctttatttattgtgcagtgtgccatccatgctgaagaacaagtatgtttagtaaaagaacagtaatgaaaccagcaccagtgcatcctccgcttcaatgaggcccaaacgtcaccctctgcgtcccttcaaaccacatgcaccccctaccccgtgagcaacatcctgaccttgttaagtgtcctcttgctttgctatgataataacatctgcatatatgtggccctgaaaacacgtcctttgctttctgaagactgaaggcagcaacaccagtgcagtggaaggaggagttgacgatggttcccgggacaggacagtctcgagtccgagtctgccgtcagcttctgggacaggggaccagagcttcttctggggtgaagccacgggtgacccccaggaaaccaagtacaccccgtctaacatctggcagggcagtcatgtggaccagaaccaggtgccagaaggtgtggtctggggggtgagctgccctccatggtggccacctccagctctcaggtgggaactgggcagaagacccccttggagaaatgagtgacctcggggaatcgaggcagtggggcaaggaagagagagtggggccatgtggtcaacagaggtcaggcacagacaagcggctgagtgttgcatcctcaggtttaggcagcgaggcaggcagtctggtgaggccggcccagacgctgcctccgaagctgtgccactcaccccgggcaggcgctccctctgtctgcactgctgctggcctggacgggtccaactcctccaggggattccctctgtctctgccctaccttaagtctcccgcttcctttgtcccagccatcgtcttccttggtttattttctcactctgcagaactcaggctccagctgtgtcttaaaaagggaggcatgagagtaagttctgcacatctgaaaacgtgtcgattctccccttcacgcgtcctgactttggctgggtatagaattccagcttgaagaccatccttcgccttcgggattctgaaggcgcaactctgttgtcttcctctcccagtactgtcaggaaaatgggcgccacgtgatgctgcaccttgagtgtgactcgatgtctctctccgggtatctataaggtcttctccaggcccccagcgttccgaaatttcgaagccgtgtggtttggtgaagacctttcacacccactgctgggcgcctggctggtccttt

SEQ ID NO: 1880633 - DNA, 4001 bp, Homo sapiens
cctgctctgaaaatggagtcctcccccacccccccatccccacccccttttgcgcccacagccgagcagccagccacatggtcctgacctgctccctcagctataaaaatttatggggagagtaattgcggcgcccatggaagctccacacgcccccacctactcgcacccccttccagaggacccaggctaacgggctgggatgtggacagaaaggttactggaccctagccttacccgaattcacgtgcaccttcttcatccaggggtagaccacggccggctgcttgagtgccgtcccggagggcggctgcttggggtcggactgactgtaggcccgggcgccaggcaggggcgccggcggaggcgccgggggagctgggcaaggctctcctggagcggcgtagtgaccgccggggccgcctggctcttgtccgtgaccccgcgcaggcagcgccgagccaggcccggggccgctgcctccgaaaggctgctcaccgaagtcgggccgtgggtagagccccgggggctggaagtctgcgccctgcgcgccgccgccgtagtagtcggcgccctgctcgcctaggtagccgccctgcaaatactcctcgcacggagggaacttggggtccacatacttggagttcaccatatacgaactcatgaccattaatttcagaaggtagaaaatactaatttttctcgtgttgtctttttttctccttccatagggccctcctacttgctgtcaactgaataaagttgggcagccatgtgaccaggccagccaatggcgagggagcaagtttatcaccgggttggtgagcatctcataattttcacaaatttaactaaataacatacgtgtaatcaagtagcttgctatggcacatttgagagcccctgccagatattaatgtagttccagtccccagcaccccattcccctcaggtaatcccagcttttgtctgccactgattttgccaaccttccgtggcccttccactcacccccagctgaatgcaacccccgccccccgacaccaagtaggcacagctcaagggagaatgaatcctcctattggggtacagagcaatgaaaggtgggtgggtgaactcgcctctgagttgggcagagtgccccaggcgaggagggttcctgcctgcccgccctgcctgcagccggcgggagcagggattctgccatacaaaggccgccgtcctggctttgtcttcatcagggtcacccaaaagttaccagaatctggccagcttgaatcaaattaggcaatgagtaaccgccatgctttctaccagtgcccaggcccgggggttcccagccaaagctgggccctgccaaaatagcagggggccctcgctgcccttgcccatgtagctgggggtgggctgggatggtggcaagggcacctccaccttgtcaaaatgcaccctagagctccccactgggcttctttgaagcttgctttcttcccacaggccccaaatacaagcaagcccccatttgggtacctttgcacctcatgttcctggagggcagagctgggactgggcaagctggccttgtacctcactccctagtaccccaaaacctagccctttggccctgcatccatgcaaccaattaggcttgcattctctctttctctctctctctctctttctctctttctgtctttctttcttttcagcacccagaggatactctgtttaaaggtgaggagcttctggagaggaaaagctgctctatgtcaccaggcgcagctgatcctcctggagtccaaggtaataaaacagaacgaggcggctgaccagcgccggctgcttctagtctccatgtcgcactttggtctctggctattccgaagaaacgtgaagtttttgcatcgaccatatattcccctagaatcgaatctgtgactatacggataccacacaaattcggttctacagggtatatatagacaacgttacaacctctgggtcccacccagagtgaggtacctaggtcgctgccggccccaatctcttcctctgagccaccaccgttcgacgcagccacccgcactttctgagacagttcaggtagcctaatgggcttggcgacaatttgaagcaatgagttccctcattcttctgccagggtcagggttaccaagcaggcgaacaaccagaatattcttcttaagaaagaaaaaaagaaagaaagaaagaaaaataatccatcccaaggatggcggctttattaaccaccctcccccaccaggatccaaataaccctcctccttaccaagtggtattttccagaaaggaacaaatgccctcagcggcagaagaaaaagaagcgagaggggaatatcctgtgtctactccttttcctactgcccgaccaagccaggttgtctgccaaagctacttctccaagaagtcgcgcatttaccttcatgggccctgatccgggctggcctctccgttccgctgctgctgcagaccccgaggcaggcgctgctcacaggcaccgagccgccttgggctgaggccggcgcgctaatggtgaagggcagggcgaggggtcattcgaaatcatttacaaacatatcacaaactttcattatttttgctttgccgacagcagcacacaagagtacaaaagttcacaaatttcacccgccccagcgcctcggcactgtgcagtgcttgtccctcagttcagggcatggagagcgcagactcactcagagcctcgatggatttcaggggcacagggatgccctggctcgagtggggcttttgggtgcctaactgtaggctgaaggtgttagatttttttttaactgtcttgattgcccttcctacctcccacataattcaaaatttagtttcaagcctgggcctgggcctggtggggtggggcagggatactccccctccaagcctggcactttgctcatccccccatcctttgcttccaccactttacctgtttcgtagggattttgggggcgccagttctaacaagggctatgaggctgcagaatctgtttatcccaggagagtccccccaatttccctgaatgccaaagactcccaagtatccaccttcctgggacactgggcctaggctctatccagacaaattgggggagcctgctgagccggctggagaccggggtgaatatacacattttcatatttgttagacgctgtgacctgcatttcaccttattgctcgacttgttcagacaggtcaaagccaacgagttattgatgaacaaaagcgttaaatattcacctcccgctcaactgcccatactaatgcttttgatctctagggctttttgtgctgtgttcagctacagggcgctgaatgtgggtttgctagcgagaagcttctgcagagataagcacccagagccagtgcaggggaggagagaagcaagaccagaggtccccaggacaccagattttccagactggagcccagagcccctttcacttgagccagcctggtgtataggggtagttgctcttctaggggtgtgcacagtctacaaagggtcgactagactgcccagcccagcggggccaaaaaacctgtctctgaggccagccccagcttttccaaccaagaaggagggagactggttcctgcagccctcacatattccaactcccattaaaataaaatcacttccgttttgcagtgagggaggggccacagttctttctgtgactctccctccaataccatcgtcttaatgagatggtcctccaggaggcttcacaggcctaatcagaaatgtacctgtctttcgcggcacaggcaactcagaaagatccaaacatccaagccaaggatcccacgagtctctggccccaccccaccgcatccaccccactccaccctcctatgcctccttgcagcaccagcgcctctggggcggaaattctccaactgcagttacagagaagcagaggtgaaa

SEQ ID NO: 1880634 - DNA, 4001 bp, Homo sapiens
ctcaggcagtggttaattgtgtgctaggctcaggactaggggtaagtgtgttctgctagaaccagcaaatgctgttccaggccaaacctttggtgggatgaggcagctcagacagcagaggcagtaagctctgctgatatgggtgtctcagggggaccctagcaaggcagccctgggccctggctcatgcctcatcctattgttcccattttgcagaggaggggattgaagcccacaaggttcagttacttgcctcatgctaacatgcctgccgtgtctgtgtgcggaccagggcacagcttctcccctttcaggggccttgcggtagtggtcccgagcaggactgcagcctgagggagctgggttagatctgctctcagctccaagcgctacctgccctgtgtggccttccttcacggccttcgcctgcactcctgccttagagacaccctcctgggcgccgagcttgggaacactgcagtactgagtcgccttgggcggcagaacagagaggagccagcgttttggctccagaccctccctttcttccctggatgagccaggatgcagatacccaggctgtgcagggggtgtggggtagatacaggtcagagggtccctcctaccaaggcctcaacctgcccccgatcctggtggcagctgcctggggacatgctgaacaagcggcctgagcagccccatgagagtgactaagctccagccagagaagggaaaggtccccccagaactctggtgcctggtgtgaaacacaaaggtcgggggggcatggaatggggtggacacggtgtcaaggggcaggtagagggaactggtctctcttgctctcttcaatgcacacatttccctccttcccagcatctccccttaacccaggccaggcctctgcagacacttcagtctgctcctgggagttttcctgcagataccactggatggcttcctcaggtcctacctgggcaacaggcccactagcagtgcctataccggcccctgcccctgcagctctcattggaggatcccagaaggttctaggtgagctctaatccttacctccacctctgagggcacgagctggtggcacttcctccagttggctatcctgacccactgctcacagcccgtgtatgaatatccaaacggcacagtaacttctccaactgtgttcaaggggcagggtgggcctgcccaactaacctaagggacctggagaccaaaggttggatgactgccaggctgcaccagtgccaaaccaaaaccccggcattctaagaggccggggggtaccacgtgccaccagcagggggagccacgtcatggagctaaacctgtgaggcctgcagaggcagccaccacttggacgctcatcctgggaggcttggcaagttccctcttggcctataccaccagcaccctgcgctccacataatggcagtcccgtgtggcccgtttccagtgtctaggactgcaaacccccacccccagggcaccagggtccccatgtggcacccagtgatgaagtcctcctccccagttaaggcttcttggggcaatcactgactgccccagtgagcagcccccccagccaactgcagctcagtccctgcccacccaccagactctgctgcccatcacaggacacatccaactgcctcccaaaatgtcaacccactgtccccaggatcctccccctcctatccttgtgccctggaaggtctgaagaaactgaaacagaaaaaccaggcttgagacagctttgttagaacaactcagcaaaataaaattcctgtttattgttggacaacattgtttcacacatacatcaaacaggccaaaaaaaataaacagcaacttcatagacaaaaaaggaaaaaaaaagaaaccttttatctttggcctttttaaccatctcatacaaaccaactacttatagtacagctaagtacatacacaaaaaagttactggaatgctcggaataagattgtttttctgttgtcatttttgctttttttacaaggttttttttctcctttgagattataatgaacatggtcacaccacaagtaaagtcagaagtaggacagagaacgctccgaaggctggtttggtcatccgagatcattaaaaatggctgaccctaacaatatgtacaaaaatataaaatgtaaataaaaaatacaaacaaatttcctttttaaagtacttttaagaaaaaaagcagggccttggaagttttggttcttttttcctcccctgttgcaaattctcatggtttgggttgggtggtggagagcgcgtgtcatctgcgggtggcactgcccacggtgggcgggcgggcctctctactcgaaggtgaccacgtttagattctgagacgggaagtggagggtgaataggtcacggcggcctttttttttttagtttaacttttccttttttgctgtctagtcatcctcgtcggtcttctgcttcttggtatcgacatcgtcatcctaagcagagaaagactgtcaaaggcccctccaaccccaggagccctatccagcccactgcctcagctcctgctggcagagcaagaaccagggacccccagctccacagcccaaggcctctgggaagttgagcccagccctgtttccttcctgttcttaagattcaggaccacacagtggccacctacaaagtcagaaacagtccctccgcagcttgagcacctcagctaaaggcaggtggggagacccagatgccaaaccccccttcttctcaagccagaacccacctcatcatcttcagctgcccgcttgcccgtagctgactcagcttcctcatcttcatctccatcctcttcctcacctggagagaatcaaaggccaggtaaaccacacttccctcctactgtggctcctggggaaatcccgaggaacatgtagtggactgcaaggtccctgccctgcctctactgcctgcaactgggcccaatcagggcacccacgcccactacacaggtgggactctccagaggagagaggcccaagcagctgcaccccaaaaggccagcccaatagatcagtggctttcagagctgcacgaaagaaactttcaggtgtgcgagtgagtgtgagtgggcatgggcacaactccatgtcagggagaccttccctgactctacaggtgggtgcccagggccatgtggtccactggccccaagtaccattgtcccactcccaggagccccaattccttccttccccttctgccagacaaggccaggaaaaagtacctgaaaaggggaagatagacaaggctactcaccatcaccttcttcttcctcctcctcttcctccccaccttcttcctcttcttcgtctacctcattgtcagcctcctgctccccattttcctcattctcctcgacagaaaacaggccatgtcattaccagctggccccaggctggacagagcgttgctcctgatgcccggcctcccaccagaggctggcggctgcatctacagcccagccaagccaagcccaccccagagacccttctccagtcaacaccctccaggctccatcatgaaacctgcacattaactgccccaggacaagggcttttccccaccctgggccaagcccaaactcagactaccggagtctcctctgaacctattcttgttcaggcgctgctcgaaaggtttttataaatatttaactagcaataatcgcgcctcgggtaaagctcattggctacgatactgccactgtgcaaagctatacatatacacatacacacacatatataggtatgtttaaagtagaacaggaaaaattttgtggggcggtagctgccagggctcaggagcaaagcagacactcacagcattcccgttagcaggggcgtctcttccattttctgcctcttccacaacttccttcttctcctttaagtccttcaaaagggaagaaggaaccagtaaccagtaa

SEQ ID NO: 1880635 - DNA, 4001 bp, Homo sapiens; identical to SEQ ID NO: 1880634

SEQ ID NO: 1880636 - DNA, 4001 bp, Homo sapiens; identical to SEQ ID NO: 1880634

SEQ ID NO: 1880637 - DNA, 4001 bp, Homo sapiens; identical to SEQ ID NO: 1880634

SEQ ID NO: 1880638 - DNA, 4001 bp, Homo sapiens
aagtactttaatttcttccttagagtaattttatttgccagcgttagtaaaactagtgctatagtacctcctatcttgtagggactgctctgagtagtttgaatatctattttgcttcatactcccaaaggccttatgagcttacagctgtcataatcctaattttacagatgaggaatcttaactgcagaaacattaagtaattttcccaaggttacacagtcagggtgaaaaagaagatctgagtgtaagaaggctttctctaaatttgatactcttaattactgcattctattttctttctgctatttcaaaactgagtacgattaaagaagccaactccaaagctctgtcccatatgattttttatccctgcaaggttaaaatctgaatctagataggtatattttgaaggacaacagttctttgcaaaatatttttctatctggcctcaaaacaggaagatgccatctggagttaaattctcctgtttattttctcttgaccttatgaagaagggttatatctctaaagctaccctgatgacatccagaccaccaacagaataaatgtgtgactcagaaaccctgcatacattttgctatatacaaaaaagtagggttctaacaacaatagtaccagacagaaaagacttctgcatccaatgcaaaaatatgtttaagatgtctcattaacacactgtttttcagaaaatatagttactaaatgattcatgttaatatacatctaagttcatcagaagttttcactgaatgaaactggaacgttgtgaacatgctatgcaactccaaagagtatttctgtgattttaatttacttgagaaatgcagtctctgtcatcctccacacaaaatactatagaaaaacagtttcagaaaaatatatgccattttactgaagcagtactttcttaatactagaattcaagggaagtttaacttttaataatttctggatcttttctctttgatgtttacatcttttgggcattttgactcgtcctctttcaacgtttcattttgttcattaagactacattttaaacagcagtgcttgacctcagtcatggaaaaaaacaagggttttattagttaatctgaaaggaatccacttctgctgtgttttcattagacacagactgaaactctggtggttaatgtaactcccccaactgcagttcacaaatgatttatgtaagaatagctatctcattttttccgttgtcatcttgacatgaaacaggcaaagtttcccctttgaaaagtctggagagtttttttttacactatatgatcttttttttttttttttttttgagtgtggaaacaatgggattgagcttttatcttagggaaaacttttacaagaaacagttcactgagagggttccagaaagttattgtagacctggaaactttacaactgttcctcatgtccagcaaaagcaataacatctttcatctttaaagctttaattctttaagcaatctactttaatcacttcaaggcggtgatatcattagatgttacaaaattaaagagctgggctacataatttttggaactctgcaccaaagaagccattcacaatggaaactgtggagtttcggtagatggcactcttttctctgagtgacaactcaaggtccagcatgtgaccgtagatgtagaacaggggctttcctgaggagctgtcctttagcctcaactataatcctggtaaactcacagccaatcattcttgatttttaaaaagaagcctgtagataagacatcaatccaggaatctgaagtagttaagaggcatttaatcacagtctttccttctttcccagaattgttccagtggatttgctttcttttcttgtaatgctgaaatgtttaattccagaatttaataaaaatacctttttatatgtaggcctttagatcacttaaagagtattcaacatcagatgatctaaaggcctatacataaataggtagttttgaaaatccaaatttttcaaggctctgttattacctgagcatttttctttccctagaaaaaaagctcaggtaagtaaatacaaggtatcatggatgaaaaacacaaagtgttataatactttatttactcacacagaactggtgataatttcttttaaaatgataagatcctgagcttctggggtttaaaaaaattaacgtactactctctataaaattgaatattaaacagaaaaatacctattcttttttcacctttagaaatgcattattagttcatgtactttctaggacgatatataatttttttagtatctcctttcaatgacaaatagttacaaaattaagaaaattcaaatatctgattttaatgtgtattctataattatctaagactgaacagaatattggtcctagccttgactccgtcattttctagttttgtaatctcaaataaagcactgatccatgttaggtgactgacactgagatatgtgagcaactatgcattctctccctttaaaagtgcaattgttcctaaatgtatgtaaccttttcctgttagttcagtgtgtttaattgtagggacaaacacaaaccagaaaacttgaatgttacctgagcaagttacaaattccctcttaaagcataatgaaaaaaatatactctcatgacgtctaataagaaactgattctctgagtccatttacagttttaaaattctaaaacaactagaggcctacagtttattttactggaattatcactgtagcaaaatatagaaactcaaacattagtacacatttaattaaaataaagtttctgtttctgccctaatggagcagtattacttagtaacagctgtctataatctatctaacaattaagcagtgaataaaatacttatgtcaaataaggactacatcagagacatgaaaaatgtatttaaacaatagtcatatgtagaatttttaagtggccgtaacatttaagctaatttccaaaaagactctgaatattgttaccattgtgttttcgtgtcagtatatgtgtttgcaatatttatccgtaacatactaatttccttaggagagcagtgttaacatttaaaattcacgcatatgaattttttaaagctcattataaactaccaaagccagctacataacattaatattggcattcgttatgtaaatggtaacctggcttgtcagccactaggtgacgcatctttgtacttaaaacttggcatgtttataatctacaggaaatataaaacagactatgtttctccattggtggattaaaacacatgaattaaatacaatgttcacaaatttgtaagacgaccaaaattctttttgaggacttgtttgtatccagaaaatgcctgtgagtgaactagaagtgagtgttcattagagctgtgccgtctctgaagttatgagggcatatataagaaaccccaccccagaactttatgacagctctcagtgtgctgtatattcagatacctcctgtaacttttccaaagcttatctaatagcagaatttccttgtaaaacccacagggaacataagatgtactgtcttaagtcacttcaactttacttttactcatgacaaaaaaaataggctgaacagttctctttcaactctttttgagcttaagaacacacaaacacatatcagcaaaattttatacttattgattattttttgcatctaaagagaaagagggaaataaacagaacttaatgtgatgtcaaggtactgtaagtggcaaacacccccccactaaagttggattgggaagaaaaatagccacagtgcttataaaaagcttgcaaccacgaggcaactacaaatatgttgcaattttttgagctaaaacccctaagtttgtagtcttttcaataaatggttggtgggggatagtagtcatttggtatcctaaaaaaggactgtgagttgtagcatctcctgggaag

SEQ ID NO: 1880639 - DNA, 4001 bp, Homo sapiens
tttattgaaaagactacaaacttaggggttttagctcaaaaaattgcaacatatttgtagttgcctcgtggttgcaagctttttataagcactgtggctatttttcttcccaatccaactttagtgggggggtgtttgccacttacagtaccttgacatcacattaagttctgtttatttccctctttctctttagatgcaaaaaataatcaataagtataaaattttgctgatatgtgtttgtgtgttcttaagctcaaaaagagttgaaagagaactgttcagcctattttttttgtcatgagtaaaagtaaagttgaagtgacttaagacagtacatcttatgttccctgtgggttttacaaggaaattctgctattagataagctttggaaaagttacaggaggtatctgaatatacagcacactgagagctgtcataaagttctggggtggggtttcttatatatgccctcataacttcagagacggcacagctctaatgaacactcacttctagttcactcacaggcattttctggatacaaacaagtcctcaaaaagaattttggtcgtcttacaaatttgtgaacattgtatttaattcatgtgttttaatccaccaatggagaaacatagtctgttttatatttcctgtagattataaacatgccaagttttaagtacaaagatgcgtcacctagtggctgacaagccaggttaccatttacataacgaatgccaatattaatgttatgtagctggctttggtagtttataatgagctttaaaaaattcatatgcgtgaattttaaatgttaacactgctctcctaaggaaattagtatgttacggataaatattgcaaacacatatactgacacgaaaacacaatggtaacaatattcagagtctttttggaaattagcttaaatgttacggccacttaaaaattctacatatgactattgtttaaatacatttttcatgtctctgatgtagtccttatttgacataagtattttattcactgcttaattgttagatagattatagacagctgttactaagtaatactgctccattagggcagaaacagaaactttattttaattaaatgtgtactaatgtttgagtttctatattttgctacagtgataattccagtaaaataaactgtaggcctctagttgttttagaattttaaaactgtaaatggactcagagaatcagtttcttattagacgtcatgagagtatatttttttcattatgctttaagagggaatttgtaacttgctcaggtaacattcaagttttctggtttgtgtttgtccctacaattaaacacactgaactaacaggaaaaggttacatacatttaggaacaattgcacttttaaagggagagaatgcatagttgctcacatatctcagtgtcagtcacctaacatggatcagtgctttatttgagattacaaaactagaaaatgacggagtcaaggctaggaccaatattctgttcagtcttagataattatagaatacacattaaaatcagatatttgaattttcttaattttgtaactatttgtcattgaaaggagatactaaaaaaattatatatcgtcctagaaagtacatgaactaataatgcatttctaaaggtgaaaaaagaataggtatttttctgtttaatattcaattttatagagagtagtacgttaatttttttaaaccccagaagctcaggatcttatcattttaaaagaaattatcaccagttctgtgtgagtaaataaagtattataacactttgtgtttttcatccatgataccttgtatttacttacctgagctttttttctagggaaagaaaaatgctcaggtaataacagagccttgaaaaatttggattttcaaaactacctatttatgtataggcctttagatcatctgatgttgaatactctttaagtgatctaaaggcctacatataaaaaggtatttttattaaattctggaattaaacatttcagcattacaagaaaagaaagcaaatccactggaacaattctgggaaagaaggaaagactgtgattaaatgcctcttaactacttcagattcctggattgatgtcttatctacaggcttctttttaaaaatcaagaatgattggctgtgagtttaccaggattatagttgaggctaaaggacagctcctcaggaaagcccctgttctacatctacggtcacatgctggaccttgagttgtcactcagagaaaagagtgccatctaccgaaactccacagtttccattgtgaatggcttctttggtgcagagttccaaaaattatgtagcccagctctttaattttgtaacatctaatgatatcaccgccttgaagtgattaaagtagattgcttaaagaattaaagctttaaagatgaaagatgttattgcttttgctggacatgaggaacagttgtaaagtttccaggtctacaataactttctggaaccctctcagtgaactgtttcttgtaaaagttttccctaagataaaagctcaatcccattgtttccacactcaaaaaaaaaaaaaaaaaaaagatcatatagtgtaaaaaaaaactctccagacttttcaaaggggaaactttgcctgtttcatgtcaagatgacaacggaaaaaatgagatagctattcttacataaatcatttgtgaactgcagttgggggagttacattaaccaccagagtttcagtctgtgtctaatgaaaacacagcagaagtggattcctttcagattaactaataaaacccttgtttttttccatgactgaggtcaagcactgctgtttaaaatgtagtcttaatgaacaaaatgaaacgttgaaagaggacgagtcaaaatgcccaaaagatgtaaacatcaaagagaaaagatccagaaattattaaaagttaaacttcccttgaattctagtattaagaaagtactgcttcagtaaaatggcatatatttttctgaaactgtttttctatagtattttgtgtggaggatgacagagactgcatttctcaagtaaattaaaatcacagaaatactctttggagttgcatagcatgttcacaacgttccagtttcattcagtgaaaacttctgatgaacttagatgtatattaacatgaatcatttagtaactatattttctgaaaaacagtgtgttaatgagacatcttaaacatatttttgcattggatgcagaagtcttttctgtctggtactattgttgttagaaccctacttttttgtatatagcaaaatgtatgcagggtttctgagtcacacatttattctgttggtggtctggatgtcatcagggtagctttagagatataacccttcttcataaggtcaagagaaaataaacaggagaatttaactccagatggcatcttcctgttttgaggccagatagaaaaatattttgcaaagaactgttgtccttcaaaatatacctatctagattcagattttaaccttgcagggataaaaaatcatatgggacagagctttggagttggcttctttaatcgtactcagttttgaaatagcagaaagaaaatagaatgcagtaattaagagtatcaaatttagagaaagccttcttacactcagatcttctttttcaccctgactgtgtaaccttgggaaaattacttaatgtttctgcagttaagattcctcatctgtaaaattaggattatgacagctgtaagctcataaggcctttgggagtatgaagcaaaatagatattcaaactactcagagcagtccctacaagataggaggtactatagcactagttttactaacgctggcaaataaaattactctaaggaagaaattaaagtacttagtaacttagtgataaggatggtgaaatgtaaaattttatttataagactatacaatttaaagttgtttg

SEQ ID NO: 1880640 - DNA, 4001 bp, Homo sapiens
aaagggtctgaaaatcccatcccttttgtcattatgatgtgtttaaaagctttgatccatcataggcaagcccagcagccaaggagggttcttaagcagctatatctctcacttggcgcagatgtatttttatttgttaattagaagcatttattatagttgccatgtattcttgctgcatgtgttagactaggaaagaatacagtatctgagccccaagatatgatgtggtggaataattcgtgttaggtattatctcaaggtagtgtcatttttgtttgtgtccctgagaagggagaagatgactttagtcccccagtgtcaaggataaccagccgttcataagatgagagttggagcaactgctctaaggaatctgaagacaaacaggctggcggaaaggaagtcacctccagtgctctaagtcagagcctctctgattcgcctgtctccattattgcacagcacatgatgagtctgactttgagagataagttggccaaagtggaggaatgccacatgcctaggccactttctctgcctaactttcgatcacttaccatgaacaagctgaagaaacttactcctcaaactggcctttgctcaagttcataaagcacttcaaagaaagaaaatgactcctgtatatgaatgttgttgcaattaataactgcccattttttatttctaagctatctttaatttggtggttgaggcctatgaatatgcccaagagatcatgaacaagacacaatttctgccttcaagaaccttaaaattgaaaaatcacgacgaaaaaaaacaaagccctctgatctggtttggatttgtgtccccacccaaatctcatgtcaaattgtgatccccagtgttggaggagggtcctggtgggagttgattagatcatgaggcgacatcccccctgctgttcttgtgataatgagtaagttctcacaagatctggttgtttagaaatgcgtaacagctccctttttgccctctccctcctgctctggcctgctttcccttcgcctttcgccatgattgtaagttttctgcagcctccccagtcatattccctgtacagcctgtggagctgtgagtcaattaaacctcttttctttgtaaattacccagtctcaggcagttctttatagcaaagcaagaacagactaatacaccctctacccagtctctcagtctataatccctcttgatgtcacgctgctgcaagtgaggatgagaaattggagaacaggtgtgtgtcattcacgatgggcttcatcacagcgtctaccacagcgtattttgctacactgacagcattaccatcacttatgtgtactgatttatatgccaaagaaagatcactggggtgtggtgtgtaccttgccttatatcaccaacatgtaactttgatatttcttcttcataacaaaaaagaaaaattatttaatttctctaatttttgttacaaagtaaagtaacatcctacaaagcaggttttgatcatttctggcagcaatcagttttcttctctactttaattcaagagtaaattttgttttcgaatgaatgaataagtgaattgtagctggtactatgatccacccacctgtacttctttttgactctgatagtgaatagaagtttacaaaagtttaccctcctagtttggccttaaaaacatagaaccttggtttcagggctatttgactgctgctttagctaaacaatagcaataattaaccattactatgtcccatgtcataggtaccatgcctggcacatcatttgctgtatctcattcagtgtttgcaatagccctttgagttaggtattgttatttttccgttttacaaagagagaagtaggattcagcaaaactcgataacgatcaaatgctacaaaaacaaaaaataggttgattgctagcctatggattgatttcctttgggtcaggtgtccactcctgctccaaaaatccattcaaggatacaaatctgaccgcctccaaatgcaatgtctcttatctctgcccagtcctacttcattgatggttcacattactaagttcccttgatgtggattattctccctgttaattctctcggtcctagagtgacaattgtacttcctttagcaattagaaagcagtggtttcctgggcttgcttcatcacctcaagcaagcctgttagctactgctcttagcaggggaactgggaacatgacgaatgatggccatctgctccaggaataaacaaactcttcattattccattagtgattttccatttcctgctaagcctaacaatttattagcactatttaggctaatgtatggctgtattattttacatagttacttcatattcttcatgtgatgacatatttaggtgttcagatcctctgtgtggttttctgcagacagaattggatgagtttgagaagataactctcccagcactggtaagaccaccattaattcctctttgtggagcaacttttctccaaggattttaaaagaaatgaccgcatggccattgtgaatcaaataggtttgaaatgcaatgcattaggaggaaacatttatgtgtgcttctcagtcacgctacactgaacataattcttagggttgtgttgaaagcagcactagacaaggccccaggaccccaatttccagccctctactctgtagggtttttatgaaaatcagcaaaggcatgtaggtgatgactctgaaaaagtgactcttatccagactcctttaaaagaaacacctttattgcaagatcacacgtggactggaattggaagaagaaagcaaagtcccaggggatagagaacactctaggtctcctctggccacctctctctctccttttcaggtgacatgttcttgctcccattgtgtctgttctctgtgacgttgctgtcctcttgctgtggccactgctctctcgacactgaccagcttctttcttccatctcttccaagattcagaaaatggtggccaagaagccaaatacagcctgaagttgtgctttatttggccagcttaatatttagatcaaattttgaatttgaatgtttttggcaaggcatgtattaatttttgccacttagttgcaaatccgtacatttactttttttcagatgaaggcattcaagtttaaaaccactttatatattttctctacttccttatccttattcatagttttcgctacttcttaactttctatgacttcacatgctgtccacccatctaataacgtgctctgctacaattgtatgtcctgtcactgctaaccctcagttgatctgtttatctccattgacatttctgagaaagaacactgctgtcccatatgacataataggtcattccaagacatcactactgacatgtgtattgtaagtggaaaagttgtagggtatccattattattattgttattcttatgtggtagtatatattagggccatataataactccaactccaaaaaaatttctttcctggcatatgtgatgatttattgctttggagtttatccaaagaccttagctaagaagcacagcagttaagctatggacccattttttttactgatgtgaacatacccgtgggtcttctgtacacatctgtgaggcaatagtttcaggttcagacaaaccactcaggttcttagttgagtgaggtagtctgtaggcagagccaaagcaccctggagatacatgggcaggcacaggtcatttggggctaccttgaaaagagtttaaaaaaacttttggatacaacaaagccatcagtgttgaagaatgttatgtggtccttacttatgcttacaaatttggccccttcttcatctttgatacacctaccttctattcactcagtcatttgtctgttttattctgttccaacctcctctgccaacatggactcagattaaaaataaaatgaagacaaataagggaaaatagaccattttc

SEQ ID NO: 1880641 - DNA, 4001 bp, Homo sapiens
ttcagcttggaaaaaaagtctaagggcaggggaggcggggtggccagtccagggacttaagatccttgtctttttcatggtgcccaactccacatagcattagtctgtacaggcatttcacctttcagaattgttttgaaagatttttttttctctgaatcaggtcacttgcctgagaaaaagaatgctgagagcacctgatatgctttgatcgatcctcatttaatagttacactttttaaagttatcttccagctgctgacaggtctcactaattggccatatttgggtgacaggtactaatgacaattccctctctgatttgactatagaggagacacctccgtttggtttcctttgtacctcagttgaagaaaaatacattaaattcattgttttctttttgctctgtgaatctgtatattgttaaaatgctgtaaaatatcaacatttttttcaatatagatgatacttagtggttattaaacttctataaagagatcattacttatgtaatgtaaaataatatactgcaaacaaagcacataagaaactatgctgcaaaacattgtatcaccaagatgattccaacatggacagtaatttttcctttgttaggagaattcaccttccccaaagcattttactacaaatgcatccaagagaggtcaaggagatctacaagaatagctatctgatttgtggtttttatcccaagcttcctcaaatcacttttggaaataggtaagagtgtaaattataaatccacaaatatttaatttatgggaatatagaatctgaaaaacaaccaacactttgatcaaataagcatctttttcatcttaaaaacctcaagtaacagaacttgcaatgctgtattttgcattctaaaggcatttatctgttacagggaaggggcagcacatactcaacgcacacatggcatcaaaataagattaaaggactctgaaaaccagtgaaatttggccttggaacatttaagggagttctttcaagccaaagcctttaacttacctaagatgtagcttattgactttatgaaaagccctctttttaattagataaatgcatttcctaccgtttcatgaattgtgtggacgctgccagtttccacgctttaggctaggccctataacagaaatgttttgttccttctataggaacatcttttgctactacatcttgacaaagtttgcattccccttggtgtgatattcctcagcaaagcaaaaccaaaaggaaatgcaaacctcatctctgtatgaaaatgaaagaagacgtttcccaacccaagaacttttgagagcattccaaaactgcgttattttgtattcatgggcgtggggagaggggggatacttcttggcaatttatttcccctgaagaacagcactccctatccaggttcaccataaaaactgtgtgtcctccagagtctagggaagcatcgtcctgccagctctcccttctccccacaggcccccgcacataacagtggcgaaacagatggtcctccccctccccttctcctcgtcccttccgcagtcccacagtgtcctcccacccttccctgacaccttcaccagcgcttagtggccgaggccgcccgtcagggctcccaacaagtgcaaacttcggggaccttctctctgctcctctgcccccatctcatctgggttctgctgcagaactctcccacgaccccaagcttcgaccgctaccctcctcacacacctcggtcccctaactacccatttcccggtcattgagagaaagacaaaccccaaacttccagcccaggtgacgaggcgctgcggctaaacatagcggggcactctcctcgtcctttcccctctccatccgtccttgggaattggagcctaccctggggaacagaggagtatgctcctgtggcttccacgacctaatcctaactccagggactcgcaggagttaggattaggtcgtggaagccacaggcgcctgggcgccctcctctacaagtgggaccttgagacaaagtgcaaactctaccgggaggggggctcctggccattccctcgggcggcgcgcccaggtgcaggctcgctctgcggaggagggcgggggccgggcaagcagagggcgcccagtccgggggcgccggtctgggctgggcgcccagagcttacctcggcgcgcgggccgcgggcgcgtggggcagtggctcctccagccgggaagctgttgctcacgctccggtggttgctgcggtcccgccagggctgcaccggggcttcgcgcagacgttctcccgcgatctgctgcagcccaggcggtggcggtggcggtagcagcggcggcggtggaggtggcgcgggcgacagctcggcccggcgcggcccctgaactgtccaactcttgcccgcgccgggcttaagcgcccggccgctgcccccgcgctgagcgcctgcgcaccgggcctcgcccaggtgaggggcgtgtgcccggagcccgctgggcgcgcccggcccggcccggccccgccgcacgcccgcccccctggcctggccgaggaccccggggtttggacgtgccaacgccactctcgcgcgccgaagctgtgacggtttactaagcagagacttgcgaggcacacagagagggaatgaggcggaaccgttcgggggctcgttgacactgcagagcctcccgcagcatcgctgccttaaatcccgcctttccaggcgtgcgcgcacagcgagccagaggaggctccgtcccgacctggggtcccccgcggtcctcagcccgggggctcgggtccccgaagagatccttggcaatggcagaggtcccaaagcctagatgccaagccccgcgatggggcggatgcttccaatattagtcaacccagagtgaaactctcttcttggagatcgtcagaccaactatttgtttttcctctttgaccacccctgggctagcagagcacagctagcagcttcggcatatttggcggagccgggaaggcccggagcgcaagaaggcatcgcagcctcgcagcagatctgaaagggttgtgggcggggggctcattttcgccggatttcttttccgtgtttaagttttcaaaactaaaacctgtcatcggttaccctgatgtagagggcatcttctgaaaattagtgcaaacatggccaaggtgcttggttctgaaagggaaagcacttagaacacttaagaaagggaaaataattttaaaagagcagttttctgagattacttctttggggagaagttcaatagtcataaatgacaagagagttgtgttatatagcagggatttttttttaaccagatgatcttaaaatatttttctttggttcttgtctcagatgattgacactacgtaaataatcctgcagctgttaatgtcttggcataatcgtctagaataaatatcttaacgtccagccaaagccaatgttgttctcccagggtgggcttcagatgtgacaaacaatcacaccatcctagagctttctaagggagcaggctgtgtttttaagcaccttggaatgtagagttattgcaagcaccagcacatttgaggtaccagcgtgagaaagggcataaatctgacttacagtttttgtatttttagaatccaaatatcttcacatccaggtcggcagtctcaatactaagaacaaacgtttattggtgtgcttattcttaaaactgtaccttatttgaagttgctacagaaggacagcaccaaaattcaatcattttaacccaaaagaacatgagctatgataattgcttaaattatctttcacaaaattatgatcttaaggtctcttgtcatcaataaaggttatgttgaaaacacgtctttcacaagtccctgaaggtcagtaagatggagctctggcagactgggacaagcaggaaattccagaggcaaaaaccttccatgagaaaaacacccagct

SEQ ID NO: 1880642 - DNA, 4001 bp, Homo sapiens
ttaaaacactaccattctgttttgttaaaggactgcactgttgcaatattatcccatttctttcagcactttcagaggaaagcacaatcaattctgcaagctaagagaactaggacaatataaactgatggttcaggaacttccctggagggctccacagaatgttctatttttaactctcactttaaccaagaagagagcaggaaggaaatgcagtgctcagcacaaaagtattgaacaggcattaacaggctgattttattttatataggtgatctgaactagcatttgttctaaaggaaagcattcttaataacacagaaataatcagaaaaattacaaaaagtattaaagaaatgcttagaatacccatgaatctaaggttatttcacttaatagtacctattaattttttttccagactgtgcttgtacaatagaagcactgtgaaggtagttttctttttttttttttttaaagatgagccattttactaaagccaaatttatttgtaactaggcatctacaagaccaaattgttaaaacctcaagcttataatcttgggcttctgtctgtggcactattttagtaggtgggcaagttcaactaaagccagccccatgggtgtatttggaaggagatgcaattgccatcacacttgattatcccttctcatctctcatcccctcttctctcactcctgtgcctgaaataaacatatacatatacaaaaaccaattctaacaaaaacagtcacacagagtttattgctcacagctatttaaagaactattccatggaagagtctatacaactcaaggaaatctgtgggtacttaccagatatatttggctccagatttcagtggcggcaggttaatggagaagggaaaagggaaataggtggatttgtaggtattatacaatgtctgaatctatgctgaatcacacaatacatactaagaaatgctcacagaaatcaatgaaaaaacaagaatagccagagccactacctagtaatttacaaatacaaaattcctattacttggattgaaagttgtcagtaaagaaattgactttgtgccttgagtccctatttgacatagccgactctcctatcaataagccccctcacctgcttacccagtagtgctgacttttctttgctcgccttttacaccctagttactcttaaatttgtgccttcaaattctgtcaacaatatgcacacattgaagactgtttatcctaacaagtttcttccatagtgtcgttcatcaggatcctaccatagtctgctggtaacaaagcttaatcaacttggaaccatatgattctgggttatctggaaagctaagactaaagatataatacattgataatctttgaagttatcaaatggttgcaaaactaaaagtatagtttcacagaatcattttgctttccacaggtatgcaacaacatcatcgtttggaaaaaaaaattaaattatatcgttggtaagaaccgagaccaagtagcttcaaatgcatttaggtgtattaggtccgtttgatgtcatgctttcatatataacaatatccctaaaaagttgtgtagcaatagggagagacatatttgacttctgctaatgagtttggtatgcttaaaacattaagctttttagataagctcaaaaccaaactgaatttgtcatccaaatctactttggaaaagaaataagcaatagctttcacaaatttttaacaggtaaattatattaggccaaagatgtcacttaaattctaatccctatttctgagtatgatgcatgatttaaaggtattacaattaatgaaaaatataaacaaatgttaacaccttcatacagcattaaaaaaagcaaaaaagcagtggaaacctgagtaaaaagaagccaggaagcagctgaaaaagagaccggttcactgtgagaaatgtaaacctctcagacagtgctacggccccgaatccaacagctcaggaacaaggccaattattgcaaaatattaaatgtatatggtgaagctacaaacttgtcaagagtcataagaataataaaagctacacagaaaacagctagggctttgtaaacctaaaatcttcactataattactacctgcagaaagtttctttatactataccacactccttatatgcagtgtacttcacagtattcaaagcatacattttatgataaaggtttaaagtaataaatctttattagtgaaactggtaagtaatctgatcttttgaaatagttgctttcattgactccagttattgacagttggttgccaagctgttacaaaccaattctctattattctaccttttagaactagaaatgactcacatgagacacaaagaattatggagttttacagtacacagaggcttcaacagacaacacagtaaaaattccatactttgcaaatgagtccaactgaaactcagtggctttaagtgatatgcctaacaccagttacaaatgactaagggccatcaggattctgacttttattttgttgttctttcccattatacagtgcattgttcagaaagtcttatgtgtgtagccagggtttcttctgtttctgttgacaggggtttactcaaccttgttttgaatgaacagttcagtagtttcacattcataacaaaagactagtacattcatttccccagcagtaatgttagtcctgatttcagttgtggtccactgggacacatggataaaagacctagagcattttatccttgagatatttccccatcctcctccctatccaccaaaggaaaaataatgaaagatcctgtatttctactgcccataccctatctggtctaaaaatactttgctcagttgggcttgttaatttagggcaaaatttctttaagttcaaatacaaacttttaaacattacttgtgccacagtgaaaaaaaattgctccaagtctactagtgttttcattatttggttgaataattagtttcacccttttatgtaattaaaaaaaaacatgcttcttgacactgtggggtaagcaagtgttgtttgacaagaaatacaaatataagagatatgaaaaagtatttctcatttttaatcagattgggatagtagaatgtagagaggtaagaaaataaaaaccaaaaggaaacccagaagtatgtttccatataaaaatgtaaattatgagacagtaattgctatatacctgtaaaaaaactcaaaaacaataaactatcatgttaatttcccagtacattttacttttctacactagggcacatacaaacataaatgcacacttttctgttaagttttttttttttttttttgagacagtctcactctgttgcccaggctggagtgcagtggcgccatctcagctcactggaacctccgcctcctaggttcaaacgattctcctgcctcagcctcccgagtagctggtattacaggtgtgcgccaccatgcccggctaattttttttgtgtatttttaaagtagacacagggtttcacaatgttggccaggctggtctgaaattcctgacctcaggtgatccacccgccttggcctcccagagtggtgggattacaggtgtgagccaccgtgcctggccttctgcaagttttgacataaaaattaatgatgagctaactataaaaaagtctttagattataacttttaaaaaagagttcaaatccccactaattctatgaaaaggttcaatacaattaccaacacaacagttggcactggccctgctgaacttttctttaaaggaaaattttctatgatacttattagcataacaaaattcctttctcttttagataagaatgctttgaggatttattccttttattcttcaaactgaatgagtcaactaacttaagctgtaagttaagaggatactatataaaacagctgaaaggacaagtctagcttttataaagtgttatatta

SEQ ID NO: 1880643 - DNA, 4001 bp, Homo sapiens
tcaaagatatcaagtactagtcttttgatggtgaataaaacaaatgttaatggggatggtgttttaaaaacacctttttgggacatccatataaagtgtttttcagtttaatggtttttagtttattcacagaggtgtgtgtgcaacaatcaccacaatcaattttataacattttcttcacctcaaaaaggaaacccgtagcaattagcagacactccctgtccctcatcccattccatgtcccagccactagtctttctgcccctatagatttgcctattctagacatttcatataaatggaagcatgtaatatatggtttcttgtaactgacttatttcacttaacattatgcttttcagggtcatctatgttgtaacgtgtatcggtacttcattcctttttattcccaaataaaactccattatatggatattgcacaagtactttttttaaagtagtttttaagttacaaaagtacaacgtgcttagtgttacaaatgaaatgaaatggatacataaggaaaatattaaaaatgtatcttcttcctccttttgaggtaagtaatattaatagattcatctgtaatattccacattttactctatacagatgcacatgtatacacttgggatttttagggtttttttttttgttttttgttttttttttacagagtgtcacccagagtgacagtgtcttggctcactgtgaactctgtctcctgggctcaagcgtttcttgtgcctcagcctccagagtagttgggattacaggtgtgagccaccacacctggctagtttttttttttgagacagagtttcgctcttgttgcccaggctggagtgcaatggcatgatctcggctcactgccacctccacctcccgggttcaagcgattctcctgcctcagcctcccgagtaggtgggattacaggcatgtgccaccatgcccggctaattttatatttttagtagagatggggtttctccgtgttggtcaggctggtcttgaattcctgacctcagatgatctgcctgcctcggcctcccaaagtgctgggattacaggcgtgagccaccatgcccggcctaatttttttttatttttagtagagacaggatttcaccatgatggccaggctggtctcaaactcctgacttcaaatgatccacccgcctgatctcagctcactgcaacctctgcctcccaggttcaagcgattttcctgcctcagcccgcctagtagctgagattacaggcgtgggccagcatgccccgctaatttttgcattttttagtagagatggggtgtcaccatgttggactgtctggtctcaaactcctaacctcaagtgatccgcccaccttggcctcccaaaatgctgggattacaggtgtgagccactgcgccgggcttttttttttttttttttttttgagacagggtctcgctctgttgcccaggctggagtgcagtggcaatgatgtcagctcactgcagcctctgcctccaggctcaggtgttcctgctaccttagcctcctgagtagctgggactacaggcacgtgccaccatgcctggctaatttttttttttttttgagatagagtttcactcttgttgcccaggctggagtgcaatggctcgatctcagctcactgcaacctccacctcccgggttcaagcaattctcctgcctcagcctcctgagttgctgggattacaagcgcctgccaccacacccggccaatttttgtatttttagtagagatggggtttcaccatattggccaggctggtctcgaattcctgacctcaggtcatccgcctgcctcggcctcccaaagtgctgggattacaggcatgagccaccatgcccggcccacgcccagctaatttttgtattctttgtagagacggaggtctcactttgttgcccagattggtctcaaattgctgggctcaagtgatgcaccagcctcggcctcccaaaatgctggaattacaggtgtgagccactgcgcccagtcctggcctaatagttttttaatagttgcaaaatcgtccataaaatgaaagttccccaatgtattgaatggtaaattgaataaattaccataactggcattgatggatattcaggttactacttttcaaaaacctattgtattacaaataatgttgcagttgtatcctggtacatgtaccttttttttttttttttttttttttggaggttggggggcagagtctcactctgtgcccagactggaatgcagtaccacaatcactgctcacctcagcctctacctcccaggctcaggtgatcctcctgcctcagcctcctgagtagctgggactacaggtgcacaccaccatgccaggctaatttttttgtattttttcgtagaaacggggtttcgccattttgctcaggctggtctcgaaccctgggctcaaatcgtccgcctgccctagcctcccaaagtgctgggattacaggtgtgagccactgagcccagcctctttctccaagtttaactttattttgtatccaacctattttcttctcatctatattgttcttcatgttcatgtactagttatttttgtttgtttgtttgggtgaagtattgtaattacagaaatgagactttttttttttaaatgaaaggcctcacatatttattactgaacccagccaaccaatgcgttcataacagattcggagaggaaaacacgtcgaactctccagataggggtgacattttcagcttgatatggtaacgtgatcgtgaccttcagacagcataaatatgtgtgccatctcatgtacaattccttatagacccagcttggttcttctccaatgtctccttttggagttgtacctgattttatttccagttttcatccgaatccactggggaatgggacgattttgcttttgtttcttgggcaggaatcacttaatcctgaaagtcttgtgagaagacatggtgagggtggagtcaagaacacaccacgatggcagagaaaggaaaagaggcatgagatcattttatacccatcatgcaaccacaagcttttctcaactgataatactaggacattagttatagacccattttttttttttttgagacggagtctcactctgtcgcccaggttggagtgcagtggcgtaatcttggctcactgcagcctctgcctcctgggttcaagcaattgtcctgtctcagcgttcctgagtagctgggattacaggtgtgcgctaccacgcctggctgatttttatatttttagtagtagagacagggtttcaccatgttgaccagcctggtctcaaattcctgacctcaggtgatctgcctgcttcagcctcccaaagtgctgggattacaggtgtgagccactgcgccaagctccaacattctttttttgtaattttttttttttttgagatcagcctgtcaggttggagtgcagtggtgcaatctcagctcactgcaaccttggcctcccaagttcaagtgattctcctgcctcaacctcccaagtaggtgggattacaggcatgcatcaccacgcccagctaatttttgtattcttagtagaggcagagttttgccacgttggccaggctggtcttgaactcctgacctcagatattctgcctgccttggtctcccagagtgctgggattacaggcgtgagccaccgtgcctggcttccttttaatgcatgcataatgttctattgtatggtatgttggggagaaaaaaagagttttcctctacccttccgaggttttggttgtgatagacccctgtaacaaaagacagattaacaagaagaaaacaaacaggaccaggcatggtggctcatgcctgtaatcccaacactttgggagcccaggagttccagaccagcctgggcaatatggcaaaaaaccatctctacaaaaaatgtaaaaattagctgggcatggtag

SEQ ID NO: 1880644 - DNA, 4001 bp, Homo sapiens
cagcacccagctcctgtgctgctgcagcttctccagcatgcagctttccagtgcccagctcctgcaggagtgccaggctgttgcaatgcagacagcttctccagcacctggctccagcaacacgtcagtcaggagtacccaacagccaggagcttctcccagcactcccctgggaaaacgtagcagcggtgtgcttccagcaagatacctcccacaaacaactttccttgggacccaaaaagatggatttccagtaaattccagagggtggatttccagcaagttctgccaacatggcattacagagacgttgccatccagggagccatcgccacaccctctccatcaaggtgtggatctcaaccctgcggggcctcttccttgggcactctgtggcaaccctagaggtaggggctgttctcatatctattatttttgtattctttggagttatttttacttcttactagccaattcctcattattccaatccaattagagttaataattcgttatgtgaaactttccttgttccaatcaccatgtggtttctgtcttctgaatggaccctgactgatacagtcacccgcggccccaaagggcttttttccatcctcatggcccttgagctcaattcaacatcctggccagctaatcactccctgcttcaagcactcactcaacagccatttcttgagtgccattgtggagccgggccctggagtgaaaggagacccctgcttctggagctcaccagcaactgccttctgtgtgttctctcccagccatgactccatctggctccttgcttctgggtctccagcctcagattctgcagctttgtctctggggctgtccgggagtcttgatcccacttctgcacggtgggtgctcctcaaaggtcatgttctaccttcagcttctctctaaatgctcttcctctaagacacctgggcataagttaacatacgcctcctactgccaggggctccagctctatttattttcatcccaactggatgacttgcagtccctaaaatcctactcttccagaacatgcttctttcagagccggctctattttctggtttttccctctatgtggaagtaacattcccctcccttcagctgcctaagtcccaaaccctggagaaaactcaggtcccacctttcccctgggtcctcacatccagcaggtacctggtccttgggcttctctcgtccccctattccctccaggccctttgtacctcttgtgtctgtggcacaataacctggtagatgccctggagcgggtccacctgcctctggcatctctacctcccaccccaccctatcagcaaggattgcccacacatggctccctctatgaaaacctatgacacctcatgacaattttaaaaagttgattgtgaatgtactaaaaccatcgaactgtacacttatatgggtgaactgtatggaatgtgaattatatcttaaagctattatttttaaaaatccggtgatgccaaagatttgcacacgtggtaaaatatacgctctggcctggtctcaccagggctggctacaacgcagcctccgcccactgctctggccgtgcccccacctctcccagctgcatcattccaggcccggctgctgtcccggaatgacacccctggctcccaccctctcccacagggcccactcagctcctctctcccagtccttcaacccaacatctctcctcccccaaaacaccgtccccttctcctcgaccacccacccaggggtcattgagtgttccatgcgtatatagatgtgtctgatttctcaaagagacgaggtcagagttcatgcgttgtatcttgctgcccgtcccccccgcccacagcttgtcccccgcaaccccgttccgggtgaccctggaggcagagaggactgtgtgaagtcactcccaggcagctgcaacatccccagcacagtgctgcggtgcctagagcgaccccccacaatccccattctaggggtcgcttggcagagcccccaaggcactgcgtcagtggaaaggctgtttgcaggagctccgagggcagaacatacacctgctgtgggtctgcaggctcacctgccccagatccccaaggtgaaggggttggtgagggcctaggctatcagtgaaccacaggaatcaggggggctgagtccttgtctggcctgtgaccaccctctccccacaccgtccatggccacagtcccccaaccccacttcctaaaccagctccctcttgggtcaaaaccaggaggtcccccaaagggtcttcagggcttgggagcggctgttggagctcgtcccccaccaccccaaccaattcagcaggaagggagctcgctgctctcagatttcccacagggccgcctttctcctcatcgtctgtcccaacaaaaacaaaccatttgtggagggggccgagggagggagaagagcccagggttctgagcagcacatctcagaaccatgggccctgcctccagcagtccctgcctcaaaccctggctctgtcactgagagattcgggcctcagtttcccaagttgtaaagcggggtgagaaagagtccctatttcataagtctattttaagataggagggaatctgagtcaagtgtttaacatagggcctggcacgtggcaggtactcaataaatgatcatttaaaaattattatgtgcttgatcagaaagaaaggcaagccatatgttcttaggaaacctagactctggcttcagaccacacttcagagtggcttgtgctcactcctaggaacggctgctgtgccaggctccccctcccagctgatgcccctaagtctccagcccaggccccgtgccactagaatggggaatgtatttaccagagaatgtctacctgccactgtggcctcaggagtctctcacagtcatgcagaccccacacacacacacacacacacacacacacacacacacacagacacacagatacaaacacacatagatgcacacacagagatatacctagacaaatgcagagatgacccaggcgcacaggttcacacacgcacacagcccccctcatgctgcacacgctggggcacctggagccagaggatgctgggcgggccttccgacacaggcacacgcgttgcacatttcacctactgtatgggccaaagaggcatttggaaaccagcttgggaacctcataaccattcataacattgttctgagagaaaacacaaaacattgccctataaacaaacatttgcaatagaattcctccaaaagcttggaaatgcctgtactagaaaactaacagagcaagaagagaaaaaccacataaacttggtttgcctctgcaaaattaataccaattacaaaaacatttatgtgaactgcttaccatttacacctaattaccatgcagcacaattatgcatatcattaagggtatgccagattaattatgctgtacatttcatttgattacaacgccacaccctgagttcatgtatgccccacttccagggggccagtcctgcagcatggctgcttgcacaggtctgcacaaaccagagaaacgtggatttccacactcggatggaccgcagcccccaccccacccccagccagagacagcccgactcccacccggccttcttggcagcatcaacaagagccccgctgcgaagccatcttcccagcagatcctccagaatgcagagatgcttcaaaggtctccccaggggtgtggctgcatgtcacaaggccaccatacagcccaagggccatcatgtacggccctcacagaggaagcggccctctctgccatctcctgaggtctggctcggaaagcagggcagcctagcccatgtccaggccaagtccttcccaagctcatctcccagacccaccagggctctgtgcccctatcccctggcacactgagccagctacagggcaaggtcccagctgtggtccc

SEQ ID NO: 1880645 - DNA, 4001 bp, Homo sapiens
gagagaggagtctgttcccggaactgtagcacaaaagctagaggctgagtaggaacatcttaaactaagtcctcagtcttatttccagttttcttcctgtagatcggggcttaggacaccctgtcacattttcttcactcctccaccaggaattcctaaagtccatgctcttggatcctggcaaatcgaggaggctgggggatgtggcaagcttcagcaagactgcctgggaccaaccctgcagccttaatttcccaggcccactcagcccagctggccagcaaaggcaggcagggcttccgtgtccacacatgagaatgacctgcagctgttctttgtccaggctgaggtccaggattcccattgcagctcctaggaaatctttaaaattaggtcggggatgaggctgtcagtagattaggtagggaacttttatgaagttgagggtgaaccatctggagggtgaactggctggtgtgatttagaactgggggtggtgcctagcagtgcatttgtgagaagacacagccaggcttggtatatgatgtggtgtgtgtgtatattcacaggcatcgtggagcatatacactttttttgtgtgtgttgaaataaaccttacagattacaaagtacttttttttttccctgagacagggtctctctctgtcgcccagcctggagtgcagtggtacaatcatagctcactgcagcctcaatctcccaagctcaagtgatcctcccgcctcagcctcccatgtagctgggactacaggtgtgtgacaccatgactggctattttattttatttttgtagagatggaatctcacaatattgcccaggctgatctcaaactcttgggctcaagcagtcctctcgcgtcagcctaccaaagtgctgggattacaggcatgagccaccacgcccagccagattacaaaatactttgacatcttttctctacagccctcaaaaggaggcagggcaagcacaattaaatcccattacaaatggggtgactgaagctccattcatggcttgcccagggtcacacaaagaatgaatagcagagccctgagcctgtgtgcttccctctgtgccaggctgctttacccaggcatgggtgcaccttgtgcatgggacatttctcctttgttgtgtcctgagtaccttaagccactcagatattgctcaggtggagtgaggggaaaatgttttcaggttgtattagtcaaaacaaaataccacacactgggcgactttaaaatcatacatttatccctcacagttctggaggcttggaagtccaagttcaaggtggcagctggacgggttcctggtgagggctctcttcctggtttgcagacagccaccttctcttcgcatcctcacttggtgggaaaagacagaggagagaaagagagagagagaaatgagatagagagagagagagaaatgagatagagatagagagagagagagagagagagagagagagagggagacagagagacaatgctctcttttcttaccagatctataatgagggccccaccccatgacctcatctaaccgtaattacctaccaaaggcccatctccacataccatcacattaggggttagggtttcaacataagaatttggagaggacataaacattctgtctacaacatgagtggagatccatctcttccttacctctggtaaggggaccacacgctgcagccagtgagacagtggcatgttcttgttacaactcaatctaactcccccagaagaggaggcagggaaggcggacaaaactgggagagggagagagtgttaggaagagagtagggtggccagaggcagcaaataaaatataaaatgcttaattttgaatctcagataaacaaccaataatgttttttagcataagtatgtcccaaactaagcttgggaaatatttatgctacgaaattattcgttgtttatctaaaattcaaactagctgggcatcctgtcttttaatctggcaaccctaaaaggcaagagccaaaaatgccggagggaagccaacggattccaggagggacaactgctggactttggactgatgatgctctttttatatatttaactttttaaaaaagcctcttttctttctttttaccagcttttcactagctttttaaaaattggggtaaaacatacataacctaaaattcaccgtctaaaccatttttcagcatacagttcagtgggattaagtagattcacaccgttgtgccgccatcactaccactcatttccagcacctttccatcaccccagcctgaaactctacccattgaacacgagctgcccaactccgccttgcttccccattcctggcgaccactgcttctgtctctgtgaattctgactactctaggcacttcacaaaagtggactcatacgatatctgtagttttgcgtctggcttctctatttaattcttaaaggggggtgggaactaaacagatcacaagggagctgcccacagaggtaaagacaaggtcagataggctgagagacgcaggaaagcgggtcaatgtgtagggctggagggcaggggcgggccctgggcctgggctgggggtcctgccccggggcgcacccagggcgagggctgcccggaggagccgaggctggcggacagcttggccctgagcttgaggggaaggcagcgatgggacaaaggacggaggtctaggaagagggtctgcagagcagaaagcacgggtaggggcggcctgacgctcggaagacaacggatgggagccgtgtgcacgtcgggagctcggagtgagcgtgagttccgtgcccaggcccgcgactcggtccaccaggacagcgctccgggtcgacggggtcctggagccgcgctcggggagggcgcagcggagggtgagcggcggcgttaggacccggaggcgcgggcggaggtggcggggctaggacccagcggctccggcagagcggaagcggcggcgggagcttccgggagggcggctcgcgggtgaggaggcgtccggggccgcgggaagtagggtcgtgggggcctggcggggcgaagtaggggacccggaggggctggagggaggcgggcgggaggcccgggaccgttcctgaccgagaagcctgcgccaagctggtgttccgcggccgctgcccggtgcccggctccactgcgaacgccgccgctgggccccgaccgcccgggaggcgtcttgggctcgccccggagcttcctccctggagccgcgccctgcacccggccttgcccggccctagcagggaagccaaggcttgtggggcgcagggacccgggctctgcggggtcccggttccgcctccccactcctgcgtcttcccgccccggccgggttctgggaagcctcgcgcggctcttccgcagctgctgcccgcccggatctcctggtccctcgtaggggaccccacttctctgacaccgcgttgggttcccggggcctacagcgaggcctgtaactccgggagagaccctggagcggggtgtgggagaacggtctggaggaagggctccgagcacttcgaaagtataaaccgcggtcccaaagaggcgtgctgtgtctgcattttcctgggagtgcacggtttacattctgtaaagcagtgctgtcgactagaaattttgtgcgatacacatgtacaagttttgtcacttaaaaagaatttgaaaaaacttcatagatgcaaaaaaaaaaacccaccattattaaagaatacttaggcatttgtggaatgcattgaagagttaacaaaatggataggcaggaaatatcgcagacctagagtgaattacagttacccactgtggaactgaggagctagggtttctcataaaactccctgataggagacgacttttgataaaaatttttttccgccaacaaaatcccctgtcttctccactagttattgtctgtccactaaataag

SEQ ID NO: 1880646 - DNA, 4001 bp, Homo sapiens
tcactcctagagttgtcctctgccttctatgttattaatttccctccacttggccattcccttcagcttacaagcatgttgtaacaaaaaaataaaaaaataaaaaaaaacagccgggtatagtgactcctgcctataatcccagcactttgagaggccaaagccgaaggatcacttgaggccaggaatttcaaaccagcctgggcaacatagcaagaccctgtctctacaaaattttaaaaaaatacaaaaattagccaggcgtggtggtgtgcacctatagtcccaagtactcaggaggctgaggtgggaggattgcttgaggctgggaggtccaggctgtgtgagctgtgatggcaccaccgcactccatcctaggcaacagagagagacactgtctccgaaaaaatataaataaataaaaatttacaaaccaaaaagcgccgggtgcagtggctcacgcctgtaataccagcattttgggaggctgaggcgggcggatcacaaggtcaggagatcgagaacatcttggccaatatggtgaaaccgcgtctctactaaaaatacaaaaattagctgggcgtggtggtgcgcgcctgtagtcccagctactctggaggctaaggtaggagaatcgcttgaaaccaggagatggaggttgaggtgagccaagatcgtgccactgcattccagcctgggcgacaagagtgaaactctgtctcaaaaacaaaaacaaaaacaacaaaaaaaagaaaaggtttttaactccatatcccctttcagttgccactaattttcctgctcccctttttagcagagtcttcaactttctcaacttcctcctcctcccattctcttgaacaatcttcagagaacaaaaagttattattaaggtcaccaatgatctccacataaccaaatactcagtttcacaacatttgctctgattgtttgctccatataatatagtatctttgcttgtgataatttgtttactatcgcccctgcccccactatcatataagcaattctcaaggtaaaatggcaagtttgctctgtttaccatgtatccccaactcccagaacaccgtgtgcctatcatatattaggtgctcaataaatacttgttgaatgagtgattcaattaattgattaatcatcatcaggggttataaaaatgatgtggctcagctggtacctgtgtatcagtaagtagtaagaatcaatgtttctttgagacatatctgtgttacttatttaacctaatattttgcagtggtctaaaaagcgatgctgtccattctcagaaatggagcagaaaggcaagagaaaggaagctgatattttgaatgtccactacctggcaagtactggaccagccacttgcatatacattttctcaattattcctcacaaaacctggatgagatgggtgctagcatctccattttgctgatgaaggaacggaggtaaaaagagagattaaatagcttgtccaggttatccctaaggtgatttcacgatgaatgaggaagccatgctgttttctagttactttgggctagatattaaatgctgtgaattcacaaaatttcagaagaactgggctgataaagattagtgtaggtcagaatttccaaagtagaatacatatttaatttggtatatttatggtgctgtttttattgtcaaagaatgtcaaaagtcactaaagtaaataaaacaatgaagttcaatgtgactttattgtttgttttcttttttaagcatactcactatcacgcgaggcttgtaacctttacccagaggacacatgctgtggtatagctatctggctaaaggtgcctgagaaaatacaggatgtccagttgaatttgaatttcagatgaaacacaaataatattttagcataagtatgtcccaaatgttgcatggagacatacttattctaagaaaaatttgtttatctgaaattcaaattttagctgtgcttctgcatttttatttgctaaatctggcaacctacacctggccaaatgccccaccaccctccacatacttatcctatcactctgccagacagattttgtcaaggaggtcaagacagaaaagaagggagagaggacaactttgaaaataccttgaaaagagaaaagcctaatgacacactgtcttgctttctgtaagggatggccagtttacctccagactcctttgagccccatcccacctctcaggccttctcttttttacacagaaattgaataaccatgaacaaattccatatgttctctagcctcggtttctccatctgcaaaacagcagcagtcttaggtgtcagaaaaaaacaggtgatgtgagatgactgacttccatagatagtgtttggtcaagacttctctgcagcttctaaacagaaacctaaatgattagaagaaagcagctacgtgaggggaaagagagagagacagagagcaagagcaatcttgcgcttgtatctgtgcaactgtagataagatcaagaagacagagccggacaatgtgtacaaaatgtttaatagggacagcagattctatactgacctgcttttcaacaaaaataaaagaaaccagattttgagtaaagtaaaaacttgacaactggggcaaaagtaggactaatctataaatcactcttcctgaagtgggtttaagtggtgacttgaaatgcatgctaagtgaggaagaaaatataaagattgggcataaacacagcacggagttacgatcaaattaaagttgcaatgaaattaaccccatcaatacttgctactgtgtataatgggcatcttaaaatagggcagtgttatggaatgaatagtgcctaccaaaattcatatgtggaagccctatgtgactgtatttggagataaggtatttagaaggtaattaaggttaaatgaggttgtaaaggcggagtctaatccaacaggattagtggccttgtaagacgatgaagaaatctctctctctctttctctctctccctctttctctctctccccctctctttttctcagcccacacactgaggaaaggccatatgagcacacaggaagaagactgccatctgcaaatcaggaagacaatcatcatcaagaacttaccatgctggcaccccgaacttgggcttctgttgtttaagccacccagtctgatattttcttatagcagcccaagctgactaagacaggcagtcaagaattaaaatctgcttggaggagcaccaacatacccattttaaaaaccttattatgtgaaatggctacagttatttaaactcaagaagaacatggaacaagaaagagaaataaagtcagtgagatgaatggactaaaataacctagcagttaatggaataaataggaatgaagccccttttccagtgttagggtcagcctgggatttatcaaggctctaaacaaaaggaattgatcatgagaggttagcagagacatacgggaagcactgcgagagtattcagcactagttggagatttgaattctaactttaaaattctgagacttttgatctattaatttatccattttcattgttcttttgctttgactataaagaaacaaaataaggcacaatcaagtgaaatctcttgtccaaggttcattcatttaagacatgttaaggtatgagagaatttgaagacataggagttcctgctcacaaggacatagaatgtggtaggaatgatgttcagaaaatccaagcagtgaaaacctgggtttgaaaagacattgggtaaataactgttataagattgaatgaatgggtggatgtattgatggatggacagatggatgggtgaatgaatgaataatacagtggttgttacagaggttcacagaaggcttgggtcctaaagtggcagcctctggccaggttgaacctatttgaccataggcattgaccattctctgacaaactggtagcaccctgtgcctga

SEQ ID NO: 1880647 - DNA, 4001 bp, Homo sapiens
agctctttggtgcttccaaaaggtagaaatggggaaccctctgttcagcagagcatgtttttgaatttggaggttgcccagagaggcctggaagccagtgcaggggagggccacattgttcagcacaccaggatgctgagtttgaagggggcatagggaggacctcaaaaatgacagtaggggcctgacgcggtggctcatgcctgtaattctagcactctgggaggccaaggtgggcagatcacctgaggtcaggagttcaagaccagcctggccaacgtggcgaaaccccgtctctactaaaaatacaaaaattagccgggcgtggtggcacatgcctgtaatcccagctacttgggaggctgaggcagaagaataacttgaacccaggagggagaggttgcagtgagccaagattgcaccactgcactccagcctgggcaacagaatgagactctgtcttaaaaaaaaaaaaaaaaaggaagcaggatatgttgaggtatggaacacattcaggaagctgcaaggggaagtttctaggatggagacctaggaaatttttaagactctaagaatctttgcagtgaaacagctccatcactacctactgagaccaggctactcaccagggcctggaccctggtctactcctgtaaggtacatggatgtgctttggtcaaggaatagggtgagggggatatccacgcctgcatgtctgagcgagtttggcgcgcaggcacacacttccacttgttacacaacctgtttgtttaagttcatacttggctctgagccactattgtctgtagaaggtataattgccctactaatgctgtacaggggctcttgaggctcagcttggctcaacatggctggacatggctcttgtgcaggtgtgctggctcccagagaaagagatagagagagagccaaagctgtctgtcttgcagatggacaagagggagccaggacatagctcggcttgctcatgcccagagagagaaagagttaagctgctgaccctgaaggcagtggagagctggccgcacaggtgtgcatgggagctgcaggactaagcagccaagacatggcagacactgtaaaagagctagtttgcatcagctgtgtaagagagcggctgctgaataaaaccatattcgcctgcctacggccctccgagtcttctttctgcccatccacccactcccctcggacttcagctatgggctggaccctgatcccaggacctgataacccctctactctgtgtgtgactcactccttcttttcctcagtttagatttctgagagagaacctcattggcccaatcagtgcccactcccttttcatgtcaggcactcagaggtcagattcccgcgatggccaatcagcggtggctgcggagtagggaacaaggccgccctcactagcaacaacttgagtctgcttctttcaccaagggctgcgtgggtgagtgctcccctcagagtgagattcgctgctgctcctggaaaggaccgagtagtgccgtctacacattttgcccaaagtcatacggctgttaagggtcagaggcaagtttcaaatctcggtctgttgacactaaaggcccttagccatctgtcctttattctacattggcctttcagagcaagatgtaggagacacaggagggtggaaagaaattctttggccaagactgaaatatggccagatggtggaaataaaaaagtattctttttggtcactcctatagaagatacatttacaaaccttctatcaagaacagttattaagcccctaaacaaacaaaagtccctcgtgctacaggataatgcaggaaagaaagccaataaatcattacccaaattttggaaaagtggcatgaattgcacattaaaaagtcaagggaatggagtgaggtcatctttaaaggcagaaggcccctcaaattagagccagctgtgctccgcctctacacctggctccacacgcgggctcgtccgcgtgagagatgagccgggaatgggataaaaaccatcccagaacccacaggaaatgcaagtccctcgccaggtagaggctgaagtaggaatgcaatgatattagcagctcttgaaactccatagttcagtacttcagagaaatcctcaagggcttttaaagctttctgttcctttgctttattttgtttttaaaaactgtctcccaatctctttcccttcctctagtctcatggttacttcctgttccaggcacctgcacaatagtcccaatttcccctaactaagacccctaagtgtttgtcctaagttccgatggcgagctctgtaccccaacctcctccacgaaaaagggcggttcatagaggaaattccaaccaaggctccttgggtctgaatcccgttctcattcttaccagctgtgtgatctagagtctatgccttggtttcactcatttgcaaagtggggataagaatagtaaccacccggccgggcgcggtggctcacacctgtaatcccggcactttggaaggctgaggcgggcggatcacgaggtcaggagatcgagaccagcctggccaacatggcgaaaccctgtctccactaaaaatacaaaaattagctgggcgtggtggcgggcgcctttaattgcggctacttggaaagctgaggcaggagaatcgcttgaaccagggagtcagaggttgcagtgagccgagatggtgccactgcactccagcctggcagtagagcaagactccgtctcaaaaaaaaaaaaaagaaagaatagtaaccacctaatagacttgtgagggttaaaggagatgatttatgctaattactggagtagtggctggcacatggtaactgcttagtaaatattagctacttttacagtgaagtagaggatagaaaggagttgcatttttattggataacaaccctagacattttgtgcattccagagaaaggtatgaaaaggaacttcctggagctgcctggtctggggcgtgcaagcatccctgctggcatctctctatgggtctttgcttcccccaagcatcatggctgaaaggaattttatgaactgttgcctttcgatctatttccaatcttatgtgcatgccctttgctgcaagacgctaaagtgtctcccactagagtaggcagagtgtatttctctgctccatggatgttgggcttggctatacgacatgctttggccattggagtgtgggcagagtgacagtatgtcagttccaaagagtgtcagtgctgccacccacccctcttgcactttctgctttcctccatgggaagaacataccccaggtagccactggcctcagaatgagagacacatgaagagaactaaatgcaacccagggcctgaaggagagctgctctggccagcaggcacatttgtgagtgcgatatagatgattgctgctctaagccacggggattgtggagtttgttatccagtaggactcagcagaaacctggctgatacaatgtttttaggctcaacagggtgatcacagcatgaacagcagagtacatggctccagacatcctacaagctgctgtccgaataaacttctaacatcacgcctttcccccactgcctgtatacttaagtccactctcctttgctctacggtgaaggctcttctcacttgaactgcaaccaaattttcctcacctgtcccctcctcccttaacaaattttccatcccaggagcagtggctcatgtctgtaatcccaacgctttggaaggctgaggtgggaggactcgagcccaggagttcgagaccaatgtgggcaacataatgagaccttatctctacaaataataattaaaaaattagccaggtgtggtggcacatgcccatagtcccagctactcgggaggatgaggcgggaggatcacttgagcctgggaggtcgaagctgcagtgagccgtgatggcactactgcactccagcctggat

SEQ ID NO: 1880648 - DNA, 4001 bp, Homo sapiens
ctaaggccctcctggtgctggcctaggtcaggcacagtggagaggtggaagcaggagcctggcttggtcagaggggtggggtcaagggggggcgttgtcagcaggaattccagcaactttcctcaggactgccgcctcaggggcctgtctcatcctgttctgggaccctgggccagggtggctggaatgcagcaggtcctgcattcttttacgccctcctgagggtcagcaggaagtgaaggccaggccagggaggagaggcaggagagggagccaggaccgggaccgagggcggggtcagcccgggcagaggcacctggctcgaggctgtcctgggggagctggcagcagctccagccctgcctggaggtgggagcagggatctgtagccccactgcaggcagggcctggagcagcgcaggcagtgccctacccgcttactgcaagagaagtcacccctcaggcctggggtccaggaagcccttacccactagaggccatctggggtggggacccaggactaggtaactacccagaggttgaatgcctgggtcagactgagtttgctgatcttccgcaccctctaagtacacacactcagggaggagcccgagacaagagaagggaacagagaacccgaatccgggcttgggcggctgccgcttggcccctgtagcctctgtgcctgctgacatgacagcaaggagacaggttgtcagaggggcctgggagagcgagggagggccgaggtaggggttcttatcctggagcgctccctccttgccctcttttcctgtctgagttctggaatgtactgatgcagggggctctggcttgagctagagggggagggagtcctccgcaggggctgcaggtccagggattccccagggcctggacttacatgtgcccatgctgcagacagagcgggaatggcaagtgcacctgcgccccccgcccctccttacctccagatgcctgctggagggggagttgggggtccaacagagtctggggccaggagggccttgtgggagccagctggggtgaggacagagcccggctctgagagccctggggcctagtagagaaggggtgctccttccccactcctcacatgggtgggaaggcgccctcaggcaagaagactgggacacaggtacactcgccagggaccatccttcactctgcagcctttattcactgatgggattctgccccagtcccacccccgtgggggcaggatttagagcaggaaccgcccctccgggtcctttcctggggcctgtgccaggctgagcagactcaggaggcgtctctccgagggtgtgggctgtgatggggccctgtgcacccatccaggctgcccagaccaggagagcacaggtcagccggacacatgatggtaatgggctgggcagtgggagggaaacgtgcctgggggagggggtggcaggtgccagctgagcttcccggtgacacaccctgggctcagctgagatgggctcagctgtgacggggcacccaggccaggctggctgggccacaggaaccgagtgagctggtccaagactcaggactagggctcaagcactcctagggaggagggtgggtggcgtcccccgccggctcctcctgtgcccctccctcgcgaggtcccggcggacccactccccagcccccaccacgcagacgggagaggctgacgagaggcatggagaggtgaggcccgaaacacccgtaagatatgggagctccccccacctgcaggttctgaggggctcctcggcgccgtcagccacctctcacaccccctcacggccgcgcaccggcccccgcgcctcagcctcccccgccgacccctcagccccgcccggccaactcgcccagccggcccggcgacctgcgttgttccagctgccccagcacagcccccgtccctccctccctcctcggacaagcacgggagtgaagacacggagccagagctcgggcgccggcctgggagcccccggcaggctggacgcaaggcgggcgaaggcctgggagcctcgggcaggctggatcgaggcggccccctgaggcccgctgcaggctggacgcacggcagtcaaaggcaggaggcctcccgctggcttccttctgcggagctccggcccggcgcaggccggggccacaggttgtggtcctggacatgagatggcagaggccggctctgcagagtccccctgcagggcggcaaagcaagccccctcctggaagaatgccaggggctggggcctttctgaatggagagcaatgtgcccaagaccagctgtcatcttaaatctccccacccaggggcctccccacccccaggggcctccccaccacttctctcagctcaacacctggggatagagaggcctcaggccaggagggaaccctccccatgtccctctccctctccttcctggcctttctcctcctccaacccagagggaggcattttccaacctagggggtgagtcccggcagcccatccccttccccccgtgcagggaggcatctgggcccttccggcccacccctccctctggccctggggctgctcaggtcaaggtcaccgggcctgctccccgctgggccagggactggaccctctcttccctgatccctgggctgaagttgctgtagccgacccatccttccacagcgctcccctccctcagtcactgggacacttcccttccccagtgctctgaggatttttttgggggggaaggggattatttgtttaatggcagattcatcccccacctcaaacccagagtctccagttcccaggctcctgctcctcaggttaaagcacagagctcttgctccctggctcgtaggcagctgctgtctcgttccatcttccccctcccgatcctgacggttctggaccaccccactctgctgctcctcactaagcccccaccagccttaactttggataccttttaggtcatgcattctcgtcccctgctgacatgtccccaccccgcagtttcctcttggtcatcagcaccttcaccccaaagctttaggcgagactcccatcctgacagtggcccccatccccaatgatggacccagacctcatttgtccagacccagcctggcagctgcccgtgaccagtggctctggagccctcccaaggagaatgcagagagatgatggcgccacgccacgcccatccctccagaagcttccacggctcacacaggaggtgcagactgtaaagccggctttatccacctttacagcctcgtcctagacactcagtgtcaacagactcgaatgcctaaggtaccggaatttggcgtggacagtcagcctgcattgcctcccacggtgctggagtagggctgtgtgcagagctccaggcaccgcagccccccaacacgcaagggaagagcctaggcctccccgctcctgccctctactcagctctgcacccggcaacggggccttcctggctggccgatggctgcgaaggctttccccaagcccgaaccctcttctcgaagcctgccccagcccctggcccatctgctctcggaccccaaccagctccggtggctgtggcatcctccggcacgtccagcagcctcctggggtgagggtgcactggacaaacgacccagggggtttcctggggaccacccactgcccaggctgcagaggatcttttcctcacttttgccccatcctctaagaagcctgcgcccctggccagtccctgtccgcctgggctcctgacgtctgagccagaggcagccttggccccacctgcgaggtggaccggccacggcatctcagctcctcgtcaacggcatccacggcccccagactcaccccatcgtgcttccctcccctccccacacccctgccgtctgcccgaagcccccccgccaccatttcacccaaatgacagcgtcgccaaggagcccctccgccgccgcagaacctccgc

SEQ ID NO: 1880649 - DNA, 4001 bp, Homo sapiens
ggagcagtctcacttcagcacaggcattctgtggctgcgttatattcagacttggggtccccttggacctcagacctttctccactgcccctgaccacaactcagtgaggagcagggggcttctccgtctctcaatggacccatctaacctgcccttgtcctttatgacctttctgctttgggagtcacctgcatactcctgatatccctgcaagccagaaccagggaagaccttcttaggggttgtcagattgaagtttggaacttcacagtccttcagctataggaccaggtgacttagaatggcttcataggagtccacatggttttctagctcattggctgttacgtcagagggctagggtagaagagtaatcacaatagttgtttttgctcatttaataatgataataggcagcatctagaattaacggagcccttgctatgtatcaggcacttacactagattttacatactttatcaaatcttgcaacagccctctaaagcaggggtccccaatccctgggccatggaccagtgtcagtctatggcctgttgggaaccgagccgcatagcaggaggcaagcgaacattaccacctgagctccgcctcctgttagatcagccattgcaatagattctcacagaagtgcgaaccctatcgtgacctgcacatgtgagggatctaggttgtgagctccttatgagaatctaatgcctgatgatctgagggggaacagtttcatcctcaaaccaccccctctcccagccgtggaaaaattgtcttccacaaaaccggtcccttgtgccaaaaaggttgggaacctctgctctaaagtatgtgtaatcatccccatctcacaggtagcggaatggagggaagccaaggaacttactcagggtcactttcttagggtctcttttattaatttgttttccttctaggggggcttgaccaaactgcatttatttatttatttatttatttatttattttgagagggagtctggctctgttgcccaagtggcagtacagtggcacggtctcgtctcactgcaactgctgcctcccaggtttaagagattctcctgcctcagcctcccgagtagctgggagtacaggcgctcgccaccctgcctggctaatttttgtatttttggcagaacagggtttgaccatgttggccagtctggtcttgaactcctgatctcaagtgatccacccacctcggcctcccaaagtgctgggattacaggtgtgaaccaccgcgcccggccccgaactgcatttcttaagcaacagtttatttgttctggatgtctaatgccaactgagtttacataattccagcctaaagcaatcttttagcttatctgtgcagctttaaaacagatccatgcactagttctaccaggattttttaaatatggaaaaaaggaaatagctctgataccctggcactgctttcaagacgcctgtgtctcaggcctcagggaccccagttagaaactgctgtcctgaggttcagaaactatacccatgtccccacccccagctctgctcctctgtccagtacctagagacatcaggccagcttggcaagggacagagaaccaggagaagggcgcagtgtgggtgggcccctgcccttggtagtgggcttcccaagtacctgtctggggctaggaaaagcaggggacgctggagggctgacctgtcttggtgtcagtgttggaaaagggtaagtccctcaggtagcccctgtctagtccccacctgctccactgagccccccagaatccagagatcctcccacactcctttcgacagtctttgcctcttccctgtaccccttgctcccagctcggggtggtccccgggccacatgtcctgtctgtccatgcagcagccacacctgccaatgatcacttttgtgactatgcaactggagtgagaatactagctgcagatcacaaaaatgacactggcagctgtgagggagagagagaaagagggaagaagggagagggaaggacagagagaggaaagacaggcagcgggagggagagggagagacggacagagcagcagagagaaactggcagacaggggaaggaggtggagaaaaacaggggagagggcagagagaaaggaagagaagcgcggagagggagaaatggagagagagggaaagggtgaggcagagacagagtgagagagagatggggagagagaagaggaagaaagaggaaaggaaaaagaatgaaagacacagaaaaaagaggcgaagagacggagagggatgaaggagggacggagagggatgaaggaggggagacgggcaggcgggagtgagagacggagggggcagcaaggcagcgcagtgcagggcctggagacagcggggcaggagggaactggaaggagaaaggaagcaggggtcctggagagggaggggagacagaaagcagagggccctctggaggaagcaggtggaggagaaggagccagtcccgggagcgtgagagggagggagcagagcagcagcggccggcgcggagctggcccacgcgggtggtggaggctcggggaagggcacagccggagcctcaggcctgcttttaggggtgggagcgtggggtctggagcgggcggccagaagtcagaggccgaggctccaggcccgacccggggctccaggccgagcggcgggcggaccccggctccgcccccgcccatgcggtccctccaggcgggggcgcccgcgctcacctgcggaagtccagcaggggccgcgtggaggccggtgtgccctctgccggccagctgaggaagtggaactgcgtgagcgtgcgcgtctcctgggtctgcacgttcttcaggtagaagctccgcaccagaaagtcctcgcaccagatgtgctccgacaccaggttcacctgcccggcaggggcccaggcctgagcgccgcgggctgccccagtccccgcgttgcgcgcgctctcctcgcgaccttctcggtctctccaaccaccgcccggcctcccaggccggttcaaattctaagttccagcggtcccaggaaccctggctgcctgtcacttatctactgctcaggaccactagtagcttttccacccagacacagctattgtgagcctctcgaggtcggagtttctcctccctcttcctcgcagggtctaccagagtatcggtgctacacgtgccataaacttggatgaaattctgtagtattcttactggatttttttcgttaaccaccagcaggaccaatgaaaggctttttaaaaaaaccgtcatgtgcttatttggtggggaaaaaattactattcaggctcatctggtgatgagaagcttctgctgtgttcttaaggtttttttgtcttagtggggactcacgttctcccatttgtctgaaatatttctctttcccctgcttggcctctgcccagttccccctccttctccacccctccacctagtctctctcctaatgaaaaagtttgtttctcttttacattagtaacgtatgtaacgggtggtatgtctttctttgctttggccaccaggaaactcagagctaaattaggttcaattaacgtaggtcttaatctcagtctttgggtatccttatcttccctgtctaatatacacttagctgttagcttcttacctcggttttggtggttttatagtttgatctctgtgcctttatcataagtctctatgaacgctttttgactctagacaggacacacacacacacacacacacacacacatgtatgttctgtaaacaggacacacacatgtatatatgtgaatatatgggtatgcatatatgtgtttatatatattcatatatgtatgaatcatgagcagggccaataaaagcctttttaaaaagactgttgagtgctcatttggtgaagaaaacgttacgaaaaggccatcatctactcttcccacatccattgtc

SEQ ID NO: 1880650 - DNA, 4001 bp, Homo sapiens
aaataagtcatgccacttctttaattaaaactctccaattgcttgtggagtccctcacactaaaaccccaaattcttaccatagtctacctagctataccctctaatcctctccttccagtttttctcactgcactccaaccacagcttccctgttgagctcaaatacagtgattctcacctttggctgcacattacaatcccctgggtgcctcttaaacagagatgcccagatcccatcccaggcattctgatttatcagtggcacagcccttgatattgacattttcaaaagctccctgtgcctctatgtgcagagagcactgggaacatctggagactgcaagagtgcactgagtgtacacacaagcaaggcaacaagcatggttcctgatgcatcatatgtactcagctcttcaaaaaatatttcctgctctgtttaattacatttatcttcttccctttttgaaaaatggtcaccaaaaattggaattgggaattttttcatgtttgaaaaaatgattatttcaactagcaggaggatacagacaacatttagaaagtttcagcagcagcttaaaagagcccttaatgagtcctgaaaattaatacgaagccctctccttaccagaggtaagttatttcctggcttatggttcagtatttgtgctattagtatgtgaataactagttctcaaacttacctcctactgctcaacatcaatttctggcaaggaaatctaataggtcatactaatgtgccttgatacagaaatgtaattttttttttttttttttttgagacagagtctcgctctgtcgcccaggttggagtgcagtggcgcaatcttggctcactgcaacctccgcctcctgagttcactccattctcctgccttagcctcctgagtagctgggactacaggtgcccgccaccatgcccagctaattttttgtatttttagtagagacagggtttcaccgtgttagccacgatggtctcgatcccctgacctcatgatccgcctgcctcagcctcccaaagtgctgggattacaggcgtaagccactgcgcccggcccagaaatgtaatttaatcaaactgagatatacagacttctctttctgaggatacctgaggggatatgtgccagtcaagaccttggaaatagcattttaataatttttgttgttaaagttatcccacatttaattataaatttggttcatctgatttgttttgtgttactgggtgaatgaggaagataactggccttgatttttcaccctgaagaattacatttgttcttattctttttatggaaaaggattatctgtttccagggatcaccgagaattagagttgggtacagctcaaaagtttcatggcaacctcagcctaagccatagttgattctaaatttcaatattatttagggcagatgaatgtgaaacacttacagaaggaatgaggaagggcgattaaatgtgataatctggggagttgaagtttgaggagggcctggcaggagatcgtcctcttttagactgtttggaatttgatggagtagcacccacaaagagagtgggaggagctttcagagggaaaatattttgggttcagcttctaacacccaaactcccttggctgcaattttttaaaaaaccaagtagcactgaaggagcgcagtaagtagcaagcgaatccaataaaggcaaattaattcccaaggctggtttcctttccagcacaacagcactttagaaaaagactttactaagattaaaagaggttgagcatgaaacagtaaccatcgaaacttttccccccgtcttggtcatgaaatagaaatttggtgtttaattttggttgccatgcaagtcttttgattcgtgagggctaggaaattgctctgtttagcataatcccagagaccactgtgagggattgtatgaacatctcacagttgccagctgagattaagccaactcacagccatccgtgttagacctgcaagagaaagtgtatgagcagaggcacgtggctgcctcaggtggaagcacatcttcatacatcgagtgcaccagcagaagccctgatgtacccctctgcatttttcttgaggcgacattatcaagctactcctcttgctgaattcacagatttctggcatatgctatattgcatgtaatgtcataaaagtataatctttgcatttagaaaggatttactctaatccatatatagtaagaaacagccaagtaggagtacaggtgaatgtaaaaccaatcactaaaaatgattttttaaacaagctttatagagaacttggaaacatcaaagccaaacactctaaaatttgtcctcagacaagaaaaccagcaattacgttgaaaaagtaatgaccgtatactcaccaaatggccagatgtgtcaatagcggtggctattacctttcatagatggtggtatgtcctcccctcttgcccacatcactgtcatggctaagtgagactgagccatgatctaagcccctcagtccactgggtggggctaatcaatggtaagaataatgattaagaacggaaggaagaggaaacgccctcagagtttccccaccatctgccgtggatggcatctcaacttgagtgagtgtaagaagcacataggaaacttgttacaaatgtagatccccaggacctacctctatattttgattcagtaggtctggttttggtggctgcgatttgcacttcggtggagattttccactgcctttctccagcttcacttcatactagaccatttcttcctctacattgtagactccagctctaacaagttctgagaatccaatgagctgtgtttgcccatacttggaattatttcttctttctctctccctcctctctctctctttcacacacacacacacacacacacacacacacacccccttgtgtgacagtcacacattgaaaactatcacacactgccttctctccccagtctcccttttttggcacctgtaatacacaatggtgttttctcactcacatgctttctccttcattgactgcaaacttccaagtgttggcactgtgcttattcatctctatatcctcaactatactattctcagtttagcatctgatgtttaataagtgctcaaaaaaattttgtcaaactaaatcaaatgtttgttgaagcaaagaattatggatttcagctcataacttgtcctttaataattgagacttgacacaattaagagagtggtaatttacagagttagaaaagtggcttttcgttttaaaagtcaggtaaatataaagttacaaaacaattgagaaagaacaattgaatataatcttgtgcctcatatggactcctaagtacaaagctacttttgtaaaataagaatgtctcatcattaggatttaactttttaaatattgttctaagtttattttctggagtcaaattgctcaggattaaaaataagcagattttatcttaatcaaaaaacaagggcttctcagagcaacatgaatgacgttcagttttttcttttctcttaatcttatatttgattttcctttctctctagaaagtttaatagtgaaaagttaccatagagaagtgacaggagtatgtagttcttcttccctctgctagaaaacattaagaaaagatcataaatgggaacatcatatgctgatgtggaagatgagacagctttttattaatcttaagttgtcatgtccacaactgcacagggaggtgggctctcaatggaagcaaagacatatacgtttctgccttgcctaccttagtgggttgctgtgatgggcatttaaaaaagaaaaaggaagaaactgatacaaagttgttttggcaacaaagctatattaatgtggatagatagtccacaggccagataaactgaaatacagtagcaaagtatcaaggagtaagctgtttctaacactatctataca

SEQ ID NO: 1880651 - DNA, 4001 bp, Homo sapiens
aggtaatttatttccttccaatttatgtctttttgaacttcaatttctttgttaggagaaaaaaaggactataaaataggagtgccaataataccttcttcactgggtttgtgagaaaactaagttaaataatatgtgtagagtgcttcatgcaatagtgactattggtcgttgttatcaaatacttaaaacactcctactgcctgggaggatgctaaattcctagcaatgtttttattgtttcctttaatgaaacctcatgttttgaaatattttgtgtaacaaattgcatatatggttaataatttttttcttttgttactatcaaaggcattttagactgttagttggagcttctgattagcaattgcatcaatattgagttgaattaaatccaatgaaagcaaagaaacctgatatttggagagccttcttatcctcatctaaggaaatgtatttctttcaggtcacctgaagtggtgaagtgtctaaaacatcttgttgatctccagcactgagtttacagactctagacatagttgggctccacttttcaatgaacaagccaaaccttattattataatctgagtgagttgacattttgtgtgtgatctaattcaatttttgaatgttacaattttttccatcacatcatgggaaattggtgtggtccagaaataatccaaatgaattcactaagaatgaaactgaagatgaatttttaacatgctaccagaagttattgattaacaggcataccaatgtttcagatactaacagatacataacattattataaatatataaaaatcaaattatggcttttattcattgtcattgaagaccaatttcaataataatttttaatactttttattttttgttttaccttttagtcatgacatttttattatattagaggagaagggaaaataatttttttagtatatagaaattggattgcttacagacaaattaaacttaggagggaaaattataaaggatgttgaaaactataaatttaaacaaacatctcttattttgacaggatatgtttcagagagaacaaatcttgagtctttcaaatattactgggccagactaaaataatttcattgtgagagcattttccttctctgtgtgcagtctaagtgcatattttgtgctcttaggaataactttccaaagctgtgcgaagaatgtagcaataaaatctaataagaattatggctcatgacttgaatgatgtcagtacccttttaatcctcccaaacatgaaaacgttttctcctcttaaataagatttcttaactccttatttctaaggaaataagtacatctgagcaattctattggcaaagtaagagttaaatgaaaatgtttctttccattattattaatgcttatacttattaagaccactactttagaaatgtattctagacaatatttttatgaatacatattattttgtctgattattttagtgttccagttataatcttttgctctctctaagccagtggttctcaaacttgagcatgaatcggaattacctggaaagcttgttgaaacacagattgcagggcccattctgagtttctgattcaggaggcctctagtggggtgcaagaatttgcatttctaacaggttcctaggtgacgctgctgatgctagtctgggaatcaaactttgacaacaactgctttaagccatgttacaaacaaccttcttattttaaaatttaatttagtgggattcaaccatcacgaggcatgtagtcaccttggtttagaagaagttaaagttcagtaagtgggctatagcttggctttttggccatgctagatttattccaggccaaagaactgcttataacaaaagcatagttgatgaaatggttcgatgcttgaagatgtcagactgtagaatctctacgggtaagtgtgtgatttcctcagtgacatcacatttgcctgcagagattttccagtctgccactttgaagttgtacttaagatagaaaaaagttgtcgtcattctacagtgatctttctggtcttgctaaattttaaaactatatttattcaagattaaaattgatgggaagtaggagttatagctgggattcagataggtgcataaatgagaatggatactctctaattttgccacacatctccatagagaatgaaggaaaagatgaaaagtgaagtttcccaagccacaaccagtggatgagactagtataccttggtcatggaagaaagacgaggcttcttatgccatcattcatttttttttctcaaattatgctgtttgtttcatatgtgcttattttaccagtgtgttagtcacaccaaaagccttatggtcaatccaggtaaatatccttgcatttcaagcaattttatctaacgttagactttgcagttgagtttcttagtcttttgtaatttagttatgcctaagtaataacaagattagatgagtagaatgaggagatgtgctttttacttttattctctccatctttcttctgcctaataatggtcttatgataataccatcacctgctgctaatctttaaagtgctggaataatgcatgatatgcaatatttactttagagctcaaaaatctaacttgtgaatattgtgatattattaacactacaatgtcgggttttgggtcaatgtcaactataaatttattccaacattttcctagaacagggacttcatatattttgttctcttctatatcccagcacatggaataattcctggcctataggaggtgctcagtaaacatttattaatgattggctattacttaggatgttttttgcaaatacttgtttaccattagaaaggaaatatatatatatatattcacatattttattgatattacagtgacatttaatttcagacaagataaaatgagagaatatttaaatatgtaaatcttggtaataaagaatcctcctacaataaaatgcattataatacaattttttgtaatacttggtttaggagtagattaataacttccttaaagtataacaatgttatattatgtttttcaggcatgtagttgaatttcagatgatgagttttttagtccgggttacgtccaaatttatgtaataatgaatcacaaaattagggttgattatgtttacactacacaacacagtgtcttgattatctgttaatctgctatacacacatccttggacctcaagatgactttaaaagcgtcctctcaattgcattctgactttcctaaataaaccataaatagaaacttaacagtaaatctctcataagtgtgcagaggatataacaggtggctctgatctgatgtaagtgtagctaaaataatgtgttgaaataattgcagcttagaaagatagaaaacatctgggcttcaagggagaacacttccatcctttttgctgcttttaaaaatagagaactacatcattctgggttgcatagaaagaaggggctgtgttagaaactctatgatcctcagtctgttcatctaaagctccaaaggatgagactactataccttggttgtggaagaaacactagacttcttaggccatcattcattttcttttctcaaattattatttttgtttatttgtgcttgcagggcctgattaacagtgtcacttgttctcttgaaggaaaactgaagttgtgaatgatggaattatagttgccatttctccaattgttgatatcttgtttgttcctttgctccatgggaaggcatggatggaacagagctttgagacagaatcctcattttagttgcctctatgagtaggctgtttagaggctgccagcctataatatggggctcttgttagtttaagtacttaggtagaaaaagacccttctataaatgcaaatttttaatatctaagcattatctgccaccaacattagtacagatgaatttataagattatttctagcag

SEQ ID NO: 1880652 - DNA, 4001 bp, Homo sapiens
tgatcaaaaagggggaaatgtaaaagttgtcagaataaaaatagagtaactcatgttaaaaaaacaaccctgacaaatagagctgggaaaaaaataatgaagagaagattctcattcataaatgcctaataacaaaaactatcatgaaagactttgcaaaaaccagaaccttgcacaaaaaaataattctttaaagacatttgccgaataagtgcctacccaaccttggactagtgccaccattgttattgatccttgtagccaaggataattatcttaaaacaattatctaatcctcctcaattttcctttacaaacctttgtcttcctttacctccctgaatatgcacatagtttacaatggcacatgtatttccattgcaatgctctatttctgaataaatatcattttctttcagagagccctcctgttatgtaggtaaacaatactatatggtaagtatccacacaatttatataattacttgtatccaataatgttcaatccatgtcaaagcatatttatttcaagactgttgctcctctgaaaactcttgattttatgaagaataatataaattaagtttttagttgtttacttcctttattagtgtgtaaagttccttaggaagtgactttggtttgttttctttttgagacagagtctcactctgttgcccaggttggagtgtagtggcatgatctcagctcactgcaaactctacttcctgggttcaagcaattcttgtgcctcagccttccaagtagctgagattacaggcgtgcaccaccatgcctggctaatttttatatttttaatagagacggggtttcaccatgttggccagggtggtctcaaaatcccaacctcaggtgatctgcccgcctcggcctcccaaacgtgctgggattacagatgtgagccactgtgcctgttttgttttgctcactgccttatcgcaagtgcttagaatagtacctagcacataataggtgttcaataaattttcaataaatgaattagtgagtgaagtataatgaacctactagtcaagccaccttgaccttccaaccagaaaactctggaaatatatgtgaatttagactcattgaaagtagaatttaacatgttattattactattttttagaaacagggtctcactctgttgccgaggctggagtgcagtggcatgatcatagctcactgacacctctaactcctgggcttaagcaatcctcccacctcagcctcccaagtagctgggactataggcatgcaccaccattcctggttattattatgtttttagagatgagtcttgctatgtttcccaggctggtctggtctcaaacttctgggctcaagcaatcctcctgccttggccttctaaagtcctaggattacaggagtaagccaccatgcccagctactatggtattttttaatagtaattactttgtagcactttttcttatagtaacatttattttagtgctacaagtgggaaataatccttattccaatagcaatacctatttaatctccataaacacttaggttaaaaaaatagcaaagataaaccgacaaaaaaagtattcattttcctcccaaaacagaaaaatgatcagtaactttaggttgttttacttagtaatgtatttagctaggaaggtacgaatgtatcataggcataaacacgcaactagatttgtacttctggtttcagtgataaatccacaagaacggtggtaaatgataggtgttttagcatcttgggctcacctctcttgaagaaacatttctcttcagggttaaattaagactgtgtattttattggatgaccatgaacacatcacagcaaatctaacttgaggtatttactggtgcttgtttagatgctgaaggcaatgcattaggaactgatggtgactgattcttatccaatcagttcctgatgcagtatctgcgacatcaaaaactatgtaataattatactaaatatcatttatttccaaatgcaacaactttattctcttttgttccttcatatgaaatttgcaatttaaaaaactctttttaatgtcacttaataaagcaatctaaagtcatactaacaaataattttcccaatttaccaagagagatatattacaatataacgtgtatgactaacttagcacagacatttatttcatggcaaactattgtgctagtgtgaataagcatttataaagggttttttaaaaatagctttttaaaattctatatctaacctactaatcaagccaccttagcttttttttttttttgagatggagtcttgctgtgttgcccaggctggagtgcaatggcacgatctccgctcactgcaacctctgcctcccgggttcaagtaattctcctgcctcagccttccacatagctgggattacaggtgcctgccaccatgcccagctaatttttgtatttttagtagagatggggtttcaccatgttggccaggctggtcttgaactcctgacctcaagtgatccacccaccttggcctcccaaagtgtgggaattacaggagtgagccactgtgccgagcctaaaaatagcttttcttaagccactcagtcttgtttttaaatgataatttaaaaaatattaaagccctcaagtggatttgaatgagaaaattctgatgaattgtttaattttagattcattgattaggataaactgtatttcattttcaagataagtttattatgttttcctccctgccagctttattgaggtataattggtatacagaatcttcatgtatataatctggtaagtttggacatatatatatatatatatatatacacactgatattagcattatcacaatcaaggtaataaacatattcatcacttccaaaagttttcttgtttattatattactttaaccacactagaattctagctcactgaaatgataaagttagatttagaattagtacatatgggaggcatgtaacaacttgaagaatgtggtggccaaacctataattctgagagtgttacaggttttctaccttattaataattttgctagtcatcttttggagaatctctcattagaaaattctagttgatcctctagaatgcctccaaatatagaatgaatgaaggactctaatattacttagcaaattcatcattctgtccagtgggactccagtttacatgggctattttggacataaggggtaggaaataattgggtaggggattcagaagtagaatagaggtggagctgagaggtgaagatcatagaaatggagactgaagaatccacttttggctttctgtctcatttatctggattccaaataggcttgagagttaaggttaatcatattttcattttacagatagtgaaaatttggagtacattaaagtatcttagggacataatttctagcttattgtttctctctctagaggtcttatatgtgatcaaatacagtatctcaattgtttaccagacatttccctaaaatctgtatatcttttctaaagggtattcaaatgaagccaaagacttgtaagcagagtggtcttagaaaacctaaagactccttactggagaaggaaccccaggaggagcacctgagaagccagttcatcatgatgttcccctctagttagtattgtctctctgtagttatagtttctgagttttgcagcaagatttgacagattagggacttgggttaacaactcttgtggtgattgggaaaccagtttgtattgtgtcatttgtgtgctgggatgaattgtgataagatagtgaaagtaggtgaagaataggctttcttaagatttgattgttgcaaatatgctctatgtgatcttcctcaggtagtgtcattaattaaaaataacagggcaggagtcttgtcataattttaggcttcttttggctattatctggagtgtccagcataagactgcaagttt

SEQ ID NO: 1880653 - DNA, 4001 bp, Homo sapiens
cttggaattttaggcatgagagttgcatcatgattgttatacttattcgttctctgatgaaagaaaagaagattgaacattaaaagctgaaggtcatccatacagttgtcccaatagcaatctgtgtacctttaaccctgaggaggaaaagtaattaccctatggcttctggtgacctcaactaacctttgctgaagggccagagaaaataaaagctgaccatcagcctgccctggttgccctgggcttaacctgctgtgtgaatgaagaacaacccaacaataggatgagaggatgttgccatggaaatagccctggacgaaggagcaaaaatcagaaatttatcacaattaattgttctattaagaacctcccatcttttggattattccctgggggtagggagggaagatgtgttctcatttagatcttatgagagaaaattatgcttgcataaatgaggcagcccataaagtaaaaccattctaagtagtgacgagaattggacagctttgtgagagacggaaggatctatatctcctcataatctataaagatgcaaatgcaaacagccaggacgagggccaaagaacctcattctatcaggggaaccaggtgaagtgtgggtctggacatacgtctttttcatattttcagtagactgttgcctgtgctttcatgccttggcaaggtctgcaaagtacaggtaatgatattttaacagtacagaaatgtgttgtcatattttattctgcttatttagcctttctgttaaatagaatccaagttctatgtatttttaacgtgagcttgtttagatcagaaaatagaagcttgctatccgattatgttcagattaaactagactaatccatgatgctctgggtgccatagactaattgcagaaaaaagaaatggagtgagaaatagttcctttatggagaacctacaagttatctcttaggtagaagcagacgtatttaaaagtaataatatttttatttttaacatgagaatgttttcatttttattcatcatacgaagatgaaattagactttaaaaatgtggatttttttgatcagttctttcatttatttgtattaagtggattaattaattattgagcaacggactgtatgtcaacttaacttcttttttgcataacagatagcaatatgaaacactattttctgtatttcctaaatagtgagttactcatgttaatcagtttttaaaataatttgtggtgctaaaacaaagcaggtggttaagctcagacattgattttctctttaaggggtacttcatcagtgaaattttaaccaccgatgaaggagaatataaaccatagtaggcgttcactgaagactcttccttacaatgagaagatatgtttttctgtcacagcataagatgccaacatgagttttatccatgaatatatgaacctatgaattttaactccagatgttgataggaaattaatctcatactgggaagcattatcagctttcattagaacttgggaagtttacatttagtagaaataaactttttaaatgaagggacatgtgttggaaattctgttaactaacaatgaaatccagctcttgggcttcttgtttacccatctgctctctgcagttagtttattactcgtttggtgcgattctggtatggttagggccaggattctgtttgctaaccccccaggtacctgtggttggaaggcccatctcaaataatataatagacttggccagactcattcaactctctttgtggcctttggcaggcttttaagctttttctctgctatagataatagtttttcttaagtggcagcaacatagctctaaaaatacatctacagtaaggtcctagttgtacttaccttatagttcagcagcaccttgctggtggtgatcatgcttcttaatttccatttgctttagtttgctggtaagcacatacctgcttgtagggtgctaagagtgttctttctggctgagatgtttgcagcgttggccttcgtctttatagttctcactttatttggaacctctccaggttttctctgtttattaaccctcacctggatggcttggctgaggcagcggaaccaaaagtaaagatggtaatgggtttctgttgttttacctgtttgggccaatagaagaatgaaagggagaatgatgatcaagatcaaaatgtaaaaaacagtgctaatctttccttacatagagagaggcagcagatatctacctggtctcccccatttaaaacgattatgcataatttctgctggtttggataatcagttctgtattataattatggaaagatatttaattatgtacagtttacttatggactacatttttattgttctcaattttgttcagaggaaaaaaattatatatatttagtgaagtttacatagaaatcttgccaaaataattttgtaaggaataaggtagatcaaatctctcaatgactagacatttaagtgcagacatgagagtatttactgatttataactaataaagcttcaacttaactgctctttaatgacacctataaaaatggtattaaagtgtgacgagcaatttaaaagacaaggactactgagaagagttttttatatttttgtagctatctgcactttatttttaatcttttattctatgcgtgcagacttaactatgaaataaatccacaaactcttcaatgtaaatgaggagctaaatacagaatgtaagaatcacaaaaataattatgtcataaatgaaagtaaaaattagatgataatatgtgtgtggaaaaatgccaaaaattgccagccactacactttgaatgtacatattaaaaaaccaacatggcattttgtgaagagagttcaagataatttttatagggttaacattacatattttaaacagcatggtattttgtcagtagagtttaagataatttatataaggtaaacatacaaaattttaaaattgcatggcattttgtcaagagagtttatgataatattgggttgagtagacactttcaactgaaaggggaaaaactattttaacagtttttgggtgttaacactaccagctccaaattaagcaaacattaacgacgtgacattattctgacatactcagtctttaaaatatctttccatggattatgtgtggtgtaatgaatcatatatagaatataggatattttagcggaatatcaaactgtggtgttagtactgtgtctgggttaaagaatgtgaaaacatcataaaaaattatatggcatcagtgttcctcatcaaaggacataattcagtcttgttcaacagactgatggaaatgatatgctgtcaacctttctacgttttcaagcacaatgtataaagaaggtaactcatgaaaacaaatttagatccatttaaatacaccacagaaaacaaagatattccaaagaaatagtcaaatttgcttctcatcaagtcctgcaaggttcatcctgggttgaagcagggagtaggaattttataaacgattatgttatttaataaacatatatatatatatatctccatatatattatgtcatcctgaagcaaacgattaacccagtttaaagtcacaactactagaattcaatatacaatagtaccaggtatccagctgtgaagtagctgggcttagggctttctacttccacctccccaccacaagcacataactacagttcatatctaagctttgagtaagaatatcagctaccctaaaagttaccttcaggatggaatacctttaaatgctgcagcgccctggatttccagttaaccaaactatatttccagcagaaactcctggggtatagagtagttctcgtctgtaagcccttcccgctggtcttcttaggaagcgttgctggagcgctttatttatttatttttaatcctgttgataatttgactctctgtcaactaatgcttg

SEQ ID NO: 1880654 - DNA, 4001 bp, Homo sapiens
tacaatgacaggagtgggaaggatgtatgaaaagttttccctggctgcaaaggattctttctggctttgctcattaactattctttttggataaggtgcacaccaggaaaaccacaaaaacaaaaataaaaacaaaaacaaaaactttaacatctaaccatgagaggggggagaaagatacacaggtggatttgaaagcattctaaatgcttagtagccaattatcagcaaggaaaaggctattatcaaattgggttgggggccccgccaattctaacgacttattaagattatttccacggcaggtagaatgaaataaaaaggggaagtttgaaaatacaaagatgtacaggaacacaggatcacacacaaaaatatctacagacaaacaatcctcaaaagagtggagccctcaggggtaatgtgtgttattccttcagccttccaggaatttgtcttttggtgttaataccttttctttcctcagatctctggatataatataaatgcccatcactctgaggttcctgtagatccttttggcagaatgctagaaagcagctattcttcttcactgtgtgcttttctgaattcagaggagagactgctgcacataacaagcaaaatcataacctgagtttgggatctttgccaatgaatagatttacaattcctgtatttaccaagggtttttattcttacgacttctaacccattataaatatcctcaactgggcaaaaacaaagataaaataaaattatcctgaattccacacttatcatacaaacaaaaataaaggcacataaatcatttcttcaacctcacctagcaaagctctggtgtaactgagaggagcatacaactcatacaccaagatccacccatccatagattcctttgaattctttaaggcatctccatttgggttttccagcttagtaataaagaggattgctaagatgcattctttcaaggggttcagagaaaagtttctatttgctatttctcatcaagaattatctaaaatatgcaaatgcagtagtactgagataccacttcaagaatcaataccttgcgtttgtttgcatcttcaaaaccagctttctttcttaaaataggggaaaaccaactaagatcaaggattcttaagttcaaccaaaatagacagaatgtaggaatatacaagataatcactcagttttcttagctattctgaattagtagttatactgaacaagtaaaataacaacaaatagccatttatttttctgaaccataaacaaaactgaattcatttatattgtttcaacttaggcccccaaaagaaataactgatctctaaaggaaaaacagagtagggcaggctctgtgatggttcagcagtgaaatctttgaaaaatgattctttcagcctcagttcccttatttgtacaatgggtataatgagaagacttacctcatcggtaagtgaaggttaaatggaaggatgtatgtgaaacacttggcaactgtaaagatcaatacaagtgatattattattgcttacttgggtaatgcactaacatagaagcagccattcccaggcttggtacccaattgccttcttactcccaaagctgatctgagtaggaacgcctcagcttaccctttctttagcacatctgctctgggaagctgactaagtaacccactgcatcttcaggccatcaagataatattactaattccctactggatctaaaactaaggtccgataacaactgtgatccaaaacatggcacttagcatgaccccacaaggccagctcactaatggcaatctcttcaagtggcaagggataagctaatacatgtaaaagccacagatgtcacgtgctccctacagccacattcacatgtatgagaggaataaagtcagcagtattatctccaaacagcaaggacaatgccatacgattataatagcatattgtccattgtatctggggatgacacgtctgacaatgttattttctatgcacgtgaatgtagctgaaagggccaatgcataattcacagctcctgacaaaatgcagacataaagtatgtgtccattagataaggcaatttaaatccttttacctgaaatagcacctttctccctaagaactcagaaagcttccagtatgctcctcatggtgctggtgcgaaccagaacagtgaatagtaggaaatgtactgaggcagcaaatgccagcgcaatatacagttttaccaataaaagttttattttcccacggaaagcacgtcactcttatttcttcactaacagttaatcttctttttggtaacgaggaagcaactgttacatttcagcaaggccactgtacccagggggagaatgacaataccatatgatggtgtggctcttcagtgcgtggtcagctaggcccatttcctggcaaagcacctccctcccacgtaccagcctggcagctgatgtgatcagacctctgcctcagcaaaatctcaaattattacaggtcaggagccttctgcaaaaggggagggcatgaggctcaggaagagtcacaatcacgaatcttcaatctagaaggttaagcatttagtggaggtagggagatttctttcttaccataaggggaaaagcggcacatcatctaaatcctgacagaaataataaataatgcaatatttccatttagtcaatattgttaaagatcataaaagggaagaaggcaagacctggtgggtaggtcatcttaaaaggattaggaaacgttttgcaagtggatcagagcaacctacagagaagaagacagctaaggttgcattaggccagggtttctcaaccttggcactgttgacccttgggcccacatgatcctttgctgtggaagttgtcctgggcattgtaggatacttagcagtatccctgccctctacttcccagatgccagtagcatacccccaaccccacatatgaccatgaaaaatgtctccagacattgctaaatgttccctgagggaaaaaatctcccctggttgagaaccaccacattaggcaactaatgatctcacattttgggagagtggctggaccaaaagatttgctgtcacacataatggcctcttcagacattgacaggatgtcccgataccctccttgaaccattgtgtgactctcccattcctgctatgcccttcttagcctcagaagttcttaaaagttcagggaaggcccatctgtgtggaatgctctcccagtgcgcacaggccacataaggttttgagcacagggtgtccagctacaggctgagaggggctgaatctggctctgctcctcaagcacagggaagctgccccacgcaaagggtactttttctaattcacacaaaagcatattgtggcttagcagcagccctgctgggggactagcagccatcagattcgtcctttccaattctgtcaaccggtttgcttgatgtcaaagctagcagttttgtgtggccatgagaattagcaaagcaggttttcaggactgaggagaaccaggggttgaagcaactccatggaatacctcctttcttcattccccaaagcatgcttgcttgtatgcctgcactctcactattgttttaaacatggagacatcaaaagaaaaaagatctgctctccaagaagagtacgatgagaggaagcctcggaagtatgcactgatgttcatttatcactgggttaataaccatgaccaccttcagtcttcaaagacccctgccctgggtttccagggtcttgccagaccacagtgaggccgtataaccacatccaatcaaccggtgaagagggctgggtaagacaaactccccagacttctttgaacttttcaatctgtatcctgcttaagtcaaatagggactatgcataatatacttgcaaagttgttattctgacagtctgctgtcaacaaagatgaaatactcaaacaaaaccacctccct

SEQ ID NO: 1880655 - DNA, 4001 bp, Homo sapiens
aaaccacctcagctgtaccccctgcacagatggagagcagagaatgggctgggccaaggggcagccctgccctcaccagtgcggcctgtcttcagcctccaacccactgagagagagaatggagaggtcgtgggtggcaataaggcgcacacaacccaactcacatgggcaggacaggcccgggcaggccggtgatcaaactgaaccgcagcggctgaaattcccacagaaaaggccaaacaaacccagcaccccgcggtttccagagctgagcctcaaagaacccggcctgaaaaggttagagacaagcggatggagaaatatttgttagccaaaagaaaccaagggtagaaatacctcatgaaacactataagctctcggtcaaagaaacattaaacaaagagaaatatattatattttgataagagacctgatctaccaaaagaacagtcattaatttttaagctttaaaaaaaaacactgaactatataaagcaaaaaatggttattaatgtaaaaagaatattataagactataatcacagtagaaaaatacacttttccaagaaatcgagcagacagaaaaaaataagtaaagctatactgatttaaataactcaactgagttaatatataattaaaacaacatataaagaaaggatacatatcctcctatatataaataaaatatatataaatgagagaacttttttttttgagacggagtcttgctctgtcgccaggctgaagtacagtggcgcaatctcagctcactgcaacctctgcctcccaggttcaagcgattatcctgcctgagcctcctgggtagctgggactacaggcacacgccaccacgcccagctaatttttgtatttttagtagagatggggtttcactatgttggtcagaatggtctcaatctcttgaccttgtgatctgcccaccctgaccttccgaagtgctgggattacagctgtgggcctctgcgcccggccgagaactttaaatacaatattgatacatacatacagacgtctttagactgaaacaaaatcctaagagcatactttctcttcaaatgcctgcagagcatgtacaaattatgattatgtgtacaccaagtcatacaaaaatatgcacccccattaaaataatcaagtgtactcaaacaataattttcccatagcacactgacaaaaatgagagagactgaacctacccagtgctggtacagcacaaatgaaaaatatgcatcctcttacactggaattaggaagatcagttggaacgaggcttctggagcaatttgacagtcaacctaatgatgttttaagtgcacgggctcactgacccagcttccacttcctggaatttgtctagtagtgatacttagaagtttacaaaatatatgtataataattgtttgatgccaatttggaattggtataaacactgctacaaccacataaatatccattcgcaaggtatcaaaagagcaagttatatttgcacacatactgataccaaaagatgcttataacacattaaaatggacagaatgtaaaacacagggccctgcctatagaattatactctatgaaaatgctcacacacatcacactatgtttagacacagaaaaaagatacactctcacccaacagcagcccagtgtaggagggagagagccagctccattcaatgtctatttagacactttgagccatagcgcttaattttgtcttggaatgatcataaaccatttctttacatcagtcaatacataaacaatttaactcaataaaactttcatatctaaaaaaacctggaatcttgccctctggaattttcagacaaagacgattccacccagggaaagatgtgtgtaagcgttccggcaatctcaaagagagtgacccagacagaccctgagcctctctgcctctgctctaaggagcaggacccagagccaaggctaacagagcctcaggtgcctgtccaagcgtctgtccagtggccaccgtcttctctctcatgtggacgcaagacagaagtcgatggctaagtgcccttgaaggccacggtgcgctggaagtggcaggaagctgggcagcacaggactggctctgcaggagccccacactcaggcaggtcggcggcaggcctcgaggtttcattatggtgcacgctctcggtgactttccaaggacagaaagtgtgaagtcgtaaatggatgggcccatgacatgcttctgaagctcagagcaggacaagcttgcttcccaatcatgtgggtcccccacctaccagctctgtgacctcaggcaaattacttcttccctccaggcctgagatgatctggggctgtactaaatgcttgtaaaatgcttagtgcagcccctcacagaggccctcaaacaccaggagcaactgtggccacgacctcagtgggaacatgagcttcttcccagacagcccagacgcccagttggaggagcactcccacccctcacacaacccctcatgaaacaacaaagacactgggcaagaaaccagctctccacatcacaacctgacctttcaacatcacccttgtcaaaaagcatcgaggaaacctgtgtgcctctcaagtcagcctgcaaaccggggtcgcagacttgactccacatcctcccaggttttatcattcttctttcaccaagaggaagaataaaccatccattttgcactttgtgctgtcaaaaaccaacagtgaccactatcaagaaaaacaaaagtctcaaatccagaaagcaagctgcagtcacaagaacttctactttgggcaaagaaagccccgctgtgtgcccagagaagaaatgacccggccttacctggatggctttgggagctcattgctagcaatgtccactcctttaagtgattcgaaatggctcaaaatttccacggaaacgatagctccaacgagctccaaactcccaccaacacatacaagtaccgggacggtgagggctgggtcacagacgttcaagcgccgagcctcgccggcaaggtctcatgagccaggtaacccacaagttgaacagaggcgtccgctggcttctgcagatgaacctgcaaggtcagaaggagaaaagagactggagttacaacatggaagttccgatctggaaaacaacatccaactagggaaatgatgacttcctctttttttttggagacagaatcttgctctatcgcccaggctggagtgtggtggcacgatctgggctcactgcaacctccaccacccctgcaaccctgggttcgagcaattctcctgcctcagcctcccgagtagctgggaacacaggtgcatgccaccaggcacagctaatttttgtatttttagtagaaacggggttttgccatgttggcccaggctggtctcaaactcctgacctcaagtgatccacccacctcagcctcccaaagtgctgggattacaggcttgagccaccacgccccaccaacttccttctttatccttgttctgaccaaggactgatagaacagttcgacggaatcatttctacaaatacgagcagtgggatttttgttagtaaatcacagacatgtaaaaatgtctccagagagcagggtttctcagcctcagtaccactgggattttggtttgcgtatttaggtgttggggtgtagggctgccatacacattataagatatttagcaggatcctgggcctccacacaccagatgccagcagcatcttccaggtcatgacaaccaagaatgtctccagggagtgccaaaggtcctctgggggataatatcatcccctggttcaaaatatctgatctagagacaccttccttaccccttccagaagtttctccaacattaggcttttgaaaggaagcagagtatcttccaactaatataaatttattctgtcatattagcttatgaaataaatatgaaataaaatgttttaaaagaaaaa

SEQ ID NO: 1880656 - DNA, 4001 bp, Homo sapiens
gaggtttgaaggcactgacacggggcctggagctcacggtcctcagtgcagcctgctgcccctacaccgcctggtggggctggtgggggagacgcccgcttccccatggcactgagtgtggcggcggcccatgggttttcctaacaaaggcctgggcagtcttcctgggaggaggtgtgggtatcattggtcaggggcaggtcctggccccatcaccctcactagctccctggccgtggctgcctgagcactgagtacacgtcgtccacacggctgagttgctcgaagaaggggaggaggtcgtggagctctgtgtcactcatgttgtcaaaccacgaggccaccggtacctggggaagtgggtgtaggaagatgaggggggcaggtggtcctgggtgcagaatttccaggccagccctatgtagccactactcagatcatgcagtttctgaaaacccctcacccacagtgttcaaacttttttgacagcaatccccaggaaaacacatttataacgtaacaatgcaaaagcttcacaattcctaaccttatctgtgcgaagcactcggatacttttttttttttttgaggcagggtcttgctctgttgcccaggctagagtgcagtggcacaatcttggctcaccacagcctctgcctccagggctcaagtgatactcctacctcagccttctgcatagccgggactccaggcatgcgccaccacgcctggctagtttttgtattttttgtagacataaggtttcactatgttgccgaggctggtcttgaactactgggctcagctacctgcccacctcagcttcccaaagtgctgggattacaggcatgagccactgcacccgaccggatattttctattctatttcattttgttaaaattcccaatcagaacccactaaattaattctgtgggccatcagtaggtcacaactggcaattcgaaaaattgaaactttccaaactccgttgccctgtgggggcccctgtgcatggcagatgctctgctttgtgcgaggggaaaagaccatatggctacagggcaggtggatgaggggagtgggcggcaggcacaggcaatgaatgcaggaaggactgggagggcacccaccccccaactggggatccaagaggccaaggtggcctgaatggactgaccccttcctgggtctcagctcctgtcccagtcccagtccagcccgcactcacagcattgtctggatggaagacataggaggcaggtgaattgtccaggatgagcacccgccgcaggtctcgacccaaccggctcaggtccttcacgtagttcccccggtggaagacgcaggactctcgaaacagccgggcccggaaggccccccatttgtccagcaggtcagctactgggtctgcgtactgggagcaggaggtgggtcatcctggggcccgcaggttcattgggctgcatgcgggaggtaggtaggagggcagggttgccccgggacccctgtggggctcaccttggcgaggctagcagtgaacagcacacattcaaagagctcgcccattcgctgcaggaactcatccacgtgaggacgcttcaacacgtagacctggggggcgggccagtgagggggctgcgggccagtggggcagtgtgggggtggccgagggctggcagggcatgggccagggaggcagaggcgcacaggaaggagactgggcccgcaggctccgcttggccagctaccctgaccactgctggggaaactgtacccaccccccgccagaaaacgatcaaaacttccactccactggccagtcctacctcacgaggtccctaattcccaatcccttcccctgcctcaacctcagcctagtgcaggaatccaggggcagccccctcaccccaaggctgcagggcaccggtccccgagccaagtaatggagaacaggctggacagcacacaacctatcctgaattacttgaactgggtcccgggcagggtggggcgagggagcacagcacgggggagcctagaggaggagcccactctgcaggcttggagtcagcacaagcccttgaggttctgtgtgactttgggacaagtctcacaccctctctgggcctctgacattccacatgtatccaattcccatccgaggcgctccggattggtgggaagagcctagggtctggaggcagatgccaagcccaccactgcctcttcctggccctcacctggtggaccaccccatcaatctccacagggatgatgaagtccgcgttgttcactggctgtggggggaaaagagctgctggagttggaggaggagccccagggcatggggtccagcacacacctccctcccaggccagggtgggggatgccccccgagacccgggctgagggctgttgagcagggcccaccttgaaggagctgtgcaccagggtctcgtccaggtcgatgaccacgcagatcttgtctgagtcctgggccttggcctcagggagcaggtattggactggggtctgctgtagggagggcggggctggctggggtgcctctctccgggcctggtccttcctcccacgcaggcttctccccctagccgtctccagaggaaccccaggccccaggaacagatacttcccccttcccagctttgcccctgccagctctagggcttgggtaggcctcttggctctttgagacctctctaaaaaccaaggtaggaaaaagcttccacttatgagggagaattcagtttccccacagtgggcagggcctggcaggggaggctgccaccctcctactctgcacctttcaggtctgcaagtccatcctgaaaagctcagtcaggagccccttcccctaaagccctgaagactgagtccaggtgcccccgtggccccacctggcccccacgcaccttagggatggcgccattctcctccacaagcaggggcgccccgctgtgagcaggcagggcctccccatcatcccggcagacacagcagaagagtgagtggaggatgccccggcttcggggcttctgggaagctgctgacttctggtcacctgaagtagggaggcacaagttggaggctcggtgcacactggcctgcagaatcctgcatgtgtgcccaggtgtgaacccctgagccaggaggatcttgccgtggccccttcatccagacacacgaaggcagctcctgactttctctgaaacgcccctgtcagggctccacaatcaactgcaaggctcctgcagctcccagacaaataggtctagcaggtattaaggcgcccacatagggagtgcgtggcctggagaaggaggtcctggggtgctctctccctgcctctcacagcctccatgactgctgctgatcagccccattgcggtgcctcctgaccccaccttacctgagcacccctgctcaggacagccagggcctgggacccagggcagtccacccctgccctccctccatcctctccacccccgtgggtacgaagtcctcactgcggctgggcccagaggcaggggtgcagtcccgcggcctggggccagtgtccagtggccatctgtttgccctgccccgcccagacctccgacctggagcccagcagcctgattgacagatacccctcccaccccacccccctccggccccctgcaactagcctttccaccttgccctcagttccggggcagccagacccaggcgagggtgggcagacctgggggcagcgtccagatcctgaggtccacacggggaaaaggagaagacagacccccccaccccggcccagccacgctgggggacgcagcctcgtcggggcggcgaggctttgcggggtggtgcgtgcccactaggcgcacgactctccccgcgggcgccaagcgactcttggaagtgccggccgtcctctctgtgcctccgagggggtcggcgcctccacgcgtgacgcgaagtttgtggggaacgtagc

SEQ ID NO: 1880657 - DNA, 4001 bp, Homo sapiens
gaatcgtttgaacccgggaggcggaggttacagtgagctgagatcgcactactgcattccagcctgggtgacagagtgagactctgtctcaaaaaagaaaaacaaaaccatcttctttccccagatttcctgccgcctttgtcttctgtcctgcccctcatactcccaaggccttgtccttgaccaggttctaacatctgatgaaggtcacccacatcttctgtctgtgcacatctgtgattccaatttcccacgtgtctgcgtgcatagggtgtgtgtgaacagaaccatgagcccaagatccttttcaaactaggcatcctacccccagtctttccctcccatttaaggtccatcatggttgctgacaggaaagtaggactctccagggtatgctcaagaaaagaggtaagaaatcctgcattaaactgcctggaacccagcatgcatccttacacagtaagatctgatgtcatcattgtgtatgacataaattaagtgctcaggaaatacttttggaagtgagttgaattcttatcattaactatacctaatctactgtgagggccaggatgcgcggtgacttgttcaaggctatggtgaaagtcactgagagcttcctccacccagcgccccaagctcctagaccagcctcctctccttagctcaggggcctcctaagaattcctgttttcctgccctactgttctttgagtggaaagttaggaattgctaccttcccgtgctcaaaattgaaatcttcctctgactctcctggctagggcactgcctcagagagttgtaggtagtccttgggtctcaaaagctcagttaatctatcccatcatcacacccctggaggcttgcagagaaggtgaggagggatggggaggagttggagttaggattaagacagcatccacaagggctgtctcactcacatcacgtatttccttcatctcaaaagcacacatgcaagcgcacgtgcaagcatctgccctgtttgccccgaagtgcaaaaaaagctcaagtaagcattgaataagaaagagcttggaaaaaccacattgggtcataagtcagagcttgtgactcaagtccatctcctgctgtttctcttcctccgtctgcctgaaggtcttagcctttcagcgtgatcaccaccgccactaagagccatagaagcggggcaaggttcaaattaaccaaaagattgctgctgggagttctctacagcaaaaggtttagtgaaatcctgggttgactctaatgcctcatatttggattacaggagttcaaagctcaaggagtgactactttccgtattaatttccaccaacgaacaaacaatagttgtggtcgtgggaaaaggcactgggctaagagctaggaaggcagtttccaggctaggctctgtctctcacctgctgtgtggctatggctgagtcactcaacttctctgtttttcagacctaaagaggagcactagacaaggaagtctttaaaaaaaaaattatgtagtaaaatagacacaacataacatgtaccatcttaaaccatttttaagtgtacttcattggcattaagtacatttacactgtcatgcaaacatctggacaaggcagtcttaaagtctctgccagttttatcattctgggattctgtaatacccatctctcccttttttgtgtgctcactcacattctattataatctatagaatacatagtcttctgcgcctatagctaatgttctacaaaaacaggaaggatctacatgtgctaatctggaatggagctgattaaaaacaaatctcttttgtccttttgcgtttcctaatctaaggtggcaggtggagctggcccacgagacttactagctgtcgagatgtgacggaggtgaaaaggtgaaacccaaggggcagaggaaaggaggaggaaggcggggatctcgaaccacaggcaccgtgagttctctccacagcttcctctacccattctcacccagcgcaagccagactcctcatctccaatttcactgttttagcagaatagctatggaaagaattacaactgtggaaataatagtaagaagaaaaacaagctctcccatctgtgggacaaggggcggtccagtggaacaagcatggatcttggtatcaaagggcccaggttttgcccaggttcgtctgccccaaacctgcagtggtgatgcagctcatccaggtggaggcctagggcttggtcacggctgcagggtgacccccagggactctcgaccatctcttgggccacactccctctctctccatcccagcctgtttgctgttcctcacatgcccagcttggccccagtccttctgaggcctttgccacagtgtccccttgccctaattgtgcttccccaactgtgtgacagctcacttttgtcttgcctctgctcgaatgaaggttattaaacttgatcctgtccatcctacattacggagcacgccctcctcctcttttcagcatgggagatatcgtacatttacatttcatgatttactatgtatcattatggtgatcattttgggatgatcacctcacttcccacctccaagagcccatgggcatgtggttgatgtcattttgtacgcagagaacaacacttaagtttgctgctgtaccttgagtacctagacgagtacctggcacagggcagatacacaatccatcaatgacagggactgtcctgctgtcgaccccagggggtgagcttcagtgcgctcaccggcaaaggaacaagggccggtgctctgcctacctggccagggtttagtggcagtcaatgagagctctacagaggatgggctttgtaaatgacagcatcaaggaatctcccatagtgataagggggtggggatatcaggcatctgtcagtaaaggtgggagggagatatgactacagggacttgaatttctcctcgctcagtcttgtcagggtgcagagctcaccacctcaagcttttcgtgcaagggactctcgaccatctccctctccctccttcccagcctgtttgctgttcctcacatgccctgcttgaccccagtccttctgaggcctttgccacagtgtctccccacccggattgtgcttccccgactgtgtcagctcacttttgtcgcatctctgaccaaatctgaggcccttttccattcctatccccttccaggtcacaattttagattctgactttctccttcacctcctcctgcccccaggtgtccccacattcaaagcatcctaacccctctttctggaagcctcagaaaatggttaaggcctccactctgtccactaaccctggccttcccccaagctggagttcacctttcacctttcctacctcaagatgagcacccagaatctaggcccgatacttcgtgaatttgagaataaaatgaaaagaccatcccacatgctgccaaataccagctgcccctaagctcatgtatccaacactacgtgctcctttccttcagaggctgaaattttagtggggagggcccaggtctgcttgtcacatttggttcggcacatgctgcagaaggacaaccacaaaaaccagcccaggtcagagagcaaagcagtgtcctgaggccacagagacctgggttcaagatcaggccttgaaaattacaaagtaccaaacggcagatgtcatctatgtacctaatgcatgcgaggcacttacacatatagtctctttaaagtttaggagatccatttccaaggcaggtactatgattccttttctcatggacaatgagcctaatgctcagagagtctgagtaggctcctacggctggcaaggcaaggcagtggctgggtgctcaccttccttaggcctgaccccacctactcaagcagctggcggaggaaaccacaccagggttgctcagttcactaggctccatcaaggtgcgctgtacgtgtgcttccccagtgtcaggggacag

SEQ ID NO: 1880658 - DNA, 4001 bp, Homo sapiens
gaaggaaaatgggaaaggtaaaggaatctaagtgtattttattttacagggaggaatcagtagaaactatgacatttataaagttgacagaaaaatgtagatctaaacgtgctgcattttagaatttgttcatcttttctacctccacaggttcttgttcatattattttctccatggaaatgaacaggtgaattactaactaaaggccaagtgttttcctcaaacgctatttttccccttagaatatttttaatagctgtatgcttgagttttggggtgttgcttgcagcatagaatatgatcaaatcactgccttcatcttctccaaacttagtattgtgctaaaggcacgggtttgtgatttaagccaaatccctaccccaacaacctccatttctttttgaatatgaatgaggtgacaagcctgtgcatatgtttgcaactatatattaggaaaggaagaaaggagagagagggatggactggtttcccaagaaagaaataaaatttcccaaagaagttggaaaataggccttcgagtactcacttgacaaatccatagtgagtttgcatttcatcttcttcctattattatttggatggggtctcactctgtcacccaggctggagtgcagtggcatgatctcagttcactgcaacctctgcctcctggcctcaagtgatccttcagcctcaggctccagagtagctggggaccacaggtgtgcaccaccacgcccagttaattttttgtatttttggtagagacaaggtttcaccatgttgcccaggctggtctcgaactcctgagctcaggccatacacccacctcagcctcccaaagtgctgggattacaggcgtgagccaccgtgcctggccacatcttatttaatacagcatcttgtgtaacctttgagcaacggcacatagggtagattctctctctccccagcccacttccatgtatcttcagagagcttgggcctgaaagcctgcttgtttgggaagtcttctttggaaggtattgatgtctttgagttaaaccttcaggagtttctgatgttagacttgggattttggttaaagagaaaagggggacttaagtgacatcacaattgacagggagaaaaaagaaagaactctgctgggggcacacgtccaactttcacactgtgactactcagggatatttcagaatgttttcaaatagcacgtactttttggatctgtgagagcatttccaaatattaagaaaactaaccgaatgtttctaatgtttggaattactccaaggccaggaattccagatgtttgtgaggaagacacagcatgtgtctgtttaactactaaagtgggttttatgatgtcaagaaggaaatatccatagcccttcaattcttcttctttaaaaacaagataacctccttcaaaaggctatgaggagctgggtgtggtggctcacacctgtaatcccagcactttgggaagccgaggcgggtggatcatgtgaggtcaggagttcgagaccagcctggccaacatgatgaaacccatctctactaaaaatacaaaaaattagctgggtgtagtgatgcacacctgtaatcctagctactcaggaggctgaggcaggagaatcgcttcaacttgggaggcggaggttgcagtgagctgagatcgtgccattgtactccagcctggacaacagaagcaaaactcagtctccaaaaaaaaaaaaaaaataggctatcaggaggagaaaactagtgtgagtgattagtcaacaaatgtgtgtcctcctgtcctccttgctctctttacctctcagggctgttgtagcaaaaagatgtgaagcatttagaaggtacatagcattacagaaaatgcagtatattatgacagttatcactgcagatgtggaataaataattatctgtgtgacggatgccagatgcaaatcataaccagtgcttctggcatctgtccctcatataatcatcttccccatctctcctggtcaaccacatgaatcacgtacatctttaaattaggaacttgactgctacaaatgtcttgtgaagaagccaatgttatgataattcattttttctcatgaaatgcacttagttttactccatattcctgtatttcatgtaagatattcaccacgatgagagtttcttggctactccacgcaagaatcatccagattgaaaaaagctgcagaatctacatgtgcaagcctaatggtttggttttcggtttattcaagattaatgcatttagaccattcctttttcacacttacccttaagagtcccaatactttgttaaggaggctcatgtttctgcagtcctaattaaccatcaccagcactcccacctgagagtgagccactcggtagatggcaggggacaaggaaaccagtgccccgctgcttccggagggctgctgcagggctggggcttgtggctctgtgttttgtggaggacggggactcaagtccagccttgctctgcttaccaagctggacacccatggggctgtgcccacccaagtggtgccttttctgactggaaccactgtaagggctcactatgcccttgctgggggtctttccagcaaataagactcttttctgctggtttcatgtgtgtggccttgctggaagacaagggtgggaattcccttccttgaagccacttgtcgaagaaacccatggactctgcaaggacttactgagtgtgaccgagtcattgatcttgaagctgcagaggaccctgtccacgttgcgggcatgtcggaagccgtttcctctcacgacaacttgaaatgactctgaaataaagaataatgacgagactcgttacttggccaataaccttaagcttcgcatctgccctgatttagagcatttgttcactatttcaccaggcttaaaatattcaaaaattaatttaggttgaacaccaaaagcaaccaggtgggttcctttcactacttaccagtgcatcctcactaggtgtcccaagaagggcctatcacttcttatttgaattcccacccttttacctttgggcttactggtcctcctaacgcagaacaccttcctccctcctctctgtccattcaaatcttagccagttttcaaatccaggcagtttgaaaatctgtgatctcagtagccggagggagccacaggggaggggtcctccacttcctctttaatcaactcacctcctctgtgtctgttttgcacattgtactcccctgaaaggatttcttaagagcccacggtgcctacattttagaaagtcactgccttagggcattcacagctagtcctgaacaatgtaggactgtcattatgtatggtctggtggtgttctcttgtcttttcttccccagctggagaaacattcctttaggtcaggagttgtttgataccactatggcattcctatctctactgggcacacagtaacagtacataggctaggtaggaataattgtacttaggaatgaatcaaagtctttcttagcagtggtcagttgccaagcactacctacttgaattgatatcagcccctcagtgtagtactcatttgtctctgcatagaagagatcatatatcttgcctggcctgcatattaatttctcattggcataatgtatgtttgattaatgcacatgaataaaatcgttattaagtaaaaacaactctcctttaccatactcctaccatggaaaaaacccaataattagttggctaaatgtttgggaatatttgcttaagtttgttggtatctaatggtcagtgttccactttatttcacttttatcatccttttgtatctaaaaattggggctcgggataatgctatgtggcatatcacaagagaaatagactgaaggtcagaggaaaaaatgcaatgtttgtgaatatggatcttacacagtacattgccatctaaatgtagacttgttgttggaggaat

SEQ ID NO: 1880659 - DNA, 4001 bp, Homo sapiens
gtctgtggggctctgcggggaaagcctgagccactcagcacaggagagggcactggggcggccagagtggcgcatccccggaccttccataacacctctcggagggtgcccagtctcccttctgtctgtccccaaggccctttattccatcggagctgacctctaaccaaaacccagtagccgcgtcctccgaaaagccaaacccatctgcagcctgccctggcaaacaggccctggcctggctcctgaccccagtcactttggatgctcagactcccctcctgtcctcaggagcagggccctgggccttcctccccacaggcctcctctccaagcaggctggtctcctcacaacctctggacatgccctccgctgcctccaggcctttactctaaaatccctcactcctcttttcccctccagcttctggaccccatccaaagtggcagctccctctgctcttccacaccacccgctccaggccctggcggctcccgcctcaccagcctccctctgccccagccagctggctatgagctctcgggcccatgctcagttctggtgtcggtccatggctccccagctgcaggggggccaaagggcagcaaagaccatgcccaacaactcaccggaggggaccgaggtcagggccatagtcccatagtaggagaaggcgcccgtctcaaacttcatgttctccttccctgcctccacctccaccttcccctgaaaaaacacagggctggagttagagaccaagtgagggaggaaacaaaggatgaggcaggatggggagtgaggaacaagggacagtggggcaggaggaagggccggtactggagccctggagagctcaggggcctgacctgtgagatcaagagtggcctctcagggagaggatggccacgtggggcaggcggggctcaagggcaggcagcaggctccccaggcagggaagccatgcacctccgcagcaggtgggagagagggcctgggggttgctgcagtgccagggggagcaggtggcaggcccagggctgagcgggctcacctgcaggatgaggatgaagtagtcggccggcttatttcgggtgtacaggtaatggcgggcgtagtacttattgtgctcgtcaaacttgagttcctgaatgacatctgggtacttgagtagccgcagcaggatcttctctgatatcagggaggggctaaactgagagacctctgtaggaggagagagaagagacctcacacggggctggccaggtggccctaaagctcgatcactgctgtgcctccaccccaaccacagcagccacgctgtgctcagacgactcccgccctgctcggccggccctcgttctgcacctccctggggagggagcacgcttggcttctgactggttggatacaaggctgcctgcctgcctgggcttgaacagtggctcctgcaagaacagcacatgaccttgggcaaattacttaacctgcatctcagtttcctcatctgtaatatgggggtaaaagcttcacagggtggttgtgagggtgaatgggatagcacatggacagcacttagtatatatgtgctgtccatatatactaaaatatatagactataattattgcatcagcatcaatatcccacaggaaaaataatggagagggaattgccacccctttagcaagtaaggggtgggaaggaagatgaattgggccaggggaagagggggacagagcgggcagagcagaacctgtcacccaagtccccagtggagctttgaatcagggctgaaaagagagaaatgtctctgaactagaagtgaattcctgcgggaaccagcacacgtctgcaaaggggagagctggagagtaagagcagagctggatgcaagctcctcagagtgggtgagcacacgaggggtccagccacacccagcaggcctgcagaaggggaagcgtcccttctccttcccattccacaagccctgatgggcctggccagcctaggggcccacctcagtggttattttcttttttgttatttttgagacagaatcttgttctgtggcccaggctgagtgcagtggtgcattcacaacttactgcagcttcaaactcctgggctcaagcggtcctcccacatcagcctcctgagtagctgggaccacagacatgcaactgtcccacctcatagcctcccaagtagctgggactacaggagggcaccaccatgcctggcttttgtattttttgtagagatggggtctcgccatgttgctcaggctggtctcgaactcctgggctcatgcaatcctcctgcctcggcctcccaaagtgctgggattacaggtataagccatagtgcctagtcattatttcccaaactattaaatatagtaacttggatgcttcctagaagtttgcagtagccgcccattaatggcaaatgaatcgcagggagatccccaggggtggagcagatacccggccccttccaggggtggctgtgttgtctctgcacccctcacctgctgcagccctcgtcctatggggggaaagcagccggaaacccaggacttctcccccgtgaccgtatttccaccaagaccggaaggtcctcctcatgctacctgtggctaggaagcgatgagcggccaggaggagctgcggggagattttcactttgagctcattgtccgcatccttgaaggcagagaagtcacgcttgttcttctcagacacccgcttccggcttcggttgtcagctgccggaagaagagcgtggaattgagaacacagacccctgaggacttaggaagagactggaacccgccccgcagctcctgctctccagcccctagtcccacgcaggagcagcaggctctggctggcagggtcctgggctgacgccgaggcacaaaggccgagggtgaaggcagcctccgggcactgctctcagcaacctgctccctgctcaccccggccagtgcagggcacccagccactgggcctctggatgctaggcctcctgtgtccctgcactatggcccttccagctagggacaccaagtttcgatccaagcaggaaaggggtcctgggccctgtggaaggctggactcactgtacatgtcggactcgtccaggatctccgacttgatgatctcctcgatcacgtcctccagggtgaccaggcccaggacctcgtagaaggggtcaccctcaccctcgttgtttaccttctgcacgatggccaggtgggacttccctgtgggacaatgcagcaagtcagacaagagcccagaggccagtcatgagactccctcaaccaaaacattaactctagacgtagggtcataagtcaccaggatggggtcatggtggtttttatcttttccatctttcctgacgtttctactgcaaacagacattgcttttatgaaaaggaaaactaaaagtaatttttaaaagcatgtcgttaaggaccacttttttgtttttctctgtttttgtggaggaaggacagggtctagctctgttacccaggctggagtgcagtggcgcaatcatagctcactgcagccgccaacttctgggctcaagagatcctcccacctcagcctcccgagtagctgagaccacaggtgtgctccaccatgcctggctaactcttttattttttgtagagatggatctcgctatgttgctcaagctggtctcaaactcctgggctcaagcagtcctcccatctcagcctcccaaagtgctgggaatacaggaatgagccaccacgccaggccaggactacttgtttaaatcggataaaaatggcaatgctgggagcaatggctcacatctgtaatcccagcaccttggacgggctgaagcgggcagattgcttgaggccaggagtttgagaccagcctggccaacacggtaaaaccccatctctactaaaaatacaaaaatcagctaggtgtggtagtacacacctgtagtccc

SEQ ID NO: 1880660 - DNA, 4001 bp, Homo sapiens
tctcctatctcagtattcagacttcttcaaaaagtgcccagcagaaaaggtggctaagccccagagagatatgacatatatgattttaacttcatctccttgaaaattaaaatagtaacaatgtttagtttatccttttgttaccaattccttgcagctgtaggtccgagaaatggccaacttcagcagtaacaattaccatattaaatgttgctctgtgtgaagggatctggacaagtcactctacctgcataaataaaatatacccagactctacctttgtggcactttcattatattcgatgacctctgtcccatcacctgcttcaggttaggataaaaggtataaacaagctgccacctggtgagatggcaggcttccctacaaaaaacaagaaagtaatattctgccatttcctaagaacaagcagcaatgtcctggcttcaaatggtctctagaagtccatgcaccaccgtgcttccactggggcggttgtatcacccaggagcattaggaattgtatggaggtggggtggggcactttctgcttgtcacagcgatccgtggaacaggactctgctccaaagagaagtccagccccatgcgtcaacagcgcccccactggtccacatggaaggaactccttaagtagcgacactgtcctatcaatctttataaaggagtccctcattctttagcagctgacagaatgtctgtaggtcattagacaatgaaaaaagaaagaagagagggaaggagtaaaacaagcagagaatagggattatggacagtcaaaatcccagttctgctacctgcaagcagtgttgtcctggccaaatggcttaacctctttgaaaatattcattacttttcccttttcttccccataatcttgccagttctgtctgtattcagatgtctcctaactccaaagtctggctcttttcacaccataggaagtgagctggtaacatgaatgaagatgaaagactaattgtttcctcagtctccattactgcacaatttacagcacaattgtactgttatcaagtgaactttggaaacctgtagcacagagcaagagccgcatactcccggggacccagacttccaagagtcctgcagaggcagaagggagggagatgaatgagcttctatctaggcgagtcatgtctacccgcatctctctgaggaggaaagactttacttctcaggatcaacgagaagagatatgagcttcccccaacttttcttaagatacattccccctccttcctgatcctcccaccaagggtggcccctggatcacagtttggaagtcactgccctaaggatttcaccaaacaggcagtgtggtaaagaagtttctaacagagggtgaagtgctgtctctggaggataagatacaacctgcacccacaggatgattctcattcttggttctggtctctgcttgggaaccagcaggagaagaacatgtgggttggcgagtgggggcactgcagctgacacaaagtaaaccagccctgttccagtccactagggttgatttttctttttttcattgagacatgatcttactctgttgcctgggctggagtacagtggcatgattatggctcactgcaccttcaaactcctgggctcaagctattcttccaccttagcctcccaaatagctacaattgcaggtgtgcaccactggatccagctaatttttttaattttttgaggagacagtgtctcaatatgttgcccaggctcatctcaaactcctggtctctagtgatcctcccaccttgacttcccaaagtgttgggattactggtgtgagccactgcacctggcctacggttgttttttctatgtgtattttaattatgtctcattgagaatcatcaagaataaaaataacttgaaaaattggcaagttttcctattgcaagtaaaaaactctcattttttaaggaaaatgagagttttttacttgccagaggaagtcactaccaggaattttaatggttaaaaaaattattttctttttgcgaaatattcatggttcttcaacactctctagacacaacagcaaggctccctggccccagtactgcaaaacaaaccaaaaaaaaagtacaggtccttagtcagccctcaaacacctcaagaagaggtatataattccatcatgcatcatacctctgtgcctgttaccttcacaaaaggcaacaaagaactatagtcattcttccctctattctagtccctcaggcagggaataggttgggttttacatccatgtgcagtattataattttatgcggaagcagagcagacaagagattgtcaggtctgaaataaagcaaaattctatatgccttaacagtgggccccctaaatacacagtcaatattgtcctcatattaaggtcatttctttcacacagacattgaaggtactaatctactctgaatgtcagctacattcttgcaaaaaaaaaaaaaaaaaaaaaggaaaggacattgaatgagaaaatgcaagaagtgtatgttgcatagagcctaaatcttaactgaagtccttctgttttgaggtacttgaatcacattatgtacaccattcaatacgaaactcctaagtaaaataacaggataccattttcaaaatcttaaagcaacaaactactgatgactagaattagaaaagcatgcttccagaaaggtgactaaatacacccccccaacacaaaggggcaacggtcaaagacaagactggaattgggccttgcgagctctgcctggcaaccttggctgtggaggccacagtggacagagttacccactctcttctgggcttgttcccaccatctgtggggtgggtgtatagggctggggctaagccagcttcagaagccccccaaccaccaccacaccatcaagtctctcaagtgggactgctgtgctgtggcacgcacacccacacacaagttgccaacagtttggaagttagccccagtttccaaatatgtcaacccaaaagccattcaggtaaatataagtgggagccactacaaagtgggactttatcaggcagatacagagaaccaaaaaatgaagttgctgaaagctgctgtggagatttaagtcttttgtttttaacggaggaagataatgaggcccaggaacacagcttcctagagtaagacagtgttccgtcctggcctccaggatgttcaacacctatcccaagcttctgagcattctgtcctcactggcttctctcagtgctatttccaaataatctagattgcaagttatcacaggccacattcctgaaaaaacacagagcaatcctgctgacccacttcagggaagccctttcataacaaagttacccaaatcttctggaggggtttaatgagcccaggttatatatatttagtgagtttcaaacactcgccaggcactttgaaacacagttcctgaatgtaggtgttaactgtaaggctgtgaagggcaatgatcaaagacaaaagcacttgctttcatgatttaaataagacatcctaaccagattttctaaatcactatatacttcaatggataccaagcactgaggtgggtcccctagggcaggggtccccacctgctggctgcggaggggtcagtggcccattaggaaccaggccgcacagcaggaggtgagcagtaggcgagcattcccgcctgagctccacctcctgtcagattagcagcagcattagtttatcagagaagccggaaccctgttgtaaactgagtatgcaagggatgtaggttgccagctccttaggacaatctaatgcctgatgatctgaggtggaacagtttcatcctgaaaccatcctctacctccttctatggaaaaactgtcttccacaaaactagtccctggtgctaaaaaggttgtggactgctgccctagggcactggctctcaaacctgactgctcgttagaatcccct

SEQ ID NO: 1880661 - DNA, 4001 bp, Homo sapiens
tcagggacaagctcacaaataaagtagaatttgagcagagacctgagggaaataacatagtattttcaaatgacgattcttattggaataaatgtcatctttaagtcctgtcatcataaaaagtggtatcaagttctttcttgggttaccggaaataactttgacagctaagtgaattgtaaagttcataaaatggaacaataagtttctttgcctaggtaatttcccagcaaataaaatgcaaagcatcaaaaaggtttttttcttcttaaactgctcaagccattgtaaaaatttcacgaaaatatgaaattcgctgagaaaatttaacatttgtttaatttcttgggtgaaaaaaatgtcttaatgaattagatagtcttaagagaccacagacaatcaggatatgttattggacaaaaaatttagggtccaaggtttactttgagatgccattggacattgaaaatctctttgagcaaaaacagcaactaggcctggagctcaataacagctctgtctggacccgaaggagggaaaatatgtgataattttttgtgtaattaggcttcaggaaaacacattgatggtaccctaatgaaatatgcattaaaaaactgaattgttgaaaagaacaaatatatcaagtatgattcaattagttttagagttcctctaagagaatttcttcatccatatacataatttttagctaaatttacctctcatacttgttaaaacaaattagaggagaaaaagaaattatacgtgtaaattagtaattatgtatttctcataagaatacctaaatatttcaaacaaggcaattctatgtaatataattgataaaatgtgaatactgaactttgggttaattcagaggctgacagattttgattataaggtatctattaattcatccactgaggttcatattttgattgtcttgtattaaaatgtctgttctttgaaaaaataagtcattgagttgtatggacatgtaattaaacatagtcatggcaaagttctctgacctcaagtggccagaatagccacgttttgcatctatttttatgatacgtaatcatggtctggtttttagagacataagtagaagtttcctaccacatcaacattcctaaataacagtatcattttggtacagacaacttcagaaaatcagagaagaaaaaagggaacttgtttttggaaaggttacaaacctgattttacgtttttcttttaatttctgttaaaacagaggaaatgaactttgtgtatttaagggagctgcatagacttattagtcctggctgcagatattaagtaaaaactatcttaactttataataatttgaatgtacttttatttaagtcaagtatctttaatatctttggaaaagaagaatagtattgaaaaacaatgagtgaaattcaaataaccaaatcacaatgtataagaaaaaaagatgcattcaatgtagtttttaacaattcatctcatttattgtcaaaattaataaaacaggctgggttcagtagcttacgcctgtaatcccagcactttggaaagccgaggtgggtggatcactcaaggtcaggagtttgagaccagcctggccaacatggtgaaaccccgtctctactaaaaatacaaaaattatctgggtgtggtagtgcacacctgttgtcccagctactcgggaggctgaggcaggagaatcgcttgaatccaggaggcagagattgcagcgagctgagatcgcaccactgcactccagcctggataacagagcaagactccatctcaaaaaaaaaattaataaaacaatattaattgagtgttccctggctgagtgttctggaaataacagttggggagatataagcaatttctcagagataaagaagttgaatatagaatgctcttgggcagcagtgtagagattagtttgaattcattaacaggcaaaccaatctctacactactgcccaagtacgactttttttttttttttttttttttttgagaccgagtcttgctctgtcggcaggctggaatgcagtggcgcaatctcggctcgctgcaacctccacctcccgggttcaagtgattctcctgcctcagcctctcgagtagctgggactacaccacctgccaccacgcctggctaattttttgtatttttagtagagacggggtttcaccatgttggccaggatgatctcgatctcttgactgcgtaatccacccaccgcggccccccaacaagtgctgggattacaagcgtgagccaccacacccagcctattcaacttctttatgaaagaaagaacttcttgtggaatacatgccagagggtgttggctgcctttaatcagacatcttgaacatcaactaacagcattgcatttacttggttgatagtgatagggatggcatgaagtcttttcctttgttgagctgcgaaatggaaaaaggaagactgaatcttctgagacaacggaatgaactaagagcgtcaggcagcagggaaagattccatgcagcaagccagttaggtgttcattactctgggcctaatgtaaattgagaagggtccatccttacgacagaggggaagctagaaaaagaagctagagagaccacttcaccaaccaagtgttaatgacagaatcagaggagttcagaagttatgtttcacacaagaaaaagatttttaaagcaccatatcctgctctgaatgactattttagttttccttcaggtgtttatttctgagtgaaggattgggaagacatacatgaaatcgctgccacaccctctgcttgaaaatgaccatgcagtccagggaggacacagccatacagaattgcttgaccctttatgaaagctcttctttcaccaacaaaaaagaaaaaaatactaaaaatgatatgctgattgatttctttggaatcaatacaggttgttagatctgtcatcctcttcatcccactctgagagttattggtatacttgccctccattctgtattaaagccagtcatgcagaaccttatgcattctcaccagccagctggcctttacagagttagttataatctaagcctgaaaattcctctaaggtagttggcaatataaatataaccttttggcaatttgctagactctatttttaaagtacatcattatcagctggatgtggtggctcacacctgtaatcccagcactttgggaggccaaggcaggtggatcacctgaggtcaggagttccagaccagcctagccaaatggcgaaaccccgtctccactaaaaatacaaaaattagccaggtgtggtggcacgtgcctgtaatcccagctactcgggaggctgaggtaggagaatcgcttgaactcggatggcggaggttgcagtgagtcaagattgcgccactgcactccagcctgggaaatagagtgagactccatctcagaaataaattttagaaagtacatcattgtcaacagttttgcataaagcaaattcaaaattgatgaactcatagaataaaaaaatcctacatgaaaatgccttcctggaatttgagggtcagcaaacaacaaaccaagggcaaatttcaggaaaatgaaacaagttatgtcataaatgccattcaaaagagttgcacatacatctcttaagcttggctaaaatcaggaaaatagggtggacaatcagtttttattatttagaaaatgaaatttcttctaatcccaattaatttttcattagtaacaacattagcttctgcatgccttattaaccacatgaaattagtacagactgagaagttatacaaggcattaattttaaagttttgaaaagttatcttgcctttaaggatagtattcatatctccagctcataacgttgggttggctggactacatataacatatgtaataaatcttcaattcaagtcacaacttttcttcttgttatctttctattccta

SEQ ID NO: 1880662 - DNA, 4001 bp, Homo sapiens
tttttttttttttttttttttttgagacagagttttgatctttgttgcccaggctggagtgcagtggcacgatctcggcttactgcaacctctgcctcccaggttcaagcgattctcctgtctcagcctcccaagtaggtgggattacaggcacctgccaccacgcctggctaatttttgtagttttggtagagacggggtttcaccattttggccaggctggtctacaactcctgacctcaggtgatccacccaccttggcctcccaaagtgctgggattacaggcatgagccaccatgcctggcctgaatgtgtttatggatttctaagtagagggatttactggtttcttttttttaatttctttttttttttttttttccagtatcagggaatgtcttgctccctctggtgtctgactgctgtactacagtcggggacatagatgctcctctcctttctctccttcgctgtagagaagccttgagttgtgctgtctgctgcaagccactgacccctttttttcctacttaactgctcctgagcattcaaactatgctggtttcgtccgctctccttgtgaggtgagatagaaaccagctccttggacagctcaccaaaaggctaggatgttgaagacatgctccactcctctcatttcctcctgaggctgaatcctcgggttgcgtaccttctctcaatctctcagagctgtgctgagtgcaggaagctgtccaccccttttcctttgttcttaactgctctcaggcatctgaaccctgctggttttgttagtattccacgtgagtttagacagaaatccagcccctagggcagcacagtgaaaagccggatgttggttgcacactctactctctccctccaagggagaagtcctaggccaaggtgatctccttggtgctgagctgtgccggctttggggaggggctgacctgggtaaaatgttcttcttgcctgtttcagtgcaactcttcttggttttgttcttgtctggagtacgacaatatcttaattggtttctggacttttcataaaggtatttttgtctatatgtccttgctaaatcagtgtttctgagaagctgtgagaactggaccttcttctagttcagttttgaccttaactattcatttggtctcaagctactgctttctattcttttcattttaaccacagccatgcattcctactattaaatacagtaattcctcaaatgtgccagcttctttcatacctctgctttctacccagaacatcttttcttactctttggatcagtcagggttcattaaaaatcagaaaagcatataaaatgtcatttgttaaaacagtgattaaaagcatggactctagagctagcttgcttaggtttgagtttcagcattgccatttgttagctgcttgacttttggcaaattacttatctgtgcctcagtttattcacttattaaaatggagatgagctatgtctaatctcattgggttgttattagaattaaatgagttaatctatgtcaagttcttatgacaatgcccagcacatagtaatttttagatttgaaaaaaattagagtgtaggtcacagaggccttgggggaacaaactagggcagttgtgaaggtctcagtggcaagatgcacaggccatctgtttgccatcaaatgacttgactccagctgcttgctttccttttagttttccctccagatttagatttctgaaagagaacatctgattgactgagtttgagtcaaatgcccatcccttaggggcagttaatcaattaagtggtgtcaggccaactaaaaagcagcttcccactgtactgtccactgaatggacagactcagctcatactgcatttcctgtgtcttccctaattgtcaccgtcagagtccctgtgcttgtcatgtcttacccagtctccggtgcagccttgacaacaggctgcaccggagactgggtaagacatgacaagttgtgtcacatcatttgttgtgtcagtaagtctgtctctgctcctcagttggtaagctctccggagtccgacccagctgcctgtttttctgaacttagtacaggacctgccaaagagtagacatttaataaaggtcgaaaaatatctcccaaattcaatcttcctttactcccctggcttcattttcttctgaggctggctcccattgatgccttgtactttctagacaaataatatcaagctaagtggtaattaaaactccagaaacagccccagagggattaagagagtaagtactgggcgggtaagagtttttcaggtgactccaggcaacctgagagataacttgttccaacaaaattgttacattgaaaatagaggggggataacaaaggtaacaaaggctgggaggacatttaataaaatggcagtagtagaattagtacaggaggagaatcatgaatgttgtctttttgtctgtctattctgctttcatttaacctagtggttttcaaacagggatgattttgcctcccaggggacatttggcaaggtatggagatggtttttagttgccacaacaggagggaggtctgtgctactggcctctagtggacagaggccaggggtgccgctaacatcctactatgcagaagatagcccctcacaataaggaattatccagccccggatgttagtagtgctgagattgagaaacccttacctaattctaagcctcccacctcaacatttctccaaaggagaagtaggggcaatatggcagatatagcaagattaattagtcaccatttcctgaatgcccatgaatgtacaattgcctggatttggtattttgaaggctataaaaaaagaagtttgtattccctgctcttcctagaccatttatgagaacaactctgttgtatatccagaggaaggcagtacatggtaggcaccaagtaagtgctttatggaggaaggagaaaggaagatggcaacttatctggagtagcaaaggttttggaagcagaataactcaaagtatttgggaagagagttgactagaagagatggttagataggagagtggtaggaattctggcttattgtatacccacatgctatacattaatcattatttcatttatgatggcccatcggggagagggtgttaaatccagagtatcttgctgggctttgaacccaaggaacaaatatgtaacgtttaagctctgttgttttggtcctttggtttcttctcttcttgatctgtatttaccaccttatggataatcccacatttgcatctgtggtcattagtgtgctccttaactccagacctgagtctctgtgggttgcatatggtcactgcacatcccagaagtgtctcaagttcagtaattctggaagtcagctatttttcttgactcatcgttttccaatgacaagctcgtcctcctgtcttcctcatcaaagtttatttgttcgtttagtcagcatttgccaagcacctggacacttaggagaaagatgaataagacagtccttcttgccagaggattctgtgtaatgggtaaggtagatatgtaaattggcagttaaatatagcatgaaaattcgagtgatctagcatattagtctgttttcacgcagctgataaagacatacccgagactgggcactttacaaaagaaagaggtttaatggactcacagttccacatggctggggaggccccacaatcatggcagaagatgaaaggcacatctcacagggcagcagacaagagagacagccaagcaaaaggggtttccccttataaaactatcagatctcgtgagacttattgactaccacaagaagagtatgggggaaaccacccccatgattcagctatctaccactgggtccctcacaacacaagggaattataggagctacaattcaaaatgagatttgggtggggacacagccaaaccatatcatctaggatatttggaa

SEQ ID NO: 1880663 - DNA, 4001 bp, Homo sapiens
cccttgtgttgtgagggacccagtggtagatagctgaatcatgggggtggtttcccccatactcttcttgtggtagtcaataagtctcacgagatctgatagttttataaggggaaaccccttttgcttggctgtctctcttgtctgctgccctgtgagatgtgcctttcatcttctgccatgattgtggggcctccccagccatgtggaactgtgagtccattaaacctctttcttttgtaaagtgcccagtctcgggtatgtctttatcagctgcgtgaaaacagactaatatgctagatcactcgaattttcatgctatatttaactgccaatttacatatctaccttacccattacacagaatcctctggcaagaaggactgtcttattcatctttctcctaagtgtccaggtgcttggcaaatgctgactaaacgaacaaataaactttgatgaggaagacaggaggacgagcttgtcattggaaaacgatgagtcaagaaaaatagctgacttccagaattactgaacttgagacacttctgggatgtgcagtgaccatatgcaacccacagagactcaggtctggagttaaggagcacactaatgaccacagatgcaaatgtgggattatccataaggtggtaaatacagatcaagaagagaagaaaccaaaggaccaaaacaacagagcttaaacgttacatatttgttccttgggttcaaagcccagcaagatactctggatttaacaccctctccccgatgggccatcataaatgaaataatgattaatgtatagcatgtgggtatacaataagccagaattcctaccactctcctatctaaccatctcttctagtcaactctcttcccaaatactttgagttattctgcttccaaaacctttgctactccagataagttgccatcttcctttctccttcctccataaagcacttacttggtgcctaccatgtactgccttcctctggatatacaacagagttgttctcataaatggtctaggaagagcagggaatacaaacttctttttttatagccttcaaaataccaaatccaggcaattgtacattcatgggcattcaggaaatggtgactaattaatcttgctatatctgccatattgcccctacttctcctttggagaaatgttgaggtgggaggcttagaattaggtaagggtttctcaatctcagcactactaacatccggggctggataattccttattgtgaggggctatcttctgcatagtaggatgttagcggcacccctggcctctgtccactagaggccagtagcacagacctccctcctgttgtggcaactaaaaaccatctccataccttgccaaatgtcccctgggaggcaaaatcatccctgtttgaaaaccactaggttaaatgaaagcagaatagacagacaaaaagacaacattcatgattctcctcctgtactaattctactactgccattttattaaatgtcctcccagcctttgttacctttgttatcccccctctattttcaatgtaacaattttgttggaacaagttatctctcaggttgcctggagtcacctgaaaaactcttacccgcccagtacttactctcttaatccctctggggctgtttctggagttttaattaccacttagcttgatattatttgtctagaaagtacaaggcatcaatgggagccagcctcagaagaaaatgaagccaggggagtaaaggaagattgaatttgggagatatttttcgacctttattaaatgtctactctttggcaggtcctgtactaagttcagaaaaacaggcagctgggtcggactccggagagcttaccaactgaggagcagagacagacttactgacacaacaaatgatgtgacacaacttgtcatgtcttacccagtctccggtgcagcctgttgtcaaggctgcaccggagactgggtaagacatgacaagcacagggactctgacggtgacaattagggaagacacaggaaatgcagtatgagctgagtctgtccattcagtggacagtacagtgggaagctgctttttagttggcctgacaccacttaattgattaactgcccctaagggatgggcatttgactcaaactcagtcaatcagatgttctctttcagaaatctaaatctggagggaaaactaaaaggaaagcaagcagctggagtcaagtcatttgatggcaaacagatggcctgtgcatcttgccactgagaccttcacaactgccctagtttgttcccccaaggcctctgtgacctacactctaatttttttcaaatctaaaaattactatgtgctgggcattgtcataagaacttgacatagattaactcatttaattctaataacaacccaatgagattagacatagctcatctccattttaataagtgaataaactgaggcacagataagtaatttgccaaaagtcaagcagctaacaaatggcaatgctgaaactcaaacctaagcaagctagctctagagtccatgcttttaatcactgttttaacaaatgacattttatatgcttttctgatttttaatgaaccctgactgatccaaagagtaagaaaagatgttctgggtagaaagcagaggtatgaaagaagctggcacatttgaggaattactgtatttaatagtaggaatgcatggctgtggttaaaatgaaaagaatagaaagcagtagcttgagaccaaatgaatagttaaggtcaaaactgaactagaagaaggtccagttctcacagcttctcagaaacactgatttagcaaggacatatagacaaaaatacctttatgaaaagtccagaaaccaattaagatattgtcgtactccagacaagaacaaaaccaagaagagttgcactgaaacaggcaagaagaacattttacccaggtcagcccctccccaaagccggcacagctcagcaccaaggagatcaccttggcctaggacttctcccttggagggagagagtagagtgtgcaaccaacatccggcttttcactgtgctgccctaggggctggatttctgtctaaactcacgtggaatactaacaaaaccagcagggttcagatgcctgagagcagttaagaacaaaggaaaaggggtggacagcttcctgcactcagcacagctctgagagattgagagaaggtacgcaacccgaggattcagcctcaggaggaaatgagaggagtggagcatgtcttcaacatcctagccttttggtgagctgtccaaggagctggtttctatctcacctcacaaggagagcggacgaaaccagcatagtttgaatgctcaggagcagttaagtaggaaaaaaaggggtcagtggcttgcagcagacagcacaactcaaggcttctctacagcgaaggagagaaaggagaggagcatctatgtccccgactgtagtacagcagtcagacaccagagggagcaagacattccctgatactggaaaaaaaaaaaaaaaaagaaattaaaaaaaagaaaccagtaaatccctctacttagaaatccataaacacattcaggccaggcatggtggctcatgcctgtaatcccagcactttgggaggccaaggtgggtggatcacctgaggtcaggagttgtagaccagcctggccaaaatggtgaaaccccgtctctaccaaaactacaaaaattagccaggcgtggtggcaggtgcctgtaatcccacctacttgggaggctgagacaggagaatcgcttgaacctgggaggcagaggttgcagtaagccgagatcgtgccactgcactccagcctgggcaacaaagatcaaaactctgtctcaaaaaaaaaaaaaaaaaaaaaaaaaaatcatagaaaaagtttaagaggcccccagaatctctggctaagctgattaataagagtctttccctgtcaaa

SEQ ID NO: 1880664 - DNA, 4001 bp, Homo sapiens
tggagcctccatggctgggttcagtgtaggtgacagggtgctgacaagacttgagggaggggtgaggccccagtgcctgccaattctgatcaacaatgcggccaatctgggaaaatccactttattgagtccactttgtttagtctggctctcctggctggctttgccccaaaatgtccagcttcagggcacagggggagaggttggggacgcctgcgccccagggagggctgacctgcagctgggtggtgggttctgagcctctgggctcctggtcaggcatgcaggtgtctgggcataccccggctcctggccccaccacccgccttgttctgtgccaggtggggtggggaggccttgtctggcagcctggcttcctccatctgtccagcttgctctgtcttgcacctcctgtggcaggctctggactgtgggccaccaggtcagcacccagcagccctgggacagggccctatcgccctaggctcctaccatgacactgccaggcatgggatgagcaggcagtcacggtcaggagcagccttggagagcgccgctgatgtcctcttcccccggatccctgcctccatccccgggcgggctcttcaccttctcggcactactcctcctgcccatgccctgcggccccggccccgggcccagccccccggcggcggctcaccggacttgacggagcaatgcacgtgggcctttgactcgtaatacacccagtcaaagccggcctccactgccaagcgcgccagcagtccatacttattgcggtcgcggtctgatgtggtgatgtccaccgcgcggccctcataatgcagggactcctctgagtggtggccgtcctcgtcccagccctcggtcacccgcagcttcacaccgggccactggttcatcaccgagatagccagcgagttcaggcggtccttgcagcgctgggagaggaatgtgcgcgaaatcaaccagagcgaaatcagccggaggagccggccgaggtgcaggtgtaggcgcagcctcgcccagaactctcccgccacacccaagggagctggaagcccgggagggtgctgtccctctcccttaggaacagagggccctgaagtgctccctccctagcatacagccgcccccggggatctggaccgcacggcggtatcacaaatctggaggaggcatggaggcaagcgccctggcggcgccttcactggtaggtggaggtcccctctctcctgtgctgtcttcagctccgggtatccatccctccacagacaggactacacctttcagcgcccggtccctctgtgcctccaaggcaggagggccagccagcggccgggagggaggagtggcagcagagccgactgcctgcggccggcctgcgaggcgtgcaaggcccgaggtgcccagtaggtgtcaccgcagcctcagggctgaggcctggggacgacaggctctggaggcgcggcaggtgcagagcgtctcggtagcttcagggggtgtgttggaggggaatcgccggcctgcctggatccctcgagcaccaccgaggattcccgccgggaccctcttataatcttaaaccggcccacaaccccgccagagatgacagggccagggaaccagaaaccggcggattagcgccagggccgcccaatggggggccacatgcaacgtcttcctctgcaaggcgcaaaaggggctgacaatcccagacctccaggacctctgcaccggtgccccgcccctataccgtaggaaggaactccataaaccaagcttctgatctcagggagccagctccaccatcctcctcacgtggagttggggtagagccgcgccctgggggaaggaccgaagcggtcatccttggttgctgcctcctggtgtgcctgggtcctgagagcccaagagactgtgcagctgactctgagaagaagctggggccagggccttggtctgaggggaaaggcccttccaccagtcctcgactctgagactctgagattcgaggcgccaacaagtgtgggcagcccaagtctcaacctacccccaccctgcagagcccgggcctcacagacccttggactcagccttcctaggagccaatagcagctacaacccagggcctcgcaggtcctcgctggtgcacagcctggctgggggtgcttactgcccagggagggagctccgcttgctccttcgtagaccctgccgtcaggcttctagccccgcacctatgcccgcctgcagccctggttccccgcctctctccctcactgccaccgccccctctcgggtccagagcccgggcgtgcgctgtcaatgattgcccagcccgtggcccggatccttatctgcattcctcggcgcccggcccggcccggccaccagccaaccttcggccccgacactggccggccagccccggcgccagggtgcatgctgagggccctgagtctagctgctcttcccaacggatctagaaagccaggggcctgctttcagggggaagcctcgggagaccccgaaggaagggggtgaaggtctctcccctcgcggacctggctgctgggaaggaatttgcgcctctaagcttgggtggagcgcgggtcctactccagcatgcagagactagcgtcagccctggtccctgcctccctcggcatctcagcccctcttttccactccttcccgtccccaccaccaagcccaggaatcccctaagctcagtcccagagcccgaaggccccaataacccacccttccaccgcagtagcacccctcagctctccggacagacacgtgggctcgctgggcaggttccttttcccacctccgcctcccgattcaactcttcctcgctgttcttaaccccagacccagccgggacgctgctcctggaaggggcagcccgtagaaccaagagcgcacagggaggaaaggccgtggtgaccctacgcacccagagattctttgcctcaggggtgccgaaaagtttcaaaatgaaaggggcacagctgtgcagaaggttaggccgggagggactgcgtgggtcctggaggcgcaggaggcagccgggtagaggtacctccgggtgcagcgtctggctgagctgccagtactttggggcagaggagccgccgccaacctgctgggctgtggggcttggcagcggggagctcttctagcagtctcctccgggcttggggatgccgacactcctgcctggacccctggccagcccatcttgggcaggaggcagcggggcttggcgagaggggcaggtgccagggagcgtgccagccagtcgagaaaatgtgccagggggtgggtagggccgggcaggtggccgtgcttcggtggcggcgcgctggtagggcggatcgcgctcacctgggtcatgaggcggtcggcgcctgtgttctcctcgtccttgaagatgatgtctggattgtaattgggggtgagctccttgaagcgctcggagctgcgagcgatcttgccttcatagcgtccgctggcgcccagggtcttctcgggcacattggggctgaactgcttgtaggcgagcggcacgagtttgcgtggcggtcgccggcggctgcccaccacccgacccggcccgcagccccatgccgccggcaccaccagcagcagcaacaggaccaggcagaagtgcagtcggggccggagccgggcgggagacatggccggggagcccgggggagcggcgggcgaggtctcctggtgggctgatgggcaggcgcgtcgacgggagcgctgcgggggctcaggcgtccgggtggctccggggggctccaggcgggggcgccatgggcggcgtggtgcggccagggccggcgggactcaagtgcggggcgggggcccagggcccgagctggtggcggcgcgctgtccccctcggcgcctcgactctgagctgccgggctcgccggccgccaataaataggccggcccgtttgttttggcaa

SEQ ID NO: 1880665 - DNA, 4001 bp, Homo sapiens
gggaccccagtgacttctctctctgactcctatgatcccaaagacaccaatgcacgaattcactcttgactcaaaagatttatcctaactcctgtgatcctcaaatacatcaaccctcatgatctcaatggttatgtttgccttcccattgaccaccaacagccatatctctctaacctcccctgacctcaatggccccatcactgatgccgtcatgactccagtgaccctcaattctctgatcttagtgtctttgtctctggttcccctgggatcccatgtccttgaccccttggacctgctccctccagcctggtgccctcatcttggcccctcactagcccctgttcccctccaggttaccgctgcttcaaggcagtgctctttctcactgggttgctgtttggctcggtggtcatcttcctcctctgctaccgagagcgggtgctagagacacagctgagtgctggggcgagcgcgggcatcgctctgggcatcgggctgctctgcgggctggtggccatgctagtgcgcagcgtgggcctcttcctggtggggctgctgctcggcctgctgctcgcagctgctgccctgctgggctccgcaccctactaccagccaggctccgtgtggggtccactggggctgttgctggggggcggcctgctctgtgccctgctcactctgcgctggccccgcccactcaccaccctggccaccgccgtgactggtgctgcgctgatcgccactgccgctgactacttcgccgagctgctactgctggggcgctacgtggtggagcgactccgggctgctcctgtgcccccactctgctggcgaagctgggccctgctggcactctggcccctgctcagcctgatgggcgttctggtgcagtggagggtgacagctgagggggactcccacacggaaggtaagggggcacaggccaaggtggacatgagaggagtgggtggccagggatgggttgggggccaagtgactggggagtgggggacagcagcagaaggcctcgatggcggtagagagctgacttgctcagggtctgggaggatagcacccaggtgccatcattcattccacaacaacatatggagtgctggctccgcaccaaccccattccaggcaccagggatacagcagagataacacagacaaggttcctgtccttatggattcaaggcaggcaggagacagataacagagatgcaaacaaacatgattccagttgtgtagagtgatatgacagagacattgtgcaggataatgtgaaagaatgacctatggaagctattagagttagggtggtcagggaaggctgcttgaaggaggtgatatgtaagcaggcacttgaaggctaaggggccagccatgcaaagagctagagaagagggaacagcaagggcgagggccctgagaaggaatgagctcagcttgcttgaggaagtggggcaggagtatgggaggtgaggtgtgggagccagagtgattgcgtggaccctctgggtcataagaagcactccacattttattagaagggcaataagactttaaaccactggagagtttaaagtaggggaggatagaatctaatttagcttttgggatgctcattctgctgccgagtgtagaaagcattggagggagcaagtgtagggggaaaccagtgaagaagcagctgtgattgtccagtggaaagatgatgatggctggcctaggtgattgggagagggatgacagcctggaagggggtacctggaagcctagcaaccttccataaagacctatggaagaaaagaacaacagcgggaagtctcctctgagaggtaggagaccaggaaaggaagtgacagggtgggagtaaggggttatggacaagaggaatctggaagcctagagccacaggtgggatgagagagggagggctcaagggaaacaaggcgcaccgtcctctgagctccttctctacccatcccaccacagtggtcatcagccggcagcgccgacgcgtgcaactgatgcggattcggcagcaggaagatcgcaaggagaaaaggcggaaaaagagacctcctcgggctcccctcagaggtccccgggctcctcccaggcctgggccaccagaccctgcttatcggcgcaggccagtgcccatcaaacgcttcaatggagacgtcctctccccggtgagctccctgagcccatccagccagaatgagaaggaagtgtggaaactctttccaaacaggactgggctttccccacgggctggttgctatctagaaggcctgtttgtccatgaactgtttgtccatgcatcggagcccatgcaccaggggcttggcgggtccagctggtgggggaattgggggaaaggttcctgagtatgggttttaagtgggatatggtatgtggtggggtctcagggctgtggactctgggtctatggcagtctatagaagtgtcaggcttgtgggaattcaggaagaggtggcttttagggcaggattctgcggtgggactcacacctatgtttgctcccccacagagctatatccagagcttccgagaccggcagaccgggagctccctgagctccttcatggcctcacccacagatgcggactatgagtatgggtcccggggacctctgacagcctgctcaggccccccagtgcgggtatagccatatctgtctgtctagactctgcagtcaccagctctgccagctcgaggaggcctgctaggctgccactcagcctcctggctttggctgtccctctccccagcctggagagggctggcctggtcactagaagggaggattgtctcaggcgagtcttggcctgagaggaaagccccctcccaagctcccaagaggctcctgaggaactcggggtgtgaaccccattggggtgtgctcagggttgtgagtgtgttgcccgtgtgtctgtgtgtatgtgtgtgggggtgggcaggcttggaggggacgctgggacccttgccttagatttctgactggtagggtttctccaggctcagccccacctcttcactccctgccaaggtcccatgggccacctcctgcatgtctccgcggaggggctaccttccttcccatcgccctgcctcgcagccagactcatctaagggttcttgtccttgtctatggggcaaactgtagcatccctcaccctggtcccctggcctctgtaaagccaccagcctgagggcagtggcaggagatgggggtgggggggtgctgctctgggctgggttgggaagggagttggggaggggtttaaatgcacggtgcatgtctggtgtctgtcatgccaacctagacacctcatgcttctgtctcccccaccccactctgttttacatcttttataaatgtgccaaactgtgtggcctctgccaggaatggtggtctttggtggctggcactttcatgggccaggtacaagcactacagccctcggtccccagtgtcgctcactgcacaggggctccaggcaaggtctgcccccccacatcactcagagaggcaaggaaatgagctgtagcacttttattgttccttgtctctctacccctgcccagggtaagggcaaacgccttccaagctgtccaagggcacccgcctggcctggttaggttctcctagttgcctgcagaggaatgactccacatggggctggggagagaagggggtaccaccttcctctcccctggcagagcctggacaccagtacacaaagagctgggcccccaggttctgccctaccctttctgggccttggttagggctgtcttggcggcaggaaggtgggggtcagctaggggtggggcacagcgcggcacctgaagggaatgctgggatttgggatagaaggtgggatgtctcttatggggaagaggaaagaaagaggcttctgccaaggctgacatggaacttgctgagatgggcagaggca

SEQ ID NO: 1880666 - DNA, 4001 bp, Homo sapiens
agaaaggcatttgtgatgctccataaacatctcgaattttcactgtgatccagaccttcagctccagaagccagcagacaggcttccagcccaacctctatgccaggagcgacatggcactgacaggcaccagctcccccgtgagcccacagagtgggggacaaggcaacactgctacctcacgctaacgggttgaacagatcagtctgaatgcagcaatccttgtgggcacttccagagtataagcactggggagtctatccacactgaaaaggggtacaaagttctctcgcctggaaaatacaaattgaaaagccttgactgtcccaggctgagtcaggcaggatcatagcctgtgtcggaaagaggcctggccttgaaacggcactcagaagtagtgatgatgcagaagccacctttgtcaggagctctgtgaggctgatagcaaccagcgatcccacctgggaggcagagcagactcctgactgagcctaaggcctggcagccagacccgaggccacggcgtgctggatgccgatgaggccgtggccgcttcctgccagtgaagcgcaggctgcttttacagactatgtgtagtaccaagaactctgtcctttacatgatcttcggggattgagtgggctgactgggagcatctgcctcagtctctggcccccctcaagagatagtacccacctggccagaatgctcctccccttggggacacctggccttggacagctggacctgtctctcaccacccacctcagaagcacaaaaggattcacacccagatctctagaaaaatgatcaaaagcaggttccttctcgcagccaagcttcctggacatggtagttcattgcatcttgggaaagagtaaatcattttttcagctgtcaatactgtgtccctcacatccttgaaccttgttcttgcaaaatcttggccttctttctgggttcactggccatactgtatggggtgttgtgaagtttcttggacaccacatagaggaacttggcctgatcttcattcccatagttgtaagaagagccattgctgaccagttgttcaaacttccagctgtcggacatggtggacaccacctgtgtgagttcctcctcctgacactgaagcacgtggtacacatgcttcatgggcacctgtgatgttttgctctcttgttctctaattttgtcctttacaagttttattaatgaagtgatactgtaaaattctgctttttccaacactccttcctccacaaggtctttgttaatcaccagcttgccacgtctcaggtagttcaacacaggcccaaaataggtggggtctctgtccattaaataggcaacagtttcatccttgtcggggttagcctgatacaaggagtacaggaagtatttcaggtcctggcacagcatctgctgggtggtgagaaagtaggtgccaccaatgttgagccagagccatttggacaagctaccgggtgctgggccacggcactctgagtcttgcactgcagcagcacaggtcgcccccgccagccctgccctaaggctgccccaggcaggtggcagtgctcgcattaattcctttttttctgagacagggtctcactctgttgtccaggctaaagtgcagtggtgggatcatagctcactgcaacgttgaactcctgggctcaagcaatgctcctaccttagcctcccgagtagctgggtctataggtgtgcaccgctacacttggctgacaatagtttcttagatataacatctaagacacaagcaactaaagaaaaaaaatagataaattaaaagctttcatgttgtaaatgaaggccacatcaagacagtgaaaagacaacccacacaatgggagaaaatgtttgcaaatcatagtctgataaaggtctagcattcagaatatataaagaactcttaaaactcaacaggttgtctttttactattgggttttaagagttctttacaatttctgaataaaataaaaggtgggcaaaggatttgaatagacatttctccaaaaaaggcctacaaatggccaataagcacatgaaaagatgctcaatatcattagctatcagggaaatacaaattgtaaccacacaagacagcattacacactcactaaaatggctagaaccaaaaagtgacacatgatgtgagaaactggaagtctcatacgagttggtgggaatgaaaaatggttcagtcactttggaaaacagtttggcagttcctcaaaatgttaaacatggaattaccatatgaacctgtatatggtatatactcaaaactgaaaacataagtccacacaaaacttgtacatgaacgtccacagcagcactattcgtaacagccaagaagtggaaataacccagtgtccatcagatgagtggagagacgtgtgatacatgcatgatggagtatgattcagccacaaaaaggaacatgaggccgggcacggtggctcatgcgtgtaatcccagcactttgggaggccaaggtgggtggatcacaaggtcaagagcttgagaccatcctggccaacatggtgaaaccctgtctctgctaaaaatacaaaaattagctgggcatagtggtatgtgcctgtagtcccagctacttgggaggctgaggcaggagaatcacttgaacctgggaggcggaggttgcagtgagccaagatcgcggcactgcaccccagcctggtgacagagcaagactctgtctcaaataaaaaaaaaaaaaaaaaaaaaggaacatgaatgaaccttgaaaagattattctgagtgaaagaagagtcacaagaggccacattaatgtgtgataccatttctatgaaatgcccagacaggtaactccttagagacagaaagcagatcagtggttgccaggggttagggagcagaacgaggtccccacagaacagcatccccacccagaacagggttacctcagaacagagtctcctgagaacagggttcccttcaaaatagtgatgggaagtgactgttaattgctgtgggggtttcactttggggtgatgaaaatgttctgaattcgacattgatggctacataaccttgtgaagatactaaaacccactcaattatatattttttgtatgtatgtatgtgtgtatgtatgtatatatgtacctattttattttattttatttattttattttgagacggagtttcgctcatgttacccaggctagagtgcaatggcgtgatcttggttcactgcaacctccacctcccgggttcaagcgattctcctgcctcagcctcctgcgtagctgggattacaggcatgtgccaccatgccctgctaattttttgtatttttagtagagacagggtttctccatgttggtctggctggtctcgaactcccaacctcaggtgatctgtctgccttggcctcccaaagtgctgggattacaggcgtgagccactgtgcctggctgtatttactcatttttaacagagacagggtcttgctctgttgtcaggctggagtgcagtgctgtgatcagggcttactccagcctcgacctccttggctcaagcgatcctcccatctcagtctcctgagtagctgggaccacaggtgtgcgccaccacacccagcaattctttttttttttttttttttttaattcatagaaatggggtttccctgtgttgctcagtctggtcttgaactcctgggctcaagcgatcctcccacctcagcctcccaaagtattcagattacaggtatgagccactgtgcctggccaaaattatacattttaaaatggtgacttttgtggtatgtaaattatatctcaattgaaaaaccaaagtagctcaaaaaacattcccagagcaaggtcactcaccctgccaggagcaatgaggttctctatgcccaccaggtcccgctgcagctccgttagcttctgcaggttctccagccggatga

SEQ ID NO: 1880667 - DNA, 4001 bp, Homo sapiens
caggcctgttgcttaattataaaagtagtgatgtgaagaaaagggaggacctggacccaaagcacacatgtacactctaaactcaatgctagcatttagctagataactaggtcagcaagtttcatcattgctttggtaaactgtaacaacatggtgtcagagattatgtaatttttgaagcattcttcctgccccacctccaccctattttcatctccaattttatatgagtgaacttacagtaggccctgggggtccctgaggtccagtttcaccattctttccaggaggaccctaaaaacaagaacagttagggaagtagaaataatacagattacagagagaagtcagaaggttggagatgaacgcatctattagaaggctagaaataaattgaggaaagctacgtacctgagggccaggtcctccagggccacctcgttctccattcttaccaggagcaccctaaagaagaagtggtcggtatttactaatcctcaaagggcaataactaatcatattattgtctcatatatatatgtctcatatatatatgtctcatatatatatgtctcatatatatatgtctcatatatatatgtctcatatatatatatacacacacacacatacatatttttgagactgagtcttgctctgtcgcccaggctggagtgcagtggcgcaatcttggctcactgtagcctctgccccccgggttctagtgattctcttgcctcagcctcctgggtagctaggattacaggcacatgccaccatgcctggctaatttttgtatttttagtggagacagggtttcaccatgttggcaaggctggcctagaactcctgacctcaggtgatctgcctgccttggcctcccagagtgctgggattacaggcgtgagccagcgcacccagcctgtttcatattttttatctgcctgctccatacacacacatacaaccataaccaattatatatttagctcccttcctacatgcaatttgattttcatatactcctccatgctttgaagaggagactgagttttgaccatttctttactccatatggaaaataaaagccttccagtcaaatatttattgaagaaattaatgaaggaactcacatcatttcctttaggaccggggaagcccatgacaccaggctgacctcggggaccagatggcccaggaggacctggtcgaccactttctccttgacttccctaataagaaaaaattacattaataaaggtttgataaagagaagattaaagcatgctatatatatagtatgtgtgtgtgtgtgtgtgtgtgtatatatatagatatacatatacatatatatatatacacacacacacacacacacactcaaggataggccaacatatacattccattttaactggccttttaaaatgagattttaaaaatgtacatacgggaggccctggtttcccatcacttcctggtcctcctggacttccgggcatgccctgaagtaaagaagtcagttgttaggtgatttaaaatgaaataataaaaaattactacatacactatttgtatgattttgatattttcacttacatgtgaagcctcagatttgcacatcttttttcctgtctataaagtatctaaggcaagtgttctatcttctcttctccttgaactatctcggcttaagtttacttaaaagaattttgttttgtttggtgccttacaaaatatgtaatctgattgatttaagttgcttttgatctgtcttcatttgtcttgcctttcttctgtctaaattaaagtgtcattcaaacaaatgtttctctgtaccctcattcctggacctccagggacgccatctctgccaggttctccagcagctcctctgggccctgcagggcctggagcaccacgctctccagcaggaccctaagtagtgaaagaaattttaaaaaaattaaaatagccttcactaacctagatagcaacaatattttggttacaaagagaggacgtcatttgaacttttaaaaagggttcgtgtgttgctgaaacatttatacataaaatcagttatcttagcttggattgccatattgaaaaaattttaaagcaactttgtgaacatcacatgcttaataaaacagtattcactgtgcttaaaaatataattatgtgcagctaaaatcaaatatcttaatgctatgaaatcatatttgatgtaaccttagagttttcaaagacttttcaggcattttagtttactgtactcttgcaacgatgctcagataaatgctttccaattaacagataagtaaaggattctcatagagggtaagtaagtggctttagttacaaagccaggaaagttgttgaacagaggatgcattatattaggaatttttcttaactctaatatatattcttcagatatttaggttttcatgaatgagaaattgtatacaagaactgcccatttgtggtgctagcatttaggaacatagaaactaaagttatctaccttttctcctgggatgccatttggtccagcaggtcctcggaacccaggggcaccctgaaaataatgaaagacaagtatttcagtccaaaggatttcaattctttttcataattcttgagtggcaaatatttttatgtcatagaatgctttaaacaatattttcactgaacactcaacttaagaaaaattggctgtctcaccctgaaggtagttttatttagatgacagtgatgctgcttttcttttagatgccccatggaaaacgtaccctttctcctgcagctcctggaagcccatttgcaccaggttctccaggtgatccatccttgccatcttcgcctttagctcctggaacacctggaataccagcctcaccctgaaaaaaaaaaaagatggtaaaataaagaaattatgactgaatttagttcaaagtttttacctgtttactttctaattatgttgcattttttcaagaaataaccagatctgttgcagtaaaacttacgcgttcaccacgtggtccgggctctcctttggcaccattcttaccaggctcaccctaaagtataacaaagtcttggttgaaacacagggaggattcgactaacaaatcatcaccagtaacacataattcagttataagttataagacaagagtgaagtcaatataaattcaactgaacaggagcaaaattttgctattaattttttgttgatggaattaaactatacctttcagtcaacagagaaaaaacaaggcaacttactgcaccacctcgcagtccaggagcaccattagcaccggctggtcctggaggaccccgggctcccatcagtccaggagctccaggaatgccagcgggaccctaagaacaaaccaaagacactatattagccgaacttgaatgttcttttatgaatatctcacttaaatatcacaaatctattgtcatgcaaaatgcaaaagaagccagtaatgtgtggatgagataaggctgaggagtggggacagcttaccatttcgcctttaccaccaggactaccattaatcccaggagggccctaagtatacaaaaaacagataatgtattaatagtaatgcaaatagttcgtatatatttgaagttgtttgtgtgaaaataaatgtatcgatgagtgttatgctttgtagagattaagtgaatcctccaactataacacaacatatgaaatgtggtcaaaagaatcatcattatctaaataaattagagataatatgtacttcgtataaattattaaatgatacataaatagaagagattttgaatttggttcttctctgaatttttatgattggtgattagcttggggcacattcttgaaagcatcagaaaactagtctatcctctattcttttatataaacataaaaaatcatgaattctggaatagtgcaacagtcaaaaactatcatttttactactaatcaaat

SEQ ID NO: 1880668 - DNA, 4001 bp, Homo sapiens
ctcggccagtgagacccataagggacctctgacctacagaattcaaagagaataaatgtgtgtggctttagctgctaagtttgtggctgttacagcagcaatagaagtaatcttgtagtatttctattagagactgacagtgaggaaatagaacagtcacacttgaaaccactgaactaggaggaagaaactcggaaacttaaagagtattaaccagacatggcatcaaaaaatggaaagctgtccagacacggtggctcacaactgtgagcactaagagagactaaggcattttgagagactaaggcagtaggatcgcttgaggccaggacttcgagaccagcttgagcaacatagtaagactcgtgtctctccaaaaactaaaattttttttaaaaatttagccaggcgtggtgacacatgcctgtagccctagctactcaagaagctgaggcaagagaatcacttcagcccaggagttggaggttacagtgagctatgattgcaccactgcactctagcctgggtgacagagaaagaccctgtctctaaaaaaaaaagaactaataaaacttgaaagttgtatttgattctgcttacagaaatagagaaaaggcactatcatagaataagcaactcattatcatgaaaaacactttacaggaagaacaataaaatcttaatacacagtattaccaaggatcccctacctatactacttaacaagctggtactaggggaaaggccatagtaacaaaatcctttcacagaaactttctgcagacttcctttaactgatggctactccaaacctgcagctctctgatcactccctctttcttctttctctctctctctttcttttctttttcttttctttcattctctccttctctttctctcttttttttttttctttgtagaggcaggagtcttgctttgttgctcaggctggtctcaaactcctgggctcaagcaatccttccatctcagcctctgagagtgctgggattacaggcatgagccactgcacccagcctccactttttcttaagataacattgacaataaggtaataagccctagtggtgtgtggacacacacactcacattcagagtcccaatttgttgacctgcatgagaccataaactgtgctaagaggaaaaaaaaaatgtccacagactgattttaaaagatgaactctgaaagagcataatgaccaaacggaacctcaaaatcaggaacacacctaggaatctttttaaggatagactaaagaaactaaagtagctgagtgtgcagaacccagccacgcaggcacactagtagaaccctccaagtgtgggaggggctaagtgatgcaccacttttcagatgagaaatcagaatcactaaccacagaatcggcccacatgaagacagccagctaagtgcagaagcctcacctgccacggtcggagttcactcacgatgccatgctgcctggacagctcatctcgtgactccagcacgccaggcctggagcttccagcctgtacccatgagagctccatgacactcctttctttattggacctacatgtttctttttttgttttgggggggttggaacaagcctgggggggggggaaaccttttccttgaaggagctcactggacataagaattgcaaaggaggaatggtgaacctctaaaagttgatcgtatttacccaggagaattacatttgtgtgtaatgtacagtgaagactgcccaataacaatgtcatctttaaacccaccaagcataatagctaaaaatcaaataaaggaagaatgttaacattcttagtcacagagactagaacttttttacagagggaaggcaatcaagatgaacagaggggcttgaagctgtgtttgcaaaggtcttacacaggactggggacaccgcatgatgaagattactggggggaagggaatagagggaaactccccttccctgccatatcctcaccacgtggggcctctaactaggtgctctaaaaaattacaggaaaggggacgaaggaagtataccaaacaaatactaagaaaggtgccaaaggaaaacagagaaatcacacagagcatgaggcagagatggtactttctctttgcatccaagaaagaatcggtcattcagaaaactcctcaccggcatggatgcttgtaaataacaaactggaggtgaaaataagatggtttaaaaaaaaaaaaagcagctgcaagaagactgataccaaacttccttatgttgaaaggtagtagttacacactgaatgtgtagacagaatttggccctgcttgtggcagtgtgtaaacacctagccacgtccccagggcactgtgcgaggaaccacagaaggctatgagcctggtcatcttctctactctttgaatctcaatttcccaagggaaaaaatagcttcactaaaggaaagcaggttatttcagggctgaaagtaaggaccaaggttttttatttctaaacatacaaagataaacatccccaaagagagtaacaataaagggctgattcttcttagttaagcttttcggctgcctgctaaagagagtctactggccagggcaaaaacaacctgaatgtgttctcaaccttctttttaatttaataagggaatttcatttaatttatgttacaagccttttgccacatgtatagaattaagcaacattaggaactgaacggatctttggagcgcattcaatcccctcttacttctcaacctaacagctgaggcccaaagtggtcacatgggctgaattagtatgttcatctacatttccctttatcactgaacttaactcttctgggtgtgcattgaccaggcttagactttaaactccttgggtagccagtgactatttatttggcagaagcattccgaatcaggaacaggtgagggcaggaaaggaaacgggtgctcactgctatgtccaatgggaagattccacaaagtatggcgatcttgggttcagaaaagcattttgtgtggcctctgctctctttctaggactccgcagacactgcgggaatgtcttcacaggcaccgattatcagaaatgttaaggaatggtcctgatacctcttccaggtcactcctcacctaccccatgctcctaaagaaaggaaatcaatgctgagaggagccaggagccctaaaacacagagaattaataagagtgaaatgtaaaatccagcccagactggattcttatcatgtcaaacttaaaaggtgacatgagaaagggaacccctcattccaaaggatatacgtcacttagattctcccagctggggatggtaggagggaactgggccacaccaacctgctccctaccacattccaaggtgaagctgggtgtgagcacacagtgggctccagtgaggaacagatgcccagtggccatcaattctcttcctgtatcattgctataaacaaagcaggcaggcacccgttatcaactgttaccaattgttcctgtgggaccacagaggagatgtgaggtccagctttgccactgctgcctgctggtgagactttgagaaagtccctccacctctctgcacctcggtgacctcagctagaaagaggagggccctccctgcagtgcccctgggtatctatgaagccctctcggcttaggttggaaagaaggtgctggctagtacagggcatactcaccagccttaaccactactcacagcccaacccacactggctctggatctagaccacctggcttcaaatccttgctctgccactgagtagctgtttgtaaccttagctagatttcctgacctcatgatgttatggtctctccatgtataaacttggaataacaacagaatctacctcattgttgagtgaaatacctgtagtacaaaagaagcatttgcaataatgccaatcggagaaggtggatttttttcatcgccatcattcctattttcttg

SEQ ID NO: 1880669 - DNA, 4001 bp, Homo sapiens
ttgggggatgacaaaagattgatgaacaacttgtgattacaacttctgtatcctaatcagaaattctcttgtgtttttttttttttttttcttacaataaattttctaatctgaacatgctgaaaatttgcctttatatttcctggatggaaatagtgcacaatccttatgcctctttgtgtaacctctagacccttcttgtcttatccactatgaaccaaagagctatttctgggaccctttactcatccttctctgttctctctgcttggaattccattccaggttcaacacaaatatatctttgacatgaagagatacctaatctttgccttgcccattttaaaccaatagaattaaaaataaattaataaaataagttattctatcatcagatatatgtatatctagtctcataaaattgtatgtgtgttttacaatatttagtccctgttttactaaaaatatttgtggacccagcttgccttcctcatgtcactaaaaatatatatattgagtacccactattcccctaaaatatttaccaagcaccttctaagaggccttttagtagatatccagtaaatatttttaaatgaatgaatgtttagctacaccatccaatacggtagccactagccacatttaactactcaaatttaaattaactgaaatcatatacaataaaaaattcatcttgtacccccatttcaagtgctcagtagtcacaaatggctagcgactacagtatcagaaagtgctgttatgggacccttcatcacagcagaaagctctactgggcagttctgaattcaatacatgaatgaataaatgcctgaaagaatgaatgaacaatccatcaggaggctcccaagccaccccctctgcaaactctctgacttcaaggatggattaaactacataatattaacatttcacctaatttagagatcagcttccacttagggaagtgtcacagcttggattatttaaaaggagctcaggaaagcagtgagcacatcctgcaggcatggctgctgctgttccacagacccatcagccacattatgacaggagcgctttccagctccaatttgtctaattctcatctgttatattaacaaagaatgcctggccagaacatgtcactcagctccacaaagagctatttccgtcttctgtcttcttccagaactgcaaagattgattttaggaagataatcatttttgtgtatttctgcacacaggctggctgcagctgttcccaaatgcaacatcaatacatgttttatgagtcagttttttgtggggtttttttggtttttgttttttttttttttttttttttttttggtaacgtgtgaagctaatcatgttgagtacgacataaaaagcatttgccttgaaatctcaagcgctgtgtcccatcactcaatcttgctgtgagcacagatttccttgaaatgtttctggtcgggactgaatgtgttgaatctcaattttgtatttcagctccattctacgatacagcagggtgagaacgtgagtagccttcacagttgggcttctgtcttagcctgagccattgagacaaaaaaacctaagactttatttgggatgtgcaaacccaggaaagagaggaagaagtgaagtaaaggcaaagaaatctgggatgccaggtgaagtgatgcatcaccttgctgctccttccccacaagccttgaagttacaactggcagccctaggcttgtccaggaaaattacaacgaatatctctgtcttggggtagcacatgggagaaacacaggagggggaataacccagctagctccttcctatttcctgtttccattgatccatttgccacttggacagttaacaccctcagaattccaggttgcactggactcctgaacagtagctcatgacacttccagtagtggatgaagcactgtgtgcacagttggccctgcacagagtgcatcatccactactggaagtagacaagtgtctccttgaagatgggcttggtgtgcagggcttgtgagccaggcaggctggggacttccagccatctcgtggacgtcccatcagaggttgttggtaagcaggtctgggaggcaggctgtgctttagagggaaggagacagtcagatagtgaagggaacccaaaggggcacaggatttcttcatccagtacagcttctctgctcgcatgcttacaggattcatcttccgtggcaggaattgttatttttaaaaggaaaattatgttcctctccaggctctttaaagtatgctatcctgatagaaaaggccttacaggtaagcaaatcctagtcctccaatgttgcatgtataaaaattaatattaaataattggtgtatgatagactagagatgttaaatacctcgcttactagaagtaagtgccccctccagccaaccaggaaaaggagctcaaatgttctaatgcttctgttgcctctctgtacaacagataaatcatgtttatgcagtgattggcgaaggaaatgagcatgcagcagtgacgcctgatgctgaaaggtgtcactggggttgctcctaaggagtctgagagcctcccaggagctggggtccactcaaacctggaggctcttcatgcagcatgctgagagctctagataatctccaggtaggtgaggcccagggaatgtggggagaagaaataatggagaatctcactttctagaacctggagtcaggtgcctcagataactccgagggtcaggaagatgaagctcagtgtgtgcagggaaaagaggcctgcattcagatgggggaagtgtaggagcattgtgcattgtggggacggcaccaggggaccccaaaaactataagcttcagtagtttgaggacaatttaatgaagggccaatggtatccatcatgttaaagaggtaagaggagcactaaggttgtttaacagaacatggatgtgatcacatttgttttgtcattctagttgctgtgtagaaaatggaactggagaggattttctagaaggaaagaaacaagtttacagggagttgctatggaccaagtgcggagtaataagggtcttcatatttgagaagctcgtcttactcatctgtaaaatcatattaatatgtgcctcagagtgaaattaaaaaattaattattcaatgtctttatagttctccatccacagtagttttgttgaccagacttaagttggcgcccatgatgtgctcctcctggagtcatgctgctgtagaactcacacacttgactgtgggtgggacgttcgacttgcttctaaccaatggaatacagcgaaaggaacagatttcacttccttcacaatgttgtataagattgtaatgactatcacaccgaaaaactctctttcctcttggttttgagaaaacaagctgtcatgttgtgcactgccctatggacagttatgtggcaaaaaattgaggacaactggcaagaaactgaggccctcagttcagcagcctgtaaggatttcaatgctactagtaaccatctaagcctataagtgtatccttccccagttgagcctcagatgagtactcagttcttactgacacctagtttgcaaccttaaaaagggcccaactaacgcatgcccagactcctaatccacagaaactctgagataataaatgtgtgtggcttccagcttccaggtttgtggtaatactgtcatgtagcagtagatagcagtttccccacaaacttagttccctcactttgcactacctaccctgtcacagcactgaaatgctaagtgtgagcaatactactaaaaccattcatttcctgcctctctctttaagtatactgatatggtttggctgtatccccacccaaatctcatcttgaattgtagctcccaaaattcccatgtgtcctgggaagaacccagtgggaggtaatcaaatcctgggggcaggtcttttctgtgctgtt

SEQ ID NO: 1880670 - DNA, 4001 bp, Homo sapiens
agcatcttccctctggaggagagtatgcattttttattttgttttgttttgtgacaggatctcactgcaggctggattgcactggtgtgatcttggctcactgcagcctaggcctcctggactcactcaggcgatcttcccacctcagcctccccagtagctgggactacaggtacctgccaccatgcccaagtaacttttctgtagaaacggggttttgtcacgttgcccaggtgggtctcaaactcctgggctcaagcgatcctcccacttcagcctcccaaagtgctgagattgctatgcagcgcctagcaaagtacatatttttgtttaaatgagagaagctgcattatttcaagagggagaatggtggtatagctactgctgttgtttgggagtatggctagaggtatgtataaaaaatgttgactactggccggatgcagtggctcacgcctataatcacagcactttgggagggtgaggtgggtggatcacctgaggtcaggagttcaagaccagcctggccaacatggtgaaaccccgtctctgctacaaaaattagctgggcgtgttggcgcatgcctgtaatcccagctactcaggaggctgaggcaggaaaatcgcttgaacccaggaggtggaggttgcagtgagccgagattgcaccactacactccagcttgggcaacagagtgagaacccatctcaaaaaaaaaaacaaatgttgactaccaaggtgaacctctgtggacagaacagattagaactctgcatctcctttgagtatacttttgtgttagtacactttccagatttccctgaagctagggttctagatgcaaacttagtttctccatctaactgcatggtgccagattttttctatagcagtgtcttgttgttcagccacttgctttgtaggtgtcaagagagttttttgtggaaatagtagtggcagcaacttcctcactggtggacaacaactttaacagtgtgttcttgaagtcaaaagtccaaggtaggcttcctgacttcctctcttcttggttggagcagaagtagtagcatttatggctggtccggctggtcatgtttatggtgcaatctttcctggagactcatcatagagccctatctaaccattctgtagacatctagtttcctatattaaatgctttcctgcttatgttaatgttttttgattcttaaatccagaccctgatcgataaaccaaaaattcaaaatttttctttttccagctaaatttcatttaaatgagttgctcaaatgttcatttagcctcttttcactgagtaagaaacttagttttgtaaatagtctttggcattaactatccttgattagtctgagcatatatgatacaaaatgtaacgcctctattcccagcactttggaaggctgaggcgggaggatcgcttgagcccatgagttggagaccaacctgggcaacatagggagaccccgtctctacaaaaaaaaaaaaaaatttatatatagtcaaacaagttatttcatctcttaaggcaaagagctctctgtctgtggttcaacacattgttatccattgggcaaaaatgatcattgccatgctctgatagttttaaaatgatcagacaggaaattcattatattgcaaactggtgttcagaaatgttaggattttcagtatttttattttccaaacattattttaaaagaacattaaaagcattagaaatacaaatcttgcctaatggttaacatacgaacaattattataaaatgtttaaaatacgtcacatactttgcatcacagtaagcatcaagagaactaattaacatatcctgataattaatcatattcaactgaattctcattacttttagttctcattttagcccttatgaagagataagttatatatttctacctccacctgtatcatcatgacacctttattatgataacacaggtagaagtagacatatataacttacgaagaaagaagttatgtctctatagatatagagatatagatacggacgggggctatgaatcgagcccactatgtatttcatgcaatttataacaataatttttttaacttttcttttggagattattttttgatgagcataaagagacaatacctcatatgcacctgcttagttttctttgtgctgtaatttttacctcccaatgatgggcctcatgccagtcaaatcatctcaaactcaaacgtcacacagaaaacctgccattttaaattttataaatagaaattacttttgtgttaatattttattgtatcacatttgaaatgcctagccaatttttgtatttttaatagagacaaggttttttgcatagccaaaaaaatagatatatgcctttaaaaatgtgatgcttgattaatgttgtcttcattataaagctgtttggcacactggggtaaataccaggttttgaattaagacaaaaatctaattcctaatttgccacaattctttgtacgatcttgggaaagaatattagatttcttaattctttgttaaaaagagataataggccagtgcactggctcacgcctgtaatcccagtacttaggtaggccgaggtgggtggatcacaaggtcagaagtttgagaccagcctggctaacttggtgaaaccttgtctctattaaaaatacaaaaattagctgggagtggtggtgcgtgcctgtagtcccagctactcgggaggctgacacaggagaatcgcttgaacctgggaggcggaggttgcagtgagccgagattgtgccaccgcactccatcctgggcaacaagcatgagactccatcttaaaaaaaagaaaagggaaaaagggaaggagggagggagaaagggaaagaaggagggagtaggtaggcaaatcagtctaaaaggtgaacttaaaaacaaaataattcgaggctgcccctgggtgtggcaagaaaaaaatttagaagaaaaagaaaacaaaagaaaatctatgcctatttaaatctcaaaaatagaaataactgatcaatactgaaaggtaacagttataagataaggttgagcagagttctaattgaatatctattctgtcttctctatacctctcatgacccctgtatttggggagagctgagggaggaaactataaattaaatgcctttcagctggatgtggtttctcatgcctgtaatcctagcactttgggaggccgaggtgggtggattacttgaggccaggaattcaagaccagcctggctatcatggtgaaaccctgtctctaccaaaaatacaaaaattagccaggagtggtggcgggcacctgtaatcccagctactctggaggctgaggcaagacaatcgcttgaacccgggaagcggaggttgcagcgatctgagatcatgccactgcactttagcctgggtgacagagtaagactctgtttctacaaaaaaaaaaaaagacttttacgcaaaggaacaaagtaccttccaatctgcaataataactcttgaatataacaatttataaagataggtgttgtatattgatgctcatcttgtgtgtctaacatttaaaaacctagtgagttcaaatactaactgtatactgaaaatatttttacaataaaatatgagttcacagttgttatgctaggaatctcagagcatatagtaaaattagtttcaggtatagaaatacttaaatctattttttctttctgcccatttccactttaagattaatgggagagaaataaaatgattagtttgaaaatagattatcttgagaatttttctaccataataataaataaagacaaaaaagaagtcatttctaaatagttacttgaatactgtcaggtggttagtaaactcttctcacacagaaggaaaacataaatcaaaacattcccagtcttatctgtaaaccttgttaagcaataataaatattgcccaatgcatgacagga

SEQ ID NO: 1880671 - DNA, 4001 bp, Homo sapiens
cttgaattgtctccatgtgtctctctctgttcctcttccctggtttctctctggtcatctctgcctctggtctcgctctcacagtctagggtctgcagcctctgcagcccctgggatctcccctgtgttctcacacccctctttccttcagcctatgctcttggtctctttctcatccttctccatttctcttctgctgtttctcagctgctgcactccaaccgctcaatcccttttccacttcccccactacctggtccctcccccacccagggtgctgacagggacgacaggaagcaggctccagctttgagcaggagggggagggggcctgcctcgtacagcagctgctgagtgcccccctccccatgcagccccgcacctgcaggcctgcccggcactgggagaccccgccctgtggcagcggagcagcggaggagggacctggatgagaggccagatccctggtaatggccagcaactgcagtcttaggatggatagtgggtgggggactggggaaattaggccctggggtgaaggggcagtaattctcagtcaccaggaaagatccccgcccactgggtggctgcctccttctcaccaccctcccctcaaggctgtgtgtgtgtgtgtgtgtgtgtgtgtgtgtgtgtttgggagggggtcattccaagcagagatctctttgttgtgcaaacccaggatgtggaatcctggcccctgacatggttggggagggaaggggaagccctcaaagacacagggaaggtgcaccaggaccatgccaggcccctgacaggcaaatctttcagtgccaggcagagtaaagggctggcccaggacagagcctggtcaggggggccaggagagggctgcacacaccctagcccaggacccaaggaccttcccctgcccctggggctgctccacgaagagccctgctgtagtccaccctctccctaaacctgcctgggatctgtccaacgccatctcgcccctcccccttctctctctgtgccacggactcgggctcagcagatcctttggggcctctgggtagttgggtgacataggggcactagagcgggtggtggtggaggggacaatccagcacctctaggaacatgcagtttggagggacttctgaccctggttcccatctcccggggctgcctctgcctgagctgagggccacctacctaccccaccccagctgatggaagcgaggatgtgggattctgaggtttgaggaaggtggtgaaccgctgtgcctgggggcttgtccttttcagtcagtctgactgtctcagacgtttttagactgaaagagggaccaagggagtgtcagggagtgacatctcaggatgtcagcagcaccacagagatccgaggagtggatttgaggctccatggtggccctcagcttcccccgcccagattttccacacctcagccttggctccaactccgtgagggcctgcatcttccccagcatgaccaggagcccaggaaccgggacaggaggctggggagggcctagcccctgcgggaggccagaccaaccgttcactgagcaaatgggaaaaccaagaggccgggaaatgacttgcccaaggccatagaagtcgcggggacagaggcggactagaatccgggtttccacctccagaagggtttctgttctgggccacggcccccttcgccacccgctggagccggctcagcccgtattacgacgcagaatggagcctggcagcccagaagctgcgggcagggcaaggcagggcgggtggggccggatgggagccggatctcccctggagcggcgcacagcctctcccacccgtacggttgagatggcggtggcggtggcggcggcaggtgcctgcgtggcgatcaggccggcccccgggctggtgctgagaggccgcccctgcctcacgcgagccgaacgaacaaaacgctcaggtccggtttgtgcgaggggctcgtcgcggggcgggagcggagggcccggggcctggcggtcgccctcggtgatctcctggtcctggtcttccgcgagctcagtgctgcacagcgccccgctagcctccgccctcacctgaacgcatctgcggctgacacgtcggcggccgcggcggccaccgcaggtgcgcacctggcccgcccctcctttcccagccaccctccgcccggctttcctggcccctccgcccggcccagcctagcttggcttcgtccccagcccacgccttggagcttgtcccggagcccgggctccgtgtgctcttatactgcctgttcagtccccgcccccagacacacacactcacacctgtccaggcgcccgtttgctcggggcaaatattgactcatggaggcggagcgctcccccctcccccgcccgggctctgagaccggagcttctccgaggccttggtggcgggggcggaggggagggtgctggggaccctgggcgcctctggaacaacaccagatgtcacttttccacccacctgcctctgggagggaggagccgagaagcagaggacagaagctcccgggcgggggttaggaggaaccgagaggtgggtatccatcctcgtctgaggactgattcacagtgggagtcgcttagcagggtctgtggcccgaaatccagtggtgacctcgacccgccccagcctagttcctggccctccgcggcgtgcctcagttcttcctccccagcctcttgggcactcggagctcggcaaatgctaaggggctggccctgggggtgctaagcctccgagcaggcgcggcgcggaaaggtgaggggtggccgccctgcccagtggacacctgcttcgctggccaggcctggcactcagttactgtgcaccaaggtgcgctggggcaaaggccagccaggccccgtccggagcgccctccactggccagacccggtccagcggccggcagctagcggccaggtctcagtccagctgcagtgtgggcggagaggtgcatcctcccgggccctaagttcccgccgcgcctctgcagtccgcccgggctgctccctgccatccttccctctcagagctcgcgcgcgcgttccccctcgtcggggaaataaagtcaaggtagatacagaaaaaagactagatgcttttactggcggtggagagggggccaggcgtgacccctagcggcatgtcggagaggctgggcgcgggcatttacggaaggtcggtaggaagtggcaccaccgggtggagtacctctgcttgctgcgtcggcagcagcgtgtccggggtcagactcctggaagacaaaaagtcccaggtaggcgtgggggcgaggcttcgggcagagcctggctgcccccgtggcccctctcgcgcggtctgcgcggccgctggtcccggcgcccttacctgggcacgcagaacggcggcagggcgatgacgcgtggccgcgaggtgagtaccacctccccgcggctcgcctccaccaggatgttctggatcatgttctccagcagcgcctcctgcaggttggcgaaggccgggagcctgcgagggggcgggggctagcatgagggcggccgcagtgcccgcgcgcctcctcgctcgcctgtccgtgcggtacattgtgccgcgagctctacggagattcccattcgactcccctcatccactacactatggggcattcttgtttcaatgttacggacgttccaagtgtggctaaaagattccaagttgccaaatatgctgctggtttaaggggtgggattcaaacccaggcgatgtagtaggcatctcagggccaagtttagagaaaggtagggaagtgatgagagggcgcagaagggactgggtggggcctagggaatccctacaatgacataaatcatctgtagggcagccccggcgggaagtcccacctgcaagacaggtggtccttttctggctctagaagcccatttacaagactttgcagactataa

SEQ ID NO: 1880672 - DNA, 4001 bp, Homo sapiens
taatggtggtgatgatggtgatggcagagatggttacaatgctgagagtgatgatcttggcggtgatggtggtgatgttggcgatgatggtggtaatgatggtggcaatggtggtggtgatggtggggttggtggtgatgagtgtgatgataatggtggtgatgatggtgatggcagagatggttacaatgctgagagtgatgatggtgatggtgacgatggtgatataagtccccatgcgcacttcctcttctctagctctgtctctcacctgctcttgcctgagctccactgtggccacccacctgtgacctgtggatggaaagtaattctaattatgacattttcctacaaagaacaaaccactgggcttctctggagcacaaaggcatggcgagatgagcagtttgccccacaggacgctggcattgccctctgaactttttcccagatgtgctgaggacaaggaagtcaggagtgtggcttgttttccatctgctcaacactgctcgtgcctggagccccccagctgtgcctatcagcccctaggggttggctgtcaggggagcagagagactcttggggcagcgtggccttggtcacagcagaatgctgggttctgacatttatgagccatgtgaccttggcatgctccttgacctctctaaaccttgcatgacacttaggaaggttaataagatcacgtctgtgagaggtcttagtgccacagtagatcagtgtcagtgagggtagggacttagctctgtggcttgggaggcgcaggtggcagtgagtagccagtgggtgagacccagagaggctgtgcctgtgagcggctgggcagagtgggaatgggtgctgtcagctgggtgcacaggcagaggaggtaccgctgcccacaaagggaagtctctgagttggagcggagcaggggcgggagagaaggcaattggggccttcctgggtttgggaggctcagcaccaggagcagcccacagccagggctcaggacccaggggctcacccagccctcctgaccaggctaacctgcggggtctggagggaacacgggcagccacggccatgcgcactgggaataagtgagaggctcccgctatctcagacctggcgtgggagctgtgggcctttccagggcccggctgctgcggaggtaggagtttggtgttggcagcaggagcagcaaggacacactttaggacctacagcgtggaggcaggaggacagggaaatggcctcgaatgagtccgtgaccccttgaggaatctgcacacgactcctggctgtcttgtcacttgatgtaaggcctcaagcggcatctcctgaggatttcatggaggccagaggggactcacccagaggtggagggatgcaagctcagaggccagggtgggcgggggctggagctgctctgtgacagcccagagctcccggagccgcagccaccgtcccaagagagctcaaaagaggagggggtgggaagggggaggtaaaagctgttcagccaaggctttctcagcctggggactgacctgggtttgtcctattctgtgaaccaacccaaacatgtaaatgtcctggcactgagcaaagccttccccaggggcgttttccctgaaggacttctcagagcctttaatgggccagggaatcttgtcacgctcaggtgatggtagaggaggaaaggacttctccaaccgtggtgactctagaacctctccctacagcagctcggggagctccagctctggagaacacactttgggaagccttcccacgcaggacagaggtctctctgccgggctgcgagccctgcccacttgtgaccagggttttcaatcccctggtgtgagagcagtctcaggtagcccaagcctaagtggaaaaggggccgggagaggcggctgggcaccccctcgctggggctggtctcctgggtccctgtttcctgtctcaggaactgggaggaacccacttccaccacccagcaggggaagactgaaagtattagggggcctgtctggggtcagtcccactgtggacttgggcactgccactccacccccccctgctgccacaggcagtacccaaaggtggtgcattcggaccctgaacccccagcttcatgggttctaggaccctcctctccatggctcagcttccaactgatgacccctctccagagccagcctctgtcctccagcaggaggtagctttggcctctcttggtctctgacccgcatgtcccttctgcgctgcagtctcctgggctcagggtcctccttcagactcctccagggaggccacaccctcacacagacctgccctgggctcccttctctgctctgagcagcccctagtcttacaggagctctgcagaggcccttccgctgcagaagagcttaggtgacaagccagaagcctcaggtggcctccttgttttgccagccctcccccgtcggttccttgctttttctacccagcttggatctcggggggctggcctggatggattttgtcaatgactcacttgccctttaatgatcattgcatttgggaagccctggccagagatgcaagtgtagcaggagaggttggaatgttcctgtgcctcctcccggagctgctgctgtggggcagggagacttctcccttctggtggcctcctctcctccagcccctccttctcacgaggctctgtgagactgttttgggcctggaggcggcaacagctttccacggggctgggtgccgggtgcctcagtgtcccccactgtccctccattctgcccactcctctgcaaacagcctctgcatcacgtgttcttcaagatgccagccgagcgcgcctgcaggagcctgtcctgctcaggggcggagggctctgctcgtgtgggcacagctctgaggcggtccttgtagcaaacatcgctgactgcctaccacacgcccggggacctcctgggcacctgtcagtcatgaacgtaacaggttcaggttacccaagtcccatgccctaactgggcagttgcaccatgggcagcaacagaccctgggcttcaggatgtcccagcagagccgcagcagccacagagcaacccctcttcaccctggggatggggctgggcctctgagagcaagcatgagattgcagagccaaaacccaagctgtcaaaacgaccagcaagaaagacagtttggattaattggcacagggaggtccctagacatttagattatggctgctcctgggctggagcgtggaacccagagacatttcacaaattaacataaatcctgtgaaccctctgtccatttcaacgcttaatgccaaacataaacaaatgaaagtcatttcagaagctggaggagtttgaataattcagtcccatcatcatttactccaaaacgcctcatttcatcttatgagtcatcgttgaaaggaaaagaagattttacttggtattagaaccgggagagctggaaaagcttcgaagaggaaggaggctgccagcttcctgggtgcacaaggccgtggccagcttccgggctcagtcgtggacaaaggcctcctgggacagagaagtggcctctaagcaaaggcggtggtgtgacgctagcaggcctgtgtccacctcctggtcaggctgctgactggcggggctctgggggtaaggccttggtcctgccgtgcctcctcctggctcatctgtgacacagaaatgacagttcctactccccagcttgtgcgggcccaaatgggatggggtgtgtgtgtgaggactggggcctaggcctgtgcagggcaggttgtgttactaacgtccccccgtggctcctgggctaacggtgcacttctccgtcctgcttcactgccttatggcacgtgtccatttccccaaccaccggtgggccccgggtggcttggccggcctggtgtcccgtgcccagcatgggctctggcccaagttagcacttgctgc

SEQ ID NO: 1880673 - DNA, 4001 bp, Homo sapiens
gctggcatggctagagcttaggtggtggaggtagcaggagcccagttgtgaagggccttgcagaccactgtaaggggaaaactgagaggagctgaacttggggagaaaaccaagttttctttggacgtgtaggtttgaaagaatgattagacatccaagaagacaagtcaagtgggcaatggatatgccactctaattttcacgggagaactcaggactgacagtgggcatttgggcatgattagtacacagatggtgatgaaagccacagggcaggatgagcccagggagagactgaagggagtagagaaaatccaaggtccaaggactgtccaggtgtccctcctgagaggagaccttccctaccctgaaaacacccatcacttttacccccaggtagactagaccctccctgtgtggcaccctcacaggacactgacattctatcactgcacctgccccgcttctgtgcatgatttcttcaatgtctgtctccaaccagacataagctcctagatcccctaatgcttggcattgcgtcatccacatagtaggcactgcaatgacattttctttcttccaatgctttattgtcgagtataattctgaagtacaaaacaccactcagacagacataatagcgactgttgtatcaatgcccattccaggcactcttcaaattggccaccagatggaataaaagggattgtccttgaagaatctgactagtgagaaaacattatagagtggagaagagagcaggcaagagctgtgtctgttgtccctgctggtcaatttctctttccccttttccacctctttccccccgcctctctttttgcccttcctttctttctttctccctttattttgttggctttttatagttttcagtctactgttttttttgaaaccaaaataacatattcacatagttttaaaagttgaagatttttaccagaagacacacaaaatccacatggctggtcctacttgcccccctcccccacacccctcctgattctcattttcaacccttgcccctgtttattctggaatttactttgatatttttaagtaaaatgaacatactacaatatttcgattaatgaaatttaggcattccttattgacttacgatgccagatgaagtttttgtctttcatatgtgctttttcccatccctaagccttatagtataaaaatatcatgtttttttttatttctataacttttggccttccctggagttaatatgctccattttttatggctcattattttttcaaattattactaactccttcctcagcccccaaaaaatgttatgggaaaaaaatctctgtaatattttccacattgttaaatacatgtctccttttttcctcctggaaaccctcccactaaagtgctctccccgcacattccagtctaacagggctgctctgacccccaacaagccatcaatctggagtcttctctgcttttctccttaattggaggccctgtctccaagatcccaaatggattgttcttaatttttttttgtggtatccatctctaattttgtgagtctacccttcagtctacccttctgaagacattagttatagtgtctgtgaaattttcttctgtttcctgaattatctcaatagtaactcctcaaattttgctcgtttgctttggtttctatgggcgacttccctcaagtgtctggtaatactttatatctgtttatatgtaagagagatgcactaaaacgttgtggggttgggaggtgcctgtgcaggatggcaggtgtctgcgtctatctgtgggtaggtgtgggtatatgagtgtgggtctgtgtctgtggggtgtatatgggtgtgtgtgtgggtgtctgtgttgtgaacatggggggtgtgggtgtctctttgtggggtgtgcaggtcctgtcagccatgggctctgctgcaggtagtctgaatgtccccccaacatcagcacctgcagctttcctctctggggtggtttggtatctgcagagaggctgcctggcctcatggcgggaggtggagcttgtggtgaacggcctgtcacatgccacagttggaccagggaagcagccgaggagccctactgctcactgtgcaagtgcctccaatgcccacttttagtctagcaccttgtcctgcctcttttccccaactccaggacaatgcacctgtcattagccactccaatgcctatatctcaaattcccactgtctacagaatcattcccatcatcatacagatctgctgtgatgtgtcccatcagcgtaaaaccagccccaactcatattcctctccatgaccactcatttctctgcttccctttatggccaaattcttggaagagatgactatatagtctgcccttccaatccatgggtttgatatctgtggattcaaccaagcatgggtcaaagatatttgggaaaaaatctgtctttactgaacacatccagactttttttcttatcatgatttcctaacccatagagtatagcaactattaacatggcatttacattgtattaggcattataagcaatctagggattatttaaagtacacagaagatgtgcataggttgcataaagatactatgccattttatatcaggggcttgacatccatgaattttgagatccacaagggtcccgaaaccaatccaccatggacaccagaagctgactgtccttgcttttccccttcctccctttccttccctcttgcacccactccaagctgacctttggctcccactccacggtacccactcaatgtcttcaatgaactccaagggacagagccaagcagtttagtctccatcttacttggcccaacagtcagggaggaatttggttatgatttgtctcttgctccttcctcaaagtctggaagacgtttccacccagggaacagggaaaacagggcaatggacgggcagcagtgtggctggaggactggctctgaagtgcagcagggatgctgttaaggggtgagcagggccacatcatgagccaggtggcctggcctcatttcccatgcacttggtggccactaaagggaggaggagtggggaatggcagagttgggtgatgctttagagggatcacccaggtggtggtggtgacagatgggaggggctgggcaggagcaaggaaccttacctgaagactccaggtggctcagaatggagaaactgaaggtccaaactgaggcagtgacacaggcatgaaggaggggagccgaggagagccggggaggaagctgggatcacttccaagtctctagcacagacacatgagtgcatggagggcccattacagagtccagcagcccagaaacacagagccggctgaggcctgcatggaagtccagaggtccacctgaggcaggttgagtggttgaccctgaggaacagccagcgagtggccagtgaggcaacgtgttcagtctggacatgcctcattgttccaaacaaggtgacaggggagaggcagctcctgctggagaagccgctggtgaaggtccactctgcagagtttcagaatggtgccagcccttccaggctgctccttgtccattccctgccccgtcagccagccttggctgccctttcaaggacacatgaagccacaggaacagggagggccagtctgcgtggtgaggtgacccctgacacatgctgaggtctcccctgtgctgggaggctggagggcatgcctcggcctctctggggtccccaaagcacagctctaagtgcccatgtgcacccagcaggcttctgatctctcccctccccacacctggctgagtgggtacctggctgtcttcatacctatagacaggtaggtgcagtgcctcatttggcctcagacccaggtgtgatctccataccagctcttcttgtatttttccagagtgaatgggggttgttgacaacttgtccagatgagtgaaactgacat

SEQ ID NO: 1880674 - DNA, 4001 bp, Homo sapiens
agactggtttttcttggtatttacttgtatttcgaatgctaataataataattattattaatattttttgtttaaatccagctctttgaagggagtgatggagagaagaggaggcgacaaagagcggatggatgacgagagacgaccaaccaaagacaatgggtaatcttcaaaactgattaaataactcctctggataagcatttttttttcttgagactgagtctcactctgtttcccaggctggagtgcagtggcatgatcttggatcactgcaacctccacctcccaggttcaaacgattctcctccctcagcctcctgagtagctggcattacaggtgcgcgccaccatgcccagctaatttttgtatttttagtagagacggggtttcaccatgttggtcaggcttgtctcaaactcctgacctcatgatccacccacctcagcctcccagcatgctcagattacaggcctgagccaccatgcctggccctggataagcatattcttgaactgcaatggtttatactcaactccgtacctcattttcccaatagctgttttacaaattcaatagagtaaatcaaaactggcaacatctgctaaatgttatatttgccattggatttcaaaaaataacttggtttgcctttttttatttgtcttaggagagtgaatgtttttaatataccttgtttgtgctttcaaggtgctctgtttttctacaactgcacttttaaagccttgtttataacacatgctttcaaattatatgtgtatgcatatgtgtatatattaatactcttcttaatctataattagctataatagcaacacctttagaaaacagatgaaatcataaatcttaattttgaaccagggttcttctactgtcttcctttaggaagtatattttttaaaaaataacatcaactttcttcctacttcataaaatgtttccctggctgatgaaacagacatagtagaaatacagtagtttttagttcatcaacacacaaaccagttctccaccaaaatttctagtaattttctcatattctcttgggtcatttactgatgatgcatcctttgattacaactcaagagaaccagagatgccatgttaacaatgctttatttctaccttaggaatatatatattggaagtgaacacctaggttttcatataaaaggaagaagtacagttatcttcattttaataatttgttattgaacattttattaatatcaaacatttttattaattattgattaattttattaattctgtattcttaccaaggtgtaatacatgtacattgtattttatgatctgctgaagtcttttgtacttttgctttgaaagtaaattttaaaattatatattctcaaaatataatggagaggacttccaggtgggacgaagtagctctgtacagatcagcactctcaataagaacaactagaaagctaaataaaatatagaaatctatttgaaggcatttgctatctatggaagaaatgagaactgggaggctgagaatcaagaggagaaaacctcaaggagaggagctgatgtctgcagctgctcctaccctggggacatttgcaaatttagggtacaggagggaggctgagaatccaggctatgcacagtcacaaaactgctgctgaggcttagaggaaccattggagcttttggcagagtgttgagagacctcaaacatgcagccagctcctctcaagactttgatgaattctggcgtagcccaggtcagaagctaaaaattaagaaaacgcctctgaaaagcagagcaaagcaatcagcagtcttgtaagacaacatttagaatttgagatccacactgcttgtgtgtttaaatatttgacaaacgacagagaattctattctgaagtatgttgtgggccaaggcacttagaattgtttaggaacactggccactccaatctcccaagtaaaaccctgaagagcactatcccagaacagaagtgaaccagaagtaaacagactcttaccaaagccataaactagcttcgactcagcaaaaaccctgactggattaaagtgaccatccaatcacatcagcctatgtccctatcagaggggacagtaaaccctctctctggaagaagactgcgttatctggagcctctgtagttttttaactggaatgtctgacattcactcaaaactaccagaaacaccaaaaacagaaccacatgatggataaccaagaaaaaagcaaacgaaacacacacagaaaaatcaaaggatattccagatattaaaattagctcacatggactggaaaacaaatacaattaacacaagcaagaaagtggagaaagccatttagatatagatgaaaagataagttaaccagataattggaatttacagaaaataatcaaatagaattgtaaaactgaagaacatattctctaaaattaagaactcatgaggggccaggtgcagtggctcacgcctgtaatcccagcactttgggaggccgaggtgggcagatcatgaggtcaggagatggagaccatcctggctaacatggtgaaaccccatctctactaaaaatataaaaaaactagccaggtgtggtggcgggcgcctgtagtcccagctactcgggaggctgaggcaggagaatggcgtgaacccgggaggcggagcttgcagtgagccgagattgagccactccactctagcctgggcaacagagcaagactccatctaagaaaaacaaacaaacaaaaaagaactcatgaggatgggtttaataggaaaaataataaactggaagataagtttgccattatctagttgtgctattcattcatttattgcctctcatctcccaaagccattctgctttaccctgtttatgaagcgggggccagaccctgtaaacatttttcttctgccagtgggtgcagtgttcagcttgtcaacagagagtgatggaggaacagtgcaaggcacagcagagggaggagcttcttatcctggttctgtgtactttcctccttgctcccacggtgctgccagagccatgcagaagacctattagtgctcatcctccagcctgtttcactgaaaccagcccatttccactttgccagctctggcttaccagcacccagtaggccacctgcaccaattctggcccacagcaccccagtgaaggtcttcatcttcccgtagcctgcagccacaccctctccaacaaggaggtaggaatctcagctgtgacggggtgtgatgggggaaagggtcttcaaagtttattcctctcccttagctctagaatagctgctccctacaactgctagtcttgcattctttagagatctcctttacccctttaggtaagtaattctctatattaaattttccctattcaaattactgctatggtttctgtctcctgactggaccctaactgataaactaataaagttgagaaacctcaaactgtcctatcatctatactatatgacccagcaagtccacccttcaatacacagccatcaggaatggatacatgtgcattaaccaagacatgtacaagaatgttcacagtagcaatattcacaacagcaaaaaaactgaaaataacctaagtgtcaatcaatagtagaatggataaactgtggtatgctcatacaatagaatactatcagcaatgagcatgaacaacaaccaaagtaactacatggatgacactcacaaataaacattgagtgaaagaagacaagcacatagtttgatttcatttgtacgaagatcaaagagaggcaaaaataatgatgacatcataagtcagcatagtgtttactctgaggcaaggtggtcatagtgatggaacaggacatgagtgaggcttctggatgttggaaatatcatttcttgatctaggtgctacttacacaggtgtgtttaccttttggaaattcaccatgctata

SEQ ID NO: 1880675 - DNA, 4001 bp, Homo sapiens
tagcatgctttctatccattaagttatttaatcctcacaataagcctataaaatccttattatcctgatttttcatttgaggaaactgggactcagaaagggcaggcaattgaacagtatcacagagctaataaattgcaaggcttcaagttttttttttcagtatacgttccttatttgtttattttcagtctttccctccagagtgtgatctctgccgagacagcagatatttttgctggttttgtccactgatgtagccctgctacctagaacaatgcctggcccagagtatatgataaatacttgaatggcagggcttcaatttaaacaaaagtctatttgataccattgtgttagctattgctgattaatagttaatggcaaaatctcagtggcatgcaacatacaacagcaggcatttacttcttgatcatgtgttgatggtttggttgggagttggctgactaggcttaacttagctgtgcttggctccagctccagctcggattcaggtgtgctccatgtgtccttctttcgttttggaccagtaggttatatgtgactcttatggcagaaggcagtagcacagaggagaagcccaattaagtaagcacattccaaatgtctactcacgtcatatttcttaacattcctctagccaaagctcaatagcaatggaataggaaaatattctcttctcatggaggtgaggatgggaaggaaatgactatttactgaaaaatcctccaatctacctcaaatgcctgtgcattttctctgtccttcctaattcataaatattgaatgtacaggcgggatgacattctcagttaggagtcaccttattgtgtgtgcttgtcagaggggccacataccaaatcatcaattcatattttctgactaccattgcctccctttttgctctagaggatgtttgactcattttgccttctctgccctaatttgttcatactagaactctggaggcaaagatcattaatgagtgattctagaagactatggttatgattactatcctggaacagaatcttttttttctgttttcatgcaattccaattggccaagggattttttaaggaaaatgttcctactacaaggtctaatacagacagcagaaagcaatccaatgttttacaagtagcaggacatgcaggatgggaatactttttctagaaacagcaaactgtaaagatgataccagctgaggtatcacaggcaggggagcttcttaccttcttctaccttgtgctcaatggctgatatgaagctaaaatgccccttagaggcaactcaaagggaatcttacatatcaacatcatgggtttagaggtggggattttgcggtccccaccaccactccttttgttcattgctaatgtggttagtaaactaaatggtgaaaagattatggggtagagacagaattcctggttttagtctcaactgtatcagaaacagcatggctggaaaacagcatttcacatttctatgacttatttttccacttcaacaaattagtaccgtgtaaccttttctttgctactgaattttacctttgtcacaagaaatgactaaaaagattgatcctcaaaggaataaattaatttgagtgatttgtctgggaactattgttcttttatttttagagttagaagggctctgtgaccttcaggactgaaggccctaactaacacttgcttcttggctcatagttggcttgagatctttgtttaaggagtatctttcacttctgcttgatgcatgctagattcatgtctctgttgtgacttccccagcatttttgtgtcatgttttaaaagttacataatggaacagctataattttatgtgccttccttgatctatcagcgtatgtctacaagcatgcccatgttataatggaaattctctatgcagtcttacccagtacctgtcactatcatgttacaatgaccatgactgagtatccagctttcctacagaacttccgtgttcatcatcattattatgccacttgtgattccattagagtttgaaaaaggttctcagggaacttctccagaaacttgcaacagctgtatcataagtactggactaagatcacttaggtaggtctggcttcagtagggatgaaggtatcccagtgtctgcaggaagcatctggcatctttatccttctatggcatgagaaggtgtgttgcccagcggcagaattctgtatatgacagagctgctctatggcagttggtagtgtgaatggaaaatgtgtaaagtgtttttaggtttttggaggacaggcagcatgtcggtgccaactattgttgtgatgaagaaacccaaatctaaatcggtctgtatggttggattgctatgcttagtttatttaaaacatggcatttggagagagttaaaataccagcacactgtgtctttgcctctactttttttctgaagcaaattggttgggtctatttgcaaaagctttagctgtaagagagccagtaaagaggcacatttctactagtgcctattgtgataggccttctttgtcgtgttaattctagtagaaataatcatctacattgatttataaggttggaattgaatggggacattgattcaaaataaaagaacagccatggacattttgatttatgttggtattaaggcaaatcattcagattcggtttgtacaatctaaggttgcttgtccagtggttagatgtcagaatgtatttagcaatttcttgatgaaagaaacaaacccctgatagaatgtatactttttcggggggggggggggaggggctagaactgtaattttttgcttgttgtgtggagactgctacctgcatgtcagtggttcttaggtaagagaggattgctttagagtgaaataaataaccttatcagtcactgattttatgggacaagaatgtaaatgtagtgagtaatcagagagcatgtaaatagtagcagataatttttcagaacattggcacttagtttgaagatgtctttcatatttaagagactgaaactcttgtcccaaggagtatgatattctcaggggtcagttatgatgtgaagaaaaaagtagccttttgttataaaggggttcctacatctagtaatcattggtggatttactttgcttcctgctattctttgttgttctctccagactgacattgatgccccttcctcacctctcccatagtcctctctgtgtttctttttttttttttaaatgtatttatttttattatacttcaagttttagggtacatgtgcacattgtgcaggttagttacatacatatacatgtgccacgctggtgtgctgcacccactaactcgtcatctagcattaggtgtatctcccaatgctatccctcccccctccccccaccccacaacagtccccagagtgtgatgttccccttcctgtgtccatatgatctcattgttcaattcccacctatgagtgagaatatgcggtgtgtggttttttgttcttgcaatagtttactgagaatgatgatttccaatttcatccatgtccctacacaggacatgaactcatcattttttatggctgcatagtattccatgttaaaaagtcaggaaacaacaggtgctggagaggatgtggagaaataggaacacttttacactgttggtgggactgtaaactagttcaaccattgtggaagtcagtgtggcgattcctcagggatctagaactctctgtgtttcttaatcacaacatgtgtcacactgagacctaattgttcccatatttggctatctctaactttaaacattaagctacttgaaagcaagactgaaacctttcgcagcatatagcagataggtatgcatactcattgttgagtaaatgaaatatttcagtggctattgggtcccaaaagcaggcctaaggtacaccagtatgctgaggaggcctcagtttt

SEQ ID NO: 1880676 - DNA, 4001 bp, Homo sapiens
aattgggagtgtatctgctgtctcggtttgacaaactaagctttgacttgtgtacagtaacaagagttttcctggatttaaagttgttgtccccagcatatcaaatgaggtgacgtatatcagatcctgtggttgagcctcacagtgcagaagggcacctgctatgggtcagcagcccattgaacaatggagtttaagacttgcagtttttgagcttttcaatcacctctttgccaaagaccaatgtgtccattgcttggcagtttgacatctggagtcgtgtggacaggggtctacatccaaaaggcagcgccactggggcttagtttgttcaggtttgtgttcctaggcagatggaggctgtttgtctcaaatatagctgctttaaaaaaacaggagggtttattgatcagaggtagtgactcatgacgttgaaactgtgcctacataactcacatgacaaggctggggtgaagaggacaggtctgcggaaggctttccacttagtcctgggaggccccttttccctctgtccaccgtcccctcctgcaccatcactgtcacttcttttctgaaggctgcattgatgcacatggttggtgcatatgggtcgattgatgcacgtggttgcatgtggttgacgcacgtgtttggagttctctctcttcctgagatcagctgcatccagccatggaccttctcttttgccggttctttgtgaatcataaatctacttataatgcctttacatactgatgttctttttctatttttcccagacttcagaaatttcttgcctttttttttttagagacggagtcttgctctgtcccctaggctggagtgcagtggtgcgatcttggctcactgcaggctctgcctcccaggttcacaccattctcctgtctcagcctcccgagtagctgggactacaggcgcccaccaccatgcctggctaatttttttgtatttttagtagagacggggtttcaccatgttaaccaggatggtcttgatctcctgacctcatgatccacctgcctcagcctcccaaagtgctgggattacaggcgtgagccaccatgcccggccaatttcatgctttttagatttatgggaaatagaattttttcccttctgcaaaaggcctatgtgctctacacgtggttaatagccagtctatgcaatatgattgatgttaaaggtaacatctcctctgtgtccccaaactaatcagtgccccatcttagactatcaacacctacacagtctggccccaggggtatcagttttccacttggtactatcactgctgtaaacaacttcatgggctgagaagcccttactttcataacccccaccttccatccggggctgctgtgaactggacaaccctaaagcatcctgacaaccagactcctgttgggcaggcggtatctggctggtgtgagccatttacatcagttgtattgaagggatcaatgctatgctgggacccatccttggtgctcattttagtcgacttcatccaggtggaaagatgcaaccacaccccccggagcccaggtttctgcggattcctctcttttgtctcccttctgtgcagtttctggctccatttttatttgttcaggctgtttcagtgacccttcctcactcttcccctctgtgggccgtgcgcattcctggcaaccagtgctctgtcggcttttgcagttgccactggctggctttctggaggcagcctctcgtctctgcctgggtccctcttcctccaacttgctcagtgatgagtggggctcagagcctcactcacaggctgccctccgcaccgcgccaagctcatgggaggggctcgagacctctgcagcacctaggcacatgcctgcctttcccagtgaccaggcccagcccagagctgagcccacagctgcagagatcaccagtccccaggctgaccaattctttacaggtgtaggctgaagctccaacccactgcacttttctctatcgtgaaatcggatgtgaatttagggtgcagatcccaggaagagtgatgacgcctggggataacagtgtgtcttgacagaagagttaggacccaaagccagcatctcccaggagaaagcaaaatagtcattttctagaccccggggaacaagtctcctgacagtatcaacaggagggggtactggttggagaaggaggtcagggtgacggttgtgtccagctcagcaaagccaggtcctcgcctcctttcacccatgggaccccccagatgtgccagtctgctgtcggctgcctgcttctcctacctcctgcaagctctgcaggtggcagggccctttctacactcacggaagtctcaaacaaacttctgtgacacctcctctggtgtgtggccatcatttccagccccctgcccaagtcctcttctggggtccttgagtctcctggggggggggtctcaggtatgtgcctagaacttctgctgcagcccctggcctgtcccctgggccccaccctgagtcacctaccgggtggggtccctgagctcctggagagcagcaagggaatgcttcccatggtccagccccctgggcggactcttgcgcctttgtgactgggtgagctgtgcatttccagttctttgccagctgccccacctccccacccacatcccttccattggtgttctcaggaataggtgtttacagtcttattttttcttaaaaattcccatgcatgttatattctactctaaaatgtgcctcctctgattttaataggaccccaaagcaccctgtggggttagctccacaaacttggaatcaaatatgtgtcccgtgacttcttcccattccctggcccccagcacccacacaggcacccagcttgcaggcacagcggccgagagtgagggaggggctgcctcctgggctccccagggacaacggggcactctgctctccccagtggctgagggaggaggattctagtcctgtcaccagaagcctctctgggttctctgggggcagaacgcctctgcttggctgcatcttggagccctccatcctggagtcacctgtgaggtcaactgagcggagcatgggctgtcgggcctgggtttattttctgatcgttggtgtcctctggcttcacctgccaaagcatcgaggattgttgttgactgatggaagtgctataggcttgtcggtaaatgtggggaaaggtggctgtcattgtgggacgttttcactctctaaacttaagtgggaaatttctgtcaggttgaggaattgtcaaggatgtcggctttcaaggtgacaattgtcgtgctgacagatacagcacatgggtggtagtggagtgccgggggcttggggctggtgtcctggctgctggagtgtgatttggcactagagatgaggaaagggaaagtgccactgggatgctggtattcctggtggtgtccctgagcccgggaacccagtgtggggggcctgccatgatggccacaaggtaacctcaggaggaacctgggaaacgttttatattaaagttttcatttaatggtccattctgtttgtcaagtggtgcatatagaaaaattgtggcagttgcatggaatttcatttggaaacaaatttaaataaaaagtgagtcaatttaaaggaactcattaagtaagtatcgtgaaactgaggcttggaggaccatagtttggataaaaaatgccttaagttgaagtgaaatcagaacctcaaagcgagatgtgcaatctcatgttcatttcagcattattcacagggccaatatctgaaagcaacccagatgtccatcaccagatgaatgataaagaaagtgcagtgggctgggtgcagtggctcatgcctgtaatctcagaactttaggaggtcaagacaggaagatcgcttcagcccaggagcttgagaccagcctgggcaacatagcaagtccccatctctacaaaaaataaa

SEQ ID NO: 1880677 - DNA, 4001 bp, Homo sapiens
tgatggcaagactgaaggactgctgagcacttgagaggagacccagtctgtggacatgcctttctgactgatgtaccctggtggtggttttgtttttccttgtctgacttcactctgaaaagggcgctaatttcaagcgatgagcaagtcatatcaaggctacccatatggcagagacagcaaactttactaaaatggtggtttgtccctttctttattgttatttttttaattaaagtttgaagttgttttctcgttttcttacatccacattttcttccatgccctgccagtggatgagatggagtcacagattttggagctgatgtcttccatgagtcgtggctgtgtggtggtgaggtcggctgctgctggtgctgtccagttttgaactgacttgagcgttgtggccggtgtagcagtcagccatagactaggggaaccttggtgtatgtgtttttatggtttcctttagcattgttagttcaaaagtatgtcacctattcagaactggttatttggttatttcagaactccaaatcttacaaagtctaatgaaaatcttacacaatcttacacagtttagtaaacaaaacacacaaggccagagggacaaatgtacctcagagctggggctctgagtcctgcccacttttcttgtgaatgagcttcccactcgaggttggcttgctcctctttctaataattctaacaagtttaacgggttttttattgtggtataatacttataacatgaaagtcattataaagtgtgccagtggaatttatgttttattatattaatgatgtttcgaccgtcagcactgtctagttccagaagtttccttttgggaagttttcatctccccaaaaggaaactctctacccatcagcagccaccccgctgggccccttcttcctggccccaggccaccacaacctgctttctttctctgtgaatttgcccactctggagatttgatataagtggaatcatccgatacatggccctttggtctagcttcttttacttcgtattttcgaagttcatccaggatcatagagtatatcagaattccattcccctctatagctgaagaatgtcccactgtatggtatttccacattttgtttatccattcatctgctgacggacattgggctgtttccaccttttggctcttgtgggtagagctgcacttaacatttgggtacaaacatttgcttgaacacctgtcttagattttgggtgtatacctaggaatggacttgctgggtcacgtggtcatcctaggtgtacgttattgaagagccgccctatgttttccacagcagcccttggatttcacttttatctacagtaatgcggaagaagggggctgatttgtgacaggtgggcaaatctgcagtgttaagaagaggcaggagacagggaacccatgcaatccacatacttcagaggcaggtggtgctcctggctcacactgtaggtaatatttgccctgtgcctgtcagcttcatctgtgtgcatgggctgagctgggaagaaccaggggacctggaaaggggttagggagcttgtctatgccagcatccttgacaccggcatgatatcaggatccctattcctcttcacaaggcccaggccttaccccaaacctgctgtacatccatcccaaggggggaggctggcatctgtgtttcttgctgcatttatttaaatgcagttcagcctaatgcacagcccgggatgagactgcaggtgaagtgtcatattttaagatgtgctcatgagaggcatggatacaaggccaggcctccctggctgacatttgggtgcttgccatgggccaggccctgccctccttgctgggtgagcgctgtaccagttggtcatcgcaatggtcttaagcatcactgaggaagacattgaggcccagatagggactgtccttggccaaggcctcctagccttgagtaggggccccggccagcagtggggctcactgcctctcaggctcaacatcccagggggatgggaagaaaacattctgggagatgagtggagagagactgattctctgtaggtgatggcatgtgccttgagctgaaaggtgcttccggtttctttgtagcgatggggtcagctgctccaggcagctgtggcagcatgagtgaaacagaggggcttattccagtgcatgtgggggagaggagggaggtgggctcagccagagcagagggatttgaagagtggcagtggaggagatatttgaaaggtgtgttgggacccgtatgcagggtgccgtgtttggactttgttttgtagggcacaagacagttgaaggctttggaactgggaggaaagtgacaagaaggagtaccaggctgtgggacactggacactgagaaaaggaagaggctatgggggaagagaggggccgtgagacccggggcaagtgtggacttgggggacacagtagcggaaagcagcaggcctgggcagtcacctaactgcaggtgccaaggtcgtggtctgtgtcccgggagaccagcgggtgggtgtccagagatgggggcaccagaaccatgtgggtcatgtatatttaatgctgcctgcttgagaaagcaggggcttggcatatgttttaggagaaagttttatttcttgaaatggttaaactgataaatcctcagttatcccaaaggctcagggttccagaaaatggctccgttgaagggtgaatcccatagatcttataagagtgattgtaaccctgccttggtatagccagggagcagagatagagggtaggaaccagattgccctggggaaagcaggtcagcctgaaacggcatgacctttgatgtcacctccgtgcaggaatgaatttctctaccatatgaatagcaccatcaactaatacatttttattattcctgccacttcataaatagtgtctccatcttaatttgcatgtgtctgtcactctccatggtctttaaaggtttgtataaacttgtaaattaatcctcctttacatgcataaggcaaaccagctccttgatgaaacctttgatgaatctttttacaagtgcataatatccaccagccaatttcttattctgtaaattattttgccattttggttttgtttaatttagggtgtgacagtactggcatcatatttctgtctagtgaataggagaatcagaccaccaaaatattagaggagaccctctgagttggtagagattgaagcagagctaagccctcgctggtgaccaaaagaaacttcgtctccccgtatgaatctcattcttggcaaagcccacagtttgagaacccccagcaggcattccagagctgcactgtcccataaggtagccaccgaccacactcagtgaacagcgaccacattgaagagcccatacacgacacgtttccatcagtgcagaaagttccactggacagcactgctccacaataatgaagaaaaaggaaacctgttttactttactgagtataattagcagaaagtcttatttgatgacttttctctgggtcccccttgtcaagtgtgagtcctctgagtggagagggctatagtctctccatagtaaggcagaaagacgtgcccactgggaaacacccagcaatttaatagggccctgggtccaacaccaacttggagttcttaactaatgccaagccaggtaaagtgctttgttcattgagtcttgcaactccattagtgattcaaaacaaagtaaacctctgtccctatctctgtaggatagttgcagggaagcaatagcttgtgtctgtagaatgcacttgcttttactaagaggcagtaaggaactgtctcagtatgaaaatgtgcatatacagaacgaccatccgtttttggtgtaagcaaaggggaccatgtgtgcctgttgtgcactgtctgtgcagaactttcagaaactgtcagtgatgcacaaggacgtgtgtg

SEQ ID NO: 1880678 - DNA, 4001 bp, Homo sapiens
taaaaagattgggtagtaaaatataagaaggttctactgtgccaggctcttggtccacatttccttatttaattctcacaacagaaggcaaaaaggtgagtgaatggcccaggacaagtctctgactcctaaccagctggctctcaagagatacttgccaaaggaagaaatggcctatgtataccattcacactttagtatgaatttattcctacagtattatttccactctgcatctgaaatgaaagacaagtgtttcatgtaagctgcaccagtaagagatgcctaagaggctggctggtttttgctgtgcaagtggttcgacgtggggctgcagaatactctggcctaattcagagctgagaacacagacaccgtgggcccaggagtccacctgccttgagtgttgtgactgcacttgggcaggagtggagccaaaaaataaaaacagaagcagccttggcacatagtagaaccttcttatattttatttacttcccaaccttttacatgtcatgaaatgcatagaatacaatacaatttttttttttttttttttttttttttttttttttttggcagagagtggttccccaaggtggatgctattcggggaaatcttgctgatcttgccctcttcccaaatgcatgggaaatattacccatttgtcacacaagctgtctgaggacgcagtagcctgtgaggtcaggggaagagccctggctcctctgaaccttcctcttggtagcacaggccatggcacttcggcatgtcagatctaagccagaatgcaacctcctcagtcacccaccctgtgagctgtgggctggcagcctgacctctctgagcccaggcgggtgaggaaccctgcccaggtccgtgggggggtggaaggaccagatgtcacgtgcctggcacatcctgagtcccacttcatgtcctttccctcaccctccgtgttccctcagctgagctgggcccaaatcttcatcccagggaaatgggacccagtgaccaactgggctgtgctactgcaggcacctttgaaatgagcccaggggaagcagtaagaaagcagcaggctatgcttggagaagcgcccgtcctgtccaccatcgctccacctttctccatcactccttacctgacctaccccaacacaggtggccagaggcaggagggctccccaacagctcctacaggtgttccctgcagcttccagccaattctcacagagcgacagctgttcttctggcctttgcttggggtctgagcccaagcacatgtatccacatgtgcgagttcaggctgagctcccacggtgggcagcaccttttgtgtgtgtgcctgtgcatgtgtgcacacatatgtgtgaactgtgcaggctgtaatttccaaaaccaaatttggctttttttgatttgtaagttatttacatcaacgaattttaaagaagcataaaatgaaattaagttaaagttttagtggatcacctctgaaaaagaaaaactttcattctgtgaaattggatttctagaaaattccaggattccccacagttaaaggcacaaggcagggacaaattctggccatgtcacatgcagggggcatgggtagtaagagtgggaaatggggttcggggctcagttccccagcaccttgctcttcctttttctgactctcctggtttgtcttttctggtgtctgtgagcccctcaagggcagaggccatttctcattcatcctagcatccagtacccagggcccagcctgtcatgaggaggtgcccagcaatctgagcgtatttaagactgggtcctgattctgtcttttgtcccctccttgggttcccaaactctctgtattctgctccttcacatttaaattgacccccaaacaggatctcccagcctccttggagatgtgggctccatgcagggatgacagaggctggggtctggagccttcccccagtgccaccgagctggagcctgctgagtttgcaagtcatcacggagaatcctcggctccttcggagataccacccctgggcctactctgggttctgagatggcagccctagtgccaacctcatccagaagtcatcactccctgggggactgtgagggtgtcatcgaatatctgccaatctgctgacaagtagacatcccaatggccatggagaaaacatccgtgcaagggctttgatcctccgaggctccatgagaacactgctattataatagttactaagcctaataaaaagtataatgatagaatatatatcacgatgttgacccaaaatggcaatgtttagttcttagggaattcaaagtacacaaagtccttgagaaggacacagctctcaaagagactcaggtcacctccctgcagtcgtcaccctccccggtagccagtgcaggcacaaggatctgccactccctgcttaaaccctacccccttccagagctccccattccctgtgggaagtcacaggaacacccaatccttgtgagccagaccttggcccagactctcgccagtcaccagccagctggctgctgctgttccggtgcccttcctcatgctgttcccagcggactctccccacaggctgcccttcatcctccagagctccaccagggtgatcgtagaccagaagggtccaggtgcttgaccagcaatcattctagtaacttttgggaggtcacactttctaggaggcctctagtaagtccctcccctccacttccagctggggccggtgacccctcaccctaagacgtgaggcctctagatctgtcttattctgctcccagccttccaggttctggagagcaggaggccctggcccaggaacaggcacccagcagatgctcagcagccatgtgtgcaacagaactaaatcttccagctttggctgaaagcaaacatcatggctgtctcagcaggcacgtgctcccagggttgtgtccttcctggaagatctcagcttctcccacatctgtgtctcctgaatccacaccaaaggagcctcgttcagaagggaccccaggacagggcacggacacctgtaatcccagcactttgagtggccaaggcaggcagatggttgagcccaggagtttgagactagcctgggcaacatggccaaatctgtctccacaaaaaacgaaaaattagcaaggtgggtggtgcacacctgtagtcccaactacttgggaggctgaggtgggaggatcgcttgagcctcacaggccaaggctgcagtgagctatgatctagccactgcacaccagccgctgcaacagagtgagaccctgtctgaaaaaataaataaataaaaaataaaaggaaggagccctgggtttgattcgggcctcacgatgtgccctctcactgcacgaaagtggcccaggggcacactctgcccctctctaggaggtggtagtgacctgggagggccttggagcggatctttgtgtccctcagtacatggagaagtaaactgaggcacagagagacgggcatgtgtcccagatggtgggagccagtgctcgctggggcagcccctccttggacccagcggcagaatttcagcagcaggtggggccaaataatcgggtccagggtgagagaaacacctgtgtaaatttgtcttatagggccctggagaggaagggtaggagctggggcaggtcaaggtgcccctggaagcttctagagacctggatacacaccagacagcagcggctgatgaaggaaacaggtgggcttttaacaaagtgtggacagtcacgattctttccctgtagccctgggaccccaatgtccttagccacggtccctcagctgccccgggagccgccagcatgagccggtgtcccgttttagcgcaggcgtgccctgggacactgcgggcgcccagtgacccgactgagcaaaaaggggcttcaagtggaagcccctcttccaggcacctccgtgtcactcctgcgcc

SEQ ID NO: 1880679 - DNA, 4001 bp, Homo sapiens
agaaaggccatgtctgggctggacataagggatgtcagaggcctccggggtgcctgggggagagtctgcttaatccaggtgcccacttgactagtagaaatcaaatcaaatcaaataagtgtcttctctttcaagttaatgctaagaaatctggcaggtcactgaactcgctaccgccccaaaatgccgagtgatgcatctgtctccatgaggttgctgtatgtttcagaactgggatgcaaagttcagcttcccgtgacacccgattttcagaagtatccttgcaagacattgccataattccaggtgatctgagtccctctttcttgtccgcttgactggtttgactgacttgaccagtacaatttcatcaagctctaacagtgtgagattccaattctactgtgatgtaatatggtgcctgggaggcagggtggtgaaggagctaagtaaatgggctctgggatcacaccacctgggtccattttgagctctgcctgttaggtcggggtaggttcaacccctgtagcacaaacaccaggtaagaatgccttcaccaagcaagatgggtgtttatttcatgatcacttaacagtgtgggtgtaagcagttcaggactgatatggcaatcctaaaatttgagggatgcaggctcttatcttgttgcttcaccatcttcagggtgtttctctcacccctgtgctttaggtggctttccacaacatccataatcctgccagaagaagaggggagagatgaagggaaggtacagagggaagctactcacatcactgcagctaaaacctattggccagaacttagtcacatggcaacaccaactgcaaaggcatttgggaagtgtaacctgcattagttttgtattgctgtatgacaaatgagcacagactcagtggcttaaacgacacaactttattatctctcagtttctggggatcaggagtgctcgtcctttgctcagggtctcatcaggctgcaatcaaagtgtcatccaagactgtgatcccatctgagactcaggatgcttgtccaaagttactggttatgggcaggatttagttccttgcaatcgcaggactgaggtcccacttccttgctggctgtcagtgagtccgttcccagctcctagaggctggctgctagtctctgccatgtggccctttccacaataaggcattgcaccttcaaggccagcaagagcattcctctgactctttctctttagcaaaggcccagtttcttttaagggctcacctgattaggccaggcccacccagagtcatctcccttttgactgactcagagacaactgatgtgggaccttagctccatctgtaaaatccctttactgctatcatataatacagcctaatctaaaggagcaatcatttcatcctattaccagtcctacttgtactcaagaaaagggggtttaaaggctatatacaccagggggtaggaatcttggggaccatttagaattcttcctacttcataatctttatttgggtggctatatgcccagccaatagtaatcaatacaattctgatttctgtagttctatgactggagaagaatgggaaaacgatattggggataactagtctctgctataataacttattatccatgttatcttgttatttaatttttctgtgcttcagcttctcctataaaacagggatgatgacaatacttcatacaaacacagaaataaaataagggaaaaaaattcaagagtcatcaaaaagtctagccatatcttaatgactaatgagtacaaaaggggcttgttgaaatcttcccaatcttgaccttttttatacaagtgctagacaagtggaaatctgcagaatattcccagcacctcaaactcaccattgcataacaaatgatgtcacacagtgaagatgcccccaggtgacatcacatcctgagaggaggagccgctagggcaaaacctctagaacctgatgtgcattttgccagggaaaccagagttgcacgatttctatgaacttgaaagttaatcatgtccagtacagatacaaagcaagagtgtgcatatgtgtatggcatgcctgtgtgtgaaattagccacatattgattaaactttcctatatgctgaagggatggggtggtttagagagccgttggaagaaacaaagcaatgaacttatcatgttgcttgactcaacgagctctgggatttagaaactaaatctgagccattagtatgtggctttacttttttaataggaaaacattccacataggtctagcaacgttcacgttagggtttttaacactttcatatgcatctcagatagccaacctggagtggtccttgagtaacacacaatacaaacaattattccagacatttcaaaaatgaagtgctaccagcttcattgtgtcccccagctctggcgagtaatgaaagacatattcttaatgtgaaacaaaagaggattgtgaatattaaaaagcagcccagccagttagagttaaaccgtcgggataagatattaacttaaaccacatgtgaagtgcagctgtttctggtgaagctttcatcaggctcaagtggaaagattggtgggttttaatatgtggtttccagccaagccaataggaatctggggaaaatgtgtgtgaaatcaggcctctgctggggggtctcgggctctgggctggcttttctttctgtgaacataaacaaaggtaacccaatgctgagggcaaggcctgctccatccaaaggtttagctgagagactctggagtgaccagccagcctgtggagtttctggactcttcattctccctttcaagaggaatgcataaataggtcccatggtgttaagagtagggatgaaggaggagtcttcttgtatctgttccctgccacttcatctcaggaacatctagaatttgttcagctcctaataactgacagcatcaaatggtgccaactctattcgaacttactggcatgctggttgggtttcacctctgaggatttaaatttgcttaagaaaagtggtgctatatacgatgcctcacctacctaagaacatgaaaatattagaaattaatgaaaaagtatgagatgagtgcaaaataaggattaattgcacactatttctttacaaagactaaattagttaaatagcttaaaggttggttgggctgctgcctgattttgtccagccagttctggaggccctagatgattgcttctggactcactgctgggtgacgctgtcagccttccactgcttacctcctgcctcataatattgctttcagcttcagaggtgtggaacagaaataatctttatgagcccacaaattcaggagttgtgggagaaaagtggaaatgtctgaactgtactcattgaccttaggaaaacagttgaaatattaccatttctgtgcattgattcatatatttaacatttattaggcagctagatgattcaaaagactttgcaaaatgctcttggggatgcaaagatgtgtaaaagggaaaggaattgacatttattgagaatatactatatgccagacatcacagaggccattggattacattttctcatttaattcccgaaaccttgaaggggaaagattataagataagatctttgctctcaaaagccttccagtctgtgattaaatagtagataaaagacatattcaaatatccatgaaataagatattctaactatatgccaaaggagaggttttaatgggagttaagagtctggagtcattacttggggaatgaaagaaagtttattggagaagaccatatttgagttggacactgaagtttgggtaggatttagattcacagagagggaggacaaggcatgacccaggtgaaggagaagatgagggcaggggaagcaaaaggaagaagcaatccctataagtctcatgctactcagaggtcaagggaagatcacttataga

SEQ ID NO: 1880680 - DNA, 4001 bp, Homo sapiens
tcccttttgtagccacttggtcttttgacagcttggggtacccatccttcaagcccctctctcctggggcccagtggccgcctctgggcatcacggagagccgctcttgtgttggggcctccggctcctcggctctctgcttctaaacagaacaccctcttgtttctgaaagtagcccatggtcccctgagggtcctgagcacagcccccactcatctgaggatgaccattggggcacggagcctgccccaggccctgggctttgtgcccagggctctcttctccctccctgtcagggtttccagacccctcgtgggcacccaggatggacggcaggcacagagctggagggtgtggcctgagatgggccatccggacgactcgggcctctgggctcaccagagtgctgaatgaaggccggagggcgagagtgggaaggatggcatcacccaccctgccggtggcccctatggtcctgcggctcctgctgcttctgggttaccctgggcccagggtgcaggcgcccttggggaggtgcacacgggaggctcaggccctccttggacattcctgaacgcccccatgcatccctgcagctccttccagaaggttctctcgatcctgtctggctcctcgggggtgtgtgggaaaccaggccagggtctcccggttgttggctggggtggggtcctgccttcgccccttagcattcaccccctaccccttttcaccatgtaaaaccctgtgggccctgggccctggatgctctgcgcccgaggacctgggttctgccatcacctgggcagtgtggggggcatatagggggaacatggggtgcctgatgtagtgcctgtgtttgaccttgtttaggtgaagagcaccctttccagcttatgttttgtatcatgaccgggaaaggtacgaaacaagtgtgtcggggcccagatgatttgatggctctacgggccgagtatgggacacaggatagcttggccctgggtcaggtattagtcagtccttgctggcacctgggcagggacacatccgtggatggggcctggccaggtggcctctgaggtcctcgtgtccactggaaggctgtgtcctctgttgtagtcactgacttgctggacctgggtgggagctcacccacctgtggatgggccagggagctcctggaatcactagaaagatgaactttttttgccttctaaatgtatgaaaagatgggaaatgataggaaaataagtggaagtcagatctattcaggaaaatgacttcccagggaagagctggggtgcctccaaacccagaatcctcggtttctagaagcaaggctgaccgaggtgggcagcattctttgggaccttgagtgatgaagtagttacttaagcagagtgtttctcatgtgaagccaggcagtctaggacactaggaatcatttcagcgtgggggagacgcagacactgtgcttgcccagggtgctgcattcatctgaaatgccggtggctaccagctctttgtcacggttcctccgtggtctccttgaatgctgtcagattcagggcccgtgtgggcagcggcagcctcgttcccagtcgtgtttagggaatggggtcagagaagtacttgctaaagcttcctgtgtgcacgtgtaattgtgtgtgcatgtgtgttaaataaatgtatttcaactcgaaatacacgtttcgtggccatcagtctagggatggctagaatttagtcactaaatgaaactaagccgcaccgtcaccaataatgtgaacatgattaaaaaccacactcagttcttattcatttacctacaagtccagaaacttttagaacttatttcaccattaaaataaatagttttttaaaaaatatacaacaataaggaaaaatttgaaagcctcttgcccctccatcccaggcctgacagagtggcttccacaaagaaagaggcagaagccagggctgtctgtgcctgcagggcgctgttgggctcacagatgacccagactcccccgtaatggagccgcggacccacagcgagccacttgcaccaggcttagccaagctgacaggccagcggagtaaggaatgttccctaccattgtccagaaaatgtaacgagggtgaaggtgtgccaagcagactccccgtgtcagccctgaggcgactgccatcgctttcagaaacctgactaccaacctggatgaaaaccgactgcttggtcatggccatgcagttagaaaacacagcagcaatcctcagatgagtgtggccgtatttgtgttactcaagctgctttgtcatctgcatttgaagaaacgtggtgagcctcctgtgtgtgcccatgtggcagtgggcacctctgccccctgcaaaggctgtctaagaacacagagcctgcagtacaggccctgcctcctgacatgccccaggccggctggaagaaagcgcgggactgtcctattgacgtggggaggggacggctggactctgtgatgctaactgtgttctctgctgggccatgtggctccccacagagaccctgggtgcccagtcattcgcgttctcctatgtgtgtgtatatatattatatatacatgtatttactaactttagaaagcccccaagggggccttgtttctgcttggacagtcagcgtccatagcgtgtcattcctaagctccattaaggagattcagaagcaagcagttacccctggagtctgcacgctgggcacaagggtcacaccttcgttgagagctcctgaccccaggagccgagggcaggacacggtagtgtttacaggacctggcaaaggggcactgccttgtgtgtgaggttttttcaccagtcagtcccttttaaaaacagcatatcttttgaagaacaagaagtttacgcaggcataagcaactcactttgcacgtggagctttcaggacgtttcatgtctgttacgttatagcctctatcctcatgggggctctgagttcagcagggcctgagctgttaatctgctttttcaaattattaataatgaaagtaacaccatgccaccacctggtatcatttcatgctttctatgtgcctggtgtttacacggcttatctcatttaatcttcccagcatgtaataaaaatattgcaacaggtactgctcctgtgtggactccttcccccgagctcacactgcttgaggccttcccagctctgggctttgtgtcctgtgtggacttcttccccgagctcacactgcttgaggcattctagctctgggctttgtgaatatcctgcttttatcctcatttataggtaagaaagctgactcagagaggttaagcagctggtctgaggtcaactgcttacgggtcggggagctgggcctgcacacaggggtctgatgcagagctggtcctatctgctttataagctgtggctcacagggcactccaggggctcgagaggacctggcgggctgagatgaagactggtgaggcctgggaggcaggtgcttgactgaggtgggaagtgggaccttggtgccaagcattcccagggccacggggcaggcctgtagggtctggtgggtatctggggtcccggagaagcccttggcacggggcttcatgagagcataggcgagtgccgcgccctgcagttgagcacgggggatgcagctgtcgcagtcgcttttgaagagtgaggggtgaggcctgcagttgctgcccgacgttgtttacaagtgagcaagttttacaaaaaacatggacagcatcagggctgacttgaattttttacttgaggcagcagctcaacctgttggtttcctcaattgtgaattaaaaaaaaaaaagaaagaaagaaaacagagaaagctgacaacgtaacattgatgagaggattcttaagggagaacaagccacaggctgtcccgagaaaggagcggggagatcgaggaagcacgctgccgtgtcttgttcgtggggtg
